United States Patent Application Publication US 2018/0305689 A1 - sequence listing, part 24

SEQ ID NO: 316644 - DNA, 4001 bp, Homo sapiens
ttcaagaaatatttaccaaattgaattgacctaaataaatcttaatctgactagactttaaatttgccattgatggctccccagatagaaatgtcaaatacattaccatgctaaatgtctatcatttatgactagagaagtgatatgaagattaactaatggctgattcaatgccataacagagcctgatgagagatgctgtagcatgctggtggtcagcatagtttttagcgctactcagtcacagctatttaggtcatctccagatccacctaaaatcatggattccctcccaatgagcatacactaattggagcatatttatgtttgttcacataagctacatttattttttgcaaagtgttgtgctggaccctgtgaagcaatcaacaatgactaaaatatctccccttgacatcaggttcctaagctgctctctaatagaagttactcgtgcatgtgacaataatctaatttagaatgggattaagttgggaatgctttatgaatcctgggtgagaaagaaagaaaaaaaaggattataggaggagtgagatatgagttgagcatgagtaaatgtaagagattcagctgacggaaaaatgaaaaaccctgtctgtctgtgtggagagagaatgatgtgaataaatgcattaagaaatcttgagaagtatttagggaaagtcaatctattttgatgagaaagtgggtcacaaagaggaataatggtacctaggatagaaagaacctgggcccagattataggagtcttgtatataaagctaaggagtatgggcttcatttggaagacatggagagccctggaaaatgtttatataggatagtaatctgatcatttctatacactaagaaatacgagtcaggtagtggtatatgtaatgtcatgggactttccacagtgccagacaaatagaaaaaggtagaaagaactattgtcaaataaatgggcaaaagaagggtggatgggacaaagtaagaaggccataggagactttgcaactgtcacactgagaaatcagcaagatctaaattttggtaggagtaatggaaatgaaaaggaaaatatagatacaaaagatattaaagaggcaaaaaatcaagattttgaaacaggttgttacgagggaaaaggagcaggaaaactcagaaatgaccagtcttcactagctggtattgtaggggcatgtcaaattgagtaagacacgtaagacacgatccatgccttcagggccactgccatgcttagggcacatttgttcaagtcaaagaaaggagctccttctaggccaaaaaggattagaaaaagacacctcctctagacatatgaggttcaaaatatttcccctttggatggaagaaataaaaaaagtcatcccttcctacagactgagatggccttggccaggctcaggagggatgttcaaactgtacagttgaaggaggaactaggttctgcattccataaagatatagttgggaaatatgttggacaaccaaaggttccagaaaaatcccagttaacatctattgttccactgttaccataaactatacatatatgcaagaaataccaacattaaaatccaaatgtatctcccagcaacactttctgtcctgtcatagactgctgattattcttcagatgtgacaactctttcttcatatagacttggtaatataaaaattaccatcaaaataaaaattctgaaaaggttagttttggataactggttagcctatgtaaattagtgagagggtgaaaaaagcaagtaaagaattaacttgaaagaaaacaaaattttaaaaatagaaattatcctaactggtcatgctttagctgatatacaagtaaatttcttacctatatcccgaggttgtgtgggcagggttagggattcagtcaaaaaaaacaagaaaaaaataaaacctgtaagttttagtagtttcatctttgtagaaaccacatttacaaaagaaagtaatgttgttgaggaaaatcaagtttttatatcattctttcacattatcagtaaaaaagtaacctatttaatctatttctgaaatactgagtatttgatttttttgatcactctgcagaattcttgctaaatattaaccagaaaaaaaaattacctttgtgtttcgctggaaaaaatctactgagttggaacaaaagtccacaggctaagtatgcacaatacttaatcaaatagacaaccaaaaaaaaacttaaaatactgcaaatgttaaaggaacaaagggccagaacagatataatcaagcaatctctcttatgcatatatatccaaaggaagtgaaatcagtatctcaaagatatataaatatgtacgcctactatgtactcacaaaaattaaaaataaaaaattaagaagatatacctgcacttcggtgtttattacctcattattcacaatagccaaaatatgaaaacaacctgtcagtcaacatataaaaaactaaataaataaataaatctcacacgcacacacacacacacacacacacaatggaatactatttaatctttaaaaagaaggaaattctgccatatgagaatatgtggatgaacctggagaacatcatgttaagtgaaataaatcagacacagaaagaaaagcactgcataatcctacttatatgtggaatctaaaaaatcaaactagaaacagagcataaaatggtggttatcaagggcaggaggtagaggaaatggggagatgcttgtcaaagggtgcaaagtttcagttacgtagaatgagtaagttcaaatgcatcacatggactacagctaataatactgtattgtatgcttagaatatgctaagagactaggtcttaagaattcacactgtcttaaaagaaaaaaaaatagataactggctgggcgtggtggctcacacctgtaatgccagcactttgggaagccgaggcaggtggatctcttgaggccaggaggtcaagaccaacctgcgccaacatggcaaaaccctgtctctacaaaaattagctgggagtggtggcatgcgcctgtaatcccagctactcaggtgactgaggcatgagaatcacttaaacctgggaggcagaggttgcagtgagccgagatcgcgcactgcactccagcttgggggacagagcaagactctgtctcaaaaataaataaataaataaaatacgtcaagagacggatgcgttgattagcttggctgtagtactcaagtcactatgtatatgtattcaaaacatcatcttgcacgccttaaatatatatattttttattacctttttttttgagacagtctcactctgtcacccaggctggagtgcagtggcgtgatcgtgtctcactgcaacctctgcctcccgggtccaagcgattctcctactacagcttcctgagtagctgggattacaggtgcaccccaccatgccaggatattttttgtatttttagttgagatggggttttactgtgttagccaggatggtcttgatctccagaccctgtgatccgtccacctcagcctcccaaagtgctgggattacaggcatgagccaccacaccaggcctttaaagtaaaaagagttttttaaatgcaatggaagccgatgagaacttgataattaaaataaataattactggaatatattataacacaggaatttttttaaattcatgaacctataccaatacaaaattaaaaattgggaaaggaaagttcttctctacagaagaatgccaactaataattgtagttagaaacaaagcataaacatttgtaaccaccatagtaatagctgatttaggccagtttcatgaaagaatgataaagtcataggtgaataattattgaggaatagcatatttatactttcaaaatatcacttcacaagtcactcattaatttaaaagtgcaaaacacatctttgcaggtgaatacataaacaatgatata

SEQ ID NO: 316645 - DNA, 4001 bp, Homo sapiens
cttgtaagtggcttcttgaacaaactgggcaaaaaatatggtagccctgaaacaaaaatacgtgtgaatccttaaggaacagacctgcagcaagcttatttttctcaagtatagtttttcatttgtttgttttgttttctatttatgttgtaatctgtttagacatttgatttgtaaaattatgtaaaattagcttccaggtcatctgagaagaaactttagtctttttcttgttttcttttgccataaatatacatatagatgttaaaggctaaaataagtggatttcccataagagtggtttctccttctgtgaccatccatctactgtaatgtacccataattgagggtatctatattctttatggttacttttaaatttaagcaaaaaaaaattggtaattagacagacctctaacagtgtctattcccagtatgatcaaggtctaaaacccaagactacagtgctcatggattgactcaaagcaatccttatgcaggtttggatgtgcaaggagtaacagcaacacactactttaaattctttgttagaaatttttaaaatgtggaatggaaagacatccaagagactaacatactctccacaaataacagcaaatagaatattttatcacctatggtttgctgctaagatttaaatagtatacagaaaagaaaacattataatatcaccctgttggtactgatgagaaaaattcctgaattagtatatggctgtcactgatcagacactaatcttcagtttctaaaatctgatttggtttgactcatgagatttcaaggaatcaaaaggtcaatgtcgaagacattagtcaacagtttaacctcttcaacatcaagttgatattcagtatgagtaacttttcttgaaattgtccaaattgcttttgtgcttttaagagctcacaggggtacccaattttatttaagtatttacttatccttgctttacacatttaaagtacatttatataagcaaaacttacaggtcagctaaacttatctctgcagtacattggtaagaatccaatatggaagctggaaagcaaaataaacttcatgaaacgtgttttcaactgcaaccaagaaagtaatcattgttacatatgaatgtttgtgtttcagttagaactgtacagtttcagaattaaaagaacattagggataacctaagcatcttaattttatacttgaggaaaagaaaactaggaaactaaggaatgaagttaacaagcataatttatagtagacctatcactaaaatccagattttgtcttccagttgtttggtttttccctgtactgtagtgctgtaactgtcctgaaagtcaaatggttaaaaatatatttcaggcattcttttgaacatagttatactacggtttgccattcatatcccagtcacaatatttcttcttcagaccatcaaataatgacccatttttctgtattaaaaacaaagattttatctattttactagtctgagggagttatgtgaaggagcataattctggcttcttcacatataaaattttatttatattcatatatatgtacatatatgtgtatatatataatttttcaaagttaatatgcataccattgaagtgtaaaaattaattcaacatgaaacatacaaaccattcatccattaaacactgctataactttgtaaacctcttgtaaagttacaagtttatctttcatttaaatatatccatcagttaaatattttttctccatgtggaataataaatatgaataataaatcaagacaaattaatgcaaattttataatttaaaaaattttgatatagagaaaagacaagaaaaacacaaaatatctcacctattccatattcatttctatgcagtgttctggattcagtaaaatttagtaggaaaattaaaaaaattgattccacccacttcatggttgctagttattttgttattggcagtggtggaagcacaatatggaaaatcatgctgaaattcttttatactcttttcaggcaatgcctgttaactagtaaccttttgttggtatatctgttactttatggtatttccttaggttgaaaatgggacatttgccaataattaacagcatagcggttatttgtattttatgttcaaggacacagagctctttggggcagaaaaaaaaaacttgcaaacttattttattttgcaaatataacaaatattctcctcaaactacagaatattcaaagagatgacttgtccctaagttgcagaataattaatttctctcaaattaagttaatgaagccataaagaaaagacagcagatttggtatgcaattcatctaaatacattaattctttaaaactattaaatgcctatcatatgccaggcacacaagacattgtctgaccaattcagactcttcatcttgcaaatataacaaatactctcaaagtacaaaaaattcagagagatgacttgtccctaagttgcagaataataaattcatttcaaattatcattgcttgataattatgctgtcattgtttagctcagaaacacttttcacttaatatgtatgtcaataaggtacattttaaagtatttagtatgcgatgtatggcttaacatagaaaacttagagcacaagccctaataaaccaagtcctataataattttatttgcacatgtgtctttataaagtgggtcaggtgcatcattcacttagcaactcaagatgatgatgttaatactaaatgatggatgctaagagtggctcacctcctatcatccctgtctacaagggttcccgatcttggctacacattagaatcactgggggaactttttgaattcccaatgcctagtctgtaacccagaccagttaaatcagaatctgtggagttgagacccaggcaccagtattttctaaagcttcacaggtgtttcattattctaaaggtaagattataaaatcaaataacccacaccaggaaataaattaatatggtacattcataaagtagggtgatatacagccatcaaaataactttgtggaagaatatttaatgaaatggaaatatgctcataatatattgttaactgaaaaacaggacaaaacaatacatggagagtgctctcatttgtgtatcattgtacctcctctgtattcctcccaccctctaaaaaaaatgttgaataaaagacagaaataatggacaacaaagttttaacattgggtttctctagatggtaagataagtgaatttaattctatctctctctcaaaacttcttcaatgaaagagcagtatgcaattttaaacataaaatttttaaataagctaagtacagtacttaaaaaatagatcatactgcaagctactagggcacacatttaaacaaaaagggtttaccgtcagtagcacttccagcaaatacaaacatttatcatagtataaacaaggtcttcaatgctaatcaagtacaattcccattcatttgttagtttttgtccattttctgctatgcgtgtctctcctaagttttgtctcctaaggaacatgttaacaaaacaggccttgctcacgtactctccagaaagaggtagcaccatccttgtctatccgtttggattccaggatagtatttacaaagtgcagttcttctactcttcctcaagggggactttactcaaatatatgaaagccaaagtatttgttatgaaggaatacctgaaaagcaatagtcatgaagtattagttatgaagaactgaaatagagttttatgaagcaaactatataagcttgcccaagcatgggcaaaatatcccaaaggctttcacagtgtctggttcatagccaggactcagcaacatttgatgaatgaataataaatgtatttgttccaacatgggtttaatgtagagaaaggggttacatttggcaaatcccagattctataaagtctgaaatctttataact

SEQ ID NO: 316646 - DNA, 4001 bp, Homo sapiens
tttaacaactttttcacatttactgagttaagctgattttttaacacattagtttatcaagtgttacaaaggagtcagtgaagagtcaaaattatttaactagttatcagaagaactcaaaaaactggctattggtgcaagctgaaggtttttttttttttcacttactaatatctatctcttctgtgtgcgagaaacgaaatcagtatcccctcctttattttaaaaggtacaatcgaaaccactaaaaggcagttaaataaaaaatccactaaaccgcagccttcttcacacatttcttctgcatcattagattaaaatatgcataattgatatgtgtattgaggtaacacctatcccaggaagtcttaataatactgaacagcaaacaattacaacgtggacttcatatggattagttcattgagtcttcataacagcttctgtggtaggtactgtacaatcacgaccctcattttaaagaaaagtaaacagagccacaggtcaggcagttagtttaaggtcacacagctggtaagtagcagagccaggatcccatacatttgggggtgtggggggaagggtctttgatggacaatttcttttctggtaacaacagaattccttgaagagtgggtgctctggttggtaaacactacagcacctacaggcttgaaagtgtatttacgcaagttccctctttcaatacaggcaacttaaacacagaactgtcccccgcccaggctgatgcaatttcttttcgtctcattatggctgggaatatctttctcacagcctgcttcttcattttctctgaatcgtatgcactgccaccaaattctggagccaattctgccctagaaagttaatacgttagcaacctcagatggaggaggaggggtctgaaaatgactcttctggtcattaagcaaatgaaagaaacaagcatagtacaatgcgaaaatgccaagataatggtacgtaaaggctattaacaaggtgtagaaggcaggaacctaactcattctggacacgagggcagttaagtcagggaacgcttcctggaagaggtgataccttagcttagtggttctcaaccctgtctgcaaatcgaaatcacctagggagctttttaaagaaaaacagtggccctgattccagcagttagatcacagtcacaggaggtgggccccggcaggatgatttttgagaagctccccagatagtgtgaatgtacagcaaaggttggaaccttgaattctaagtggcaggtaaagtatgacaacacgtggcaaaaaaagtaaatgggaaaagagtaggctatggctgggacactattagtcgtctacaaaattgcaaagaagtgaaggattagaaacgagaggtggagacgtacacagcccgtgaaaagactgtcaggcagaaaagcgtagctgctacttgattaaagcacaaaggccataactatggtcagcagcagggtggaaaatacattgcgctgggggctgcatgaagggaggacctaaaatgcaacagcggtaggtggggaggatgcagtaaaggccacttgcaagagactgagcggcgctggagactcgggaagacctagagggcgggaccgcgaggcccggcccagcccggcgctcttccgtccgccctgccgggtgactgcagcggggcgggctagtcatccccacccgcaagctctcgcggcgcagccgcccgcccaggccgccaacccgcacctgcttcggttgcattcttaaagggccaagtgttgacgaccaggggcagagggctggagcagcgcactagggcctggcagagcagaaacggcacgagaagcacaggcaagttcgacttccgcgccatccctgaccaccgaagagaccagcgcgagaaaagtcccggcagccagcgatcgccgaacaattaatccccagtgccccgcccgcctggcgcccacgcccgctctctcgggggttcgctcaggcgtccctcaactctcgcgagacgaggcgtccctgggcccgcgggagagttgtgtcacggggcactgagctgttccctgcgctaaggtgcttcttcctaagtgctgttcagatttttaaaatagccagacaagttgctgcttttcctgtggttaaaatagatttagcttgatattgggaatttaatacaaaattattcaactctgggttgcagggccccaggaactttagccgattgctgtgtactatggatttggttcttttactgtctttttaatttaaagttgaagttgaaaagtttgtcaaactcagtatattcttggggatcccaggcctcggaggtctgcaatagttatgagtgtaggtgaagcgtgtttgcttaggaccggattgattttagattttttttccattcatagcgtccgtcattttcgcaccacagctttttgtagcacttcctctcattataaatccctgagctggaagaaaaacagaaacggcctatgtaccctctacctagcacactgaagtgcagcttcctgcacctccagggcaagacggctacctccattcctttttaaatgtatttttaccttcctgcctggcactattaagtgctaaataaatgaataagaggaggaatggggattttacgtgcttggtggaggctgctcagttttgttgctgggcagacgtgcgaacatgaactaataatccctttgggtgtctggaatgcctgcccaggttgccaaggcaagacacataatcacataatttttaaaagcatctataaatctatacaaactttaaaaatatgaactaggctgggcacgatggctcacgcctgtaatcccaacactttgggatgctgaggtgggtggatcacgaggtcaggagttcgagaccagcctggccaacatagtgaaacccgtctctactaaaaatacaaaaattagccgggcgtggtggtgcatgcctgtagtcccaactacttgggaggctgaggcagaattgcttgaagccgggaggtggagattgtggtgagccgagatcgcaccacttcactccagcctggacaacagagtgagattctgtctcaaaaataaataaataaataaatgtaaaaatataaactaggtaggagttgtgagacttacaaaaccttcaaggctcttattgattgctaggaaattaaatacataatttaaagaacataagatagcccagaagtatcattatcccgttggggaagtgttaattaaaagatataataaagacaaattttctaagttcctttcatggggtttggaagaggaacaagtcatctgtgctggagtaatcataacccaatggcaggtgaaactggaaacttgggtgaaacagggtaagaaagccagaaaaacatacattgtcctctgagtaaattttccttagctcctgggctgagtatttttatgcagccttaaggaattaggacatgcctttagcaaaaattgtaaaatacaatacatggaaaattggtcttagtaccccactgatctctctagcctcttcctgttttttaaggtatttgtgtttcttctggtggaaagagcctgatctgttacctcctactatgtctatttctccaaattctttcttcttaaataaaaattcctgtcagagaaacagctaaattacactatagtgggaatggctgatagaaggtctcaatatatcaacttttccatggatatttgtatgtatgtatgtatgtatgtatttattttttgagatggagtcttgctctatcgcccaggctggagttcactggtgtaatctcagctcactgcaacctccacctcctgcattcaagcgattctcttgccccagcctcctgagtagctgggattgctactgcctactaccatgcccggctaatttttgtattttaagtagagacaggttttgccattttggccaggttggtcttgaactcctgacacaggtgatccacccaccgcccccacc

SEQ ID NO: 316647 - DNA, 4001 bp, Homo sapiens
aggtcacaaaaatgggaaccaaacttattagaaggcactgtggaatgccagaatctcagtaatcatattattcttttaatagcaacaagcattcatacagtaggtgcaggcagccttctaaggtgcttgataccttttaactcatttgaacaaccctatggaaataggagttattgttactcctattttatagatacagaaaatgaggcacaagagtagatgacctccctaaggtcacattttgagaaacagagctacaattttggtaccaaatctaagcaaacctgtatccagggtccctaatcctaaccactaggctgcagggcctcttctcagttgagatgcctgtttctggccaggcgtggggctcacacctttaatcccagcactttgggaggtgacggcaggaagattgcttgaggccaggagttcaagaccagcctagccaagatagcaagaccctgtctcttatgttaaatatacacacacacacacacacacacacacacacacacatattatacatataattaaatttttttttaaaaaaagactcctgcttctaacacttaattcaaagaaaccactgatctctgactctcagtttccctctctgtaaaagggggttggcacttgccctccctaccctacccagccttttgacacttaataaaaccctaagagtaagctgcagttgttctctaccaggcctacttccatctaacatttttctttgcaggatttggaaacaggagggtagggagacctgaggtcaaagaatatataccttttcaatggcatttcaagtgctgttggttagataaaatttccatgactccactaaaataaaataagatttctttctgccatccagcaattggtctcttatcttgggcataaagaagaacatgatgcctttctgaactggatgccttagtacacaaaaggacctctgaaacctggggctgtaaaaacaagcgggtgaagcggaaactgcactgcataatggatataagcaaatcctctgatacaaaaagttggtcgcattgttgttattctaatcagtaaaataataacgatgctcagggagtggaatgattttttcgccttcgaccagagaaacaacagagtggtccagtggttccagcctagatccctccagctccgcgaaagaagccgagatgctgactttcgcactgctgcgggcaaggaacagaaatgcacgcacgcatgcacacgcgcgcacacacacccctgactcgcgaccactgaccttgagaactggacccccgggttctcagcccgcagcggtgtggggctggctgcatccctcccggcactcacctctaaagttttcactaggatcttcatgtagatctcggagatgcccagagacactccgaagaccgaaggtaaaaggatgaagccgagaaccagcgtcagccaggtggaaaggatcttcccggccagctctgcgccctccatgactcggcgcacccactcaggagaggtccgcagtggagggccgagcgccacagcagtccctgtccccaggcagtcccgcgggagctccaggagcagagcgccgagcccggcactcacctctgcgaagggaagagaggaaggaaaaaaactttcagaattacggcaatatccttccttcctccctgggctcctcctcgcccctgccagttaactctttctccgctggctgcccaggtctgggctgaagccaccgcggcgtgcggagacctgggtagcgcgagccagtggtcggagctgcgggtaagcggaggcacaccgcggcgcgggcagagcgcgcgagcgcagccaggaacccgccccgcccggtgcctgatttcctctgggtggcgattgcgacaactcagcagatgactcacggaggccctccccgagccaggttccctgcgggagcaccgcactttggcacaccggtcgccggcggagctggcaccgggccgcgggctgtgctggaagctggctgcgctcgggcgcccagcgccctatttctgcgcgctgccctcgccccacctcctccgtcacccaacgggggagctccctggcagtacttagcccaggagtgccgcagcctcctgggcggtctccgttcttccccgcgccccgcctcccccagcactcagcaaaggtcctttcaggaggagagttttcatctgaaaaatgtcaatattttcttcacccgcagaatgaactgctgacgtatctgggacgcttgaggtcttgtttgtgtgggtgtaaaacgaactcttggaaagggcttccaaggacaggaaaacgcagagcgcaccacgcagccgtgtacgccgcttctggcttccacacctccttccccacatggcctacagctgtggggctcaatcttgcttatcccgagagtaggaagctctctccacgcgttgcctagcccactgagccgccatctccctggcacagaaaccctgcggctaagtatctgtcactccctttctgggggaagattccaaccacaccttcccctaccattcagccaatactatccgcgcttaggcgtagcagaaatgccaggccggcgcaagccttcattcaccaagctgacaggtgtctcctgggtgttcaggctccgcgcttctaccgcgccagcccttatcagagcaacgaagggcaaaaccctgtatgttatttactacattgctgttctcttagagaccagaactatttttaagaatgagcagaagggattttgagaagggattttccagattgccgctgaattcgaccaaaatctcttacaggtacttttcaggtgttgtttcaagctggaaaaaaactgagagggccagcaaactgaattgaaacagcgctgatagcaaatattgcagagaaaatggtccctgcccagggtgtggaggaagtggggagccaacgaagtgacaagcccctctgtaaagaatgtagatgtctgccttaagtacttactgccaggtagctgtcacaagccccctcccacactaagaacggaaaaaattataacttgatgattaaaaccaggttatggaccgggcgcggtggctcacgcctgtaatcccagcactctgggaggcgaggcgggcagatcatctgaggttaggagttcaacaccagcctggccaacatggcgaaacccccgtctctactaaaaatacaaaaaaattagccccgcgtggtgtcgcacgcctgtagtcccagctactcaggaggctgaggcaggagaatcacttgaacccgggaggaggaggttgcagtgagccgagatcgtgccactgcactgcagcctgggagacagagtgagactcagtctaaaaaaaaaaaaaaagggttatgaatgaagaagtgttaggagcttggtttctcaaaattaaacctctgtaaggttggctagtttagaaaaacacggaaaacgcaactaccgaaagctgcccaaagtccttgctttcaaacactatatatattgagtgcaaaacttcaaatattatattggcatatttaacaccatatgttcaggcaaaactcttattttccttttatttcctcaaaccaagataactaaggaaggctaaatccttgtaccaaagtttaccccacaagggagataatacacacaactttgcgtgtgctgagtgcacacactctccagtgatttttggtgctcatgaacaaactccacaaaatggttttggtttggttttgttttaactgttacggaagaattattcgtccacagctgtatggtgcaatggtaataaaatggaatttggagtcttcgattgagagcagcacgaacacatataagtttgagcaagtgcttctgtgcttcacctttctcatcaggaagatgggttcttctcagggttgaaagtgattgtgagcatgaaactgcatggtaaatgacaaagctctatgcagagatcagcaggcagcctggtgcaagggcaaaaactcttcat

SEQ ID NO: 316648 - DNA, 4001 bp, Homo sapiens
atacagaaaatgaggcacaagagtagatgacctccctaaggtcacattttgagaaacagagctacaattttggtaccaaatctaagcaaacctgtatccagggtccctaatcctaaccactaggctgcagggcctcttctcagttgagatgcctgtttctggccaggcgtggggctcacacctttaatcccagcactttgggaggtgacggcaggaagattgcttgaggccaggagttcaagaccagcctagccaagatagcaagaccctgtctcttatgttaaatatacacacacacacacacacacacacacacacacacatattatacatataattaaatttttttttaaaaaaagactcctgcttctaacacttaattcaaagaaaccactgatctctgactctcagtttccctctctgtaaaagggggttggcacttgccctccctaccctacccagccttttgacacttaataaaaccctaagagtaagctgcagttgttctctaccaggcctacttccatctaacatttttctttgcaggatttggaaacaggagggtagggagacctgaggtcaaagaatatataccttttcaatggcatttcaagtgctgttggttagataaaatttccatgactccactaaaataaaataagatttctttctgccatccagcaattggtctcttatcttgggcataaagaagaacatgatgcctttctgaactggatgccttagtacacaaaaggacctctgaaacctggggctgtaaaaacaagcgggtgaagcggaaactgcactgcataatggatataagcaaatcctctgatacaaaaagttggtcgcattgttgttattctaatcagtaaaataataacgatgctcagggagtggaatgattttttcgccttcgaccagagaaacaacagagtggtccagtggttccagcctagatccctccagctccgcgaaagaagccgagatgctgactttcgcactgctgcgggcaaggaacagaaatgcacgcacgcatgcacacgcgcgcacacacacccctgactcgcgaccactgaccttgagaactggacccccgggttctcagcccgcagcggtgtggggctggctgcatccctcccggcactcacctctaaagttttcactaggatcttcatgtagatctcggagatgcccagagacactccgaagaccgaaggtaaaaggatgaagccgagaaccagcgtcagccaggtggaaaggatcttcccggccagctctgcgccctccatgactcggcgcacccactcaggagaggtccgcagtggagggccgagcgccacagcagtccctgtccccaggcagtcccgcgggagctccaggagcagagcgccgagcccggcactcacctctgcgaagggaagagaggaaggaaaaaaactttcagaattacggcaatatccttccttcctccctgggctcctcctcgcccctgccagttaactctttctccgctggctgcccaggtctgggctgaagccaccgcggcgtgcggagacctgggtagcgcgagccagtggtcggagctgcgggtaagcggaggcacaccgcggcgcgggcagagcgcgcgagcgcagccaggaacccgccccgcccggtgcctgatttcctctgggtggcgattgcgacaactcagcagatgactcacggaggccctccccgagccaggttccctgcgggagcaccgcactttggcacaccggtcgccggcggagctggcaccgggccgcgggctgtgctggaagctggctgcgctcgggcgcccagcgccctatttctgcgcgctgccctcgccccacctcctccgtcacccaacgggggagctccctggcagtacttagcccaggagtgccgcagcctcctgggcggtctccgttcttccccgcgccccgcctcccccagcactcagcaaaggtcctttcaggaggagagttttcatctgaaaaatgtcaatattttcttcacccgcagaatgaactgctgacgtatctgggacgcttgaggtcttgtttgtgtgggtgtaaaacgaactcttggaaagggcttccaaggacaggaaaacgcagagcgcaccacgcagccgtgtacgccgcttctggcttccacacctccttccccacatggcctacagctgtggggctcaatcttgcttatcccgagagtaggaagctctctccacgcgttgcctagcccactgagccgccatctccctggcacagaaaccctgcggctaagtatctgtcactccctttctgggggaagattccaaccacaccttcccctaccattcagccaatactatccgcgcttaggcgtagcagaaatgccaggccggcgcaagccttcattcaccaagctgacaggtgtctcctgggtgttcaggctccgcgcttctaccgcgccagcccttatcagagcaacgaagggcaaaaccctgtatgttatttactacattgctgttctcttagagaccagaactatttttaagaatgagcagaagggattttgagaagggattttccagattgccgctgaattcgaccaaaatctcttacaggtacttttcaggtgttgtttcaagctggaaaaaaactgagagggccagcaaactgaattgaaacagcgctgatagcaaatattgcagagaaaatggtccctgcccagggtgtggaggaagtggggagccaacgaagtgacaagcccctctgtaaagaatgtagatgtctgccttaagtacttactgccaggtagctgtcacaagccccctcccacactaagaacggaaaaaattataacttgatgattaaaaccaggttatggaccgggcgcggtggctcacgcctgtaatcccagcactctgggaggcgaggcgggcagatcatctgaggttaggagttcaacaccagcctggccaacatggcgaaacccccgtctctactaaaaatacaaaaaaattagccccgcgtggtgtcgcacgcctgtagtcccagctactcaggaggctgaggcaggagaatcacttgaacccgggaggaggaggttgcagtgagccgagatcgtgccactgcactgcagcctgggagacagagtgagactcagtctaaaaaaaaaaaaaaagggttatgaatgaagaagtgttaggagcttggtttctcaaaattaaacctctgtaaggttggctagtttagaaaaacacggaaaacgcaactaccgaaagctgcccaaagtccttgctttcaaacactatatatattgagtgcaaaacttcaaatattatattggcatatttaacaccatatgttcaggcaaaactcttattttccttttatttcctcaaaccaagataactaaggaaggctaaatccttgtaccaaagtttaccccacaagggagataatacacacaactttgcgtgtgctgagtgcacacactctccagtgatttttggtgctcatgaacaaactccacaaaatggttttggtttggttttgttttaactgttacggaagaattattcgtccacagctgtatggtgcaatggtaataaaatggaatttggagtcttcgattgagagcagcacgaacacatataagtttgagcaagtgcttctgtgcttcacctttctcatcaggaagatgggttcttctcagggttgaaagtgattgtgagcatgaaactgcatggtaaatgacaaagctctatgcagagatcagcaggcagcctggtgcaagggcaaaaactcttcatctttttcttgcctaaaaggcaggagagccaacacaggctccccagggtaacaaaggctcatctttgcagtgatggaggagggtgagggaagagaagaaatgtagggtgatcctgaccctgtctcaagtcggggaaagttggtcccgacttgccgctctccttgtctctctttcactctcctcacctctcctcc

SEQ ID NO: 316649 - DNA, 4001 bp, Homo sapiens
actttaaaaacatgagcactgaggatgaagaatcacatacaacttcaaagtctaggcaaagaaatagccacaaacaagagtctagggcaatacaggaggctagcaagtacaagacaatgtccagtgggttagagatgtatacctgggagccacccaattagctgagaaagaagagcagataaagccacgtcctaagggcagagagaaaacaggtcacaaaaatgggaaccaaacttattagaaggcactgtggaatgccagaatctcagtaatcatattattcttttaatagcaacaagcattcatacagtaggtgcaggcagccttctaaggtgcttgataccttttaactcatttgaacaaccctatggaaataggagttattgttactcctattttatagatacagaaaatgaggcacaagagtagatgacctccctaaggtcacattttgagaaacagagctacaattttggtaccaaatctaagcaaacctgtatccagggtccctaatcctaaccactaggctgcagggcctcttctcagttgagatgcctgtttctggccaggcgtggggctcacacctttaatcccagcactttgggaggtgacggcaggaagattgcttgaggccaggagttcaagaccagcctagccaagatagcaagaccctgtctcttatgttaaatatacacacacacacacacacacacacacacacacacatattatacatataattaaatttttttttaaaaaaagactcctgcttctaacacttaattcaaagaaaccactgatctctgactctcagtttccctctctgtaaaagggggttggcacttgccctccctaccctacccagccttttgacacttaataaaaccctaagagtaagctgcagttgttctctaccaggcctacttccatctaacatttttctttgcaggatttggaaacaggagggtagggagacctgaggtcaaagaatatataccttttcaatggcatttcaagtgctgttggttagataaaatttccatgactccactaaaataaaataagatttctttctgccatccagcaattggtctcttatcttgggcataaagaagaacatgatgcctttctgaactggatgccttagtacacaaaaggacctctgaaacctggggctgtaaaaacaagcgggtgaagcggaaactgcactgcataatggatataagcaaatcctctgatacaaaaagttggtcgcattgttgttattctaatcagtaaaataataacgatgctcagggagtggaatgattttttcgccttcgaccagagaaacaacagagtggtccagtggttccagcctagatccctccagctccgcgaaagaagccgagatgctgactttcgcactgctgcgggcaaggaacagaaatgcacgcacgcatgcacacgcgcgcacacacacccctgactcgcgaccactgaccttgagaactggacccccgggttctcagcccgcagcggtgtggggctggctgcatccctcccggcactcacctctaaagttttcactaggatcttcatgtagatctcggagatgcccagagacactccgaagaccgaaggtaaaaggatgaagccgagaaccagcgtcagccaggtggaaaggatcttcccggccagctctgcgccctccatgactcggcgcacccactcaggagaggtccgcagtggagggccgagcgccacagcagtccctgtccccaggcagtcccgcgggagctccaggagcagagcgccgagcccggcactcacctctgcgaagggaagagaggaaggaaaaaaactttcagaattacggcaatatccttccttcctccctgggctcctcctcgcccctgccagttaactctttctccgctggctgcccaggtctgggctgaagccaccgcggcgtgcggagacctgggtagcgcgagccagtggtcggagctgcgggtaagcggaggcacaccgcggcgcgggcagagcgcgcgagcgcagccaggaacccgccccgcccggtgcctgatttcctctgggtggcgattgcgacaactcagcagatgactcacggaggccctccccgagccaggttccctgcgggagcaccgcactttggcacaccggtcgccggcggagctggcaccgggccgcgggctgtgctggaagctggctgcgctcgggcgcccagcgccctatttctgcgcgctgccctcgccccacctcctccgtcacccaacgggggagctccctggcagtacttagcccaggagtgccgcagcctcctgggcggtctccgttcttccccgcgccccgcctcccccagcactcagcaaaggtcctttcaggaggagagttttcatctgaaaaatgtcaatattttcttcacccgcagaatgaactgctgacgtatctgggacgcttgaggtcttgtttgtgtgggtgtaaaacgaactcttggaaagggcttccaaggacaggaaaacgcagagcgcaccacgcagccgtgtacgccgcttctggcttccacacctccttccccacatggcctacagctgtggggctcaatcttgcttatcccgagagtaggaagctctctccacgcgttgcctagcccactgagccgccatctccctggcacagaaaccctgcggctaagtatctgtcactccctttctgggggaagattccaaccacaccttcccctaccattcagccaatactatccgcgcttaggcgtagcagaaatgccaggccggcgcaagccttcattcaccaagctgacaggtgtctcctgggtgttcaggctccgcgcttctaccgcgccagcccttatcagagcaacgaagggcaaaaccctgtatgttatttactacattgctgttctcttagagaccagaactatttttaagaatgagcagaagggattttgagaagggattttccagattgccgctgaattcgaccaaaatctcttacaggtacttttcaggtgttgtttcaagctggaaaaaaactgagagggccagcaaactgaattgaaacagcgctgatagcaaatattgcagagaaaatggtccctgcccagggtgtggaggaagtggggagccaacgaagtgacaagcccctctgtaaagaatgtagatgtctgccttaagtacttactgccaggtagctgtcacaagccccctcccacactaagaacggaaaaaattataacttgatgattaaaaccaggttatggaccgggcgcggtggctcacgcctgtaatcccagcactctgggaggcgaggcgggcagatcatctgaggttaggagttcaacaccagcctggccaacatggcgaaacccccgtctctactaaaaatacaaaaaaattagccccgcgtggtgtcgcacgcctgtagtcccagctactcaggaggctgaggcaggagaatcacttgaacccgggaggaggaggttgcagtgagccgagatcgtgccactgcactgcagcctgggagacagagtgagactcagtctaaaaaaaaaaaaaaagggttatgaatgaagaagtgttaggagcttggtttctcaaaattaaacctctgtaaggttggctagtttagaaaaacacggaaaacgcaactaccgaaagctgcccaaagtccttgctttcaaacactatatatattgagtgcaaaacttcaaatattatattggcatatttaacaccatatgttcaggcaaaactcttattttccttttatttcctcaaaccaagataactaaggaaggctaaatccttgtaccaaagtttaccccacaagggagataatacacacaactttgcgtgtgctgagtgcacacactctccagtgatttttggtgctcatgaacaaactccacaaaatggttttggtttggttttgttttaactgttacggaagaattattcgtccacagctgtatggtgcaa

SEQ ID NO: 316650 - DNA, 4001 bp, Homo sapiens
taagtgcatcaagaatataactggccatttcttaccacccatagtcaaaccaccattatgcttcctctggattattgcaaaactcttcttattggtctcctttctcctaccacgtcctcctctgtgtattttccttaaagagtgaccctcttaaaaggaagtcagagcccatcactctactgctcaaaacgctccaaagtcctatttcatttagaataaaagttagatgtcctcaagatcttcatgacctgctcgccttgatttaatctccagtgaaggactaaacccttcactcaactctgccctacaggcctccttgctattctagcacgtttctgcttcatgacctctgcaatggctggtccctctgtctgactgcactttcccaagatattcgcgtggttaaatctcccacttctgtcagccctttacttaaaagtcatcttttcagcaagaccttcctgtgtcactttatacccttcttccctgctttacgtttctcttcaggactatcacgacctaaaatacagtatgtttctaattactttgcttagtatgtgccttcctctctaaaatgtgagctacaagtagacacagatttccgtctgttttgttcactgctgttcacctaatgcctagaacggtgtctggaatagagtgggcgcttaataactattcgctcaatgaataaattcctgtcttcaccctcctctcccccaaagcacctaagtcctttgacacacacattcacataacagtaaatacgcttagggatcgatatttttctgtagcattcttaacttaggcctgcatcccatttctcaaacgtggctcctttagaaggaagtctcaaactctttcctgtttccttaggccagggctggtcctgctgcgaacggactacccattagcagcgcaggccaggtcctctctcctggaggcaagttagagaaggaagacccctacgatcgcaatcggcgatccccgagtgagtgacccgccacgacgtcactcacatgaagcggaggaccacgggttccgagacagccacagcaggaagcatgtaggtccagccacccgcgtactatagcagtgagaaaggacccaatgaggtgtccttgctgaaagcctgagtgttctacagattcaaccctcaattctttcttcctcttcctgtgctcagtcccattaacctgccataccacgctcctcgtcttccattccctcacccagtattttcaatcgaccccccccgtccccccgcacctctttctctctcgctatatgtcctttcgtggccagtttgggcaaggggaaggacaccacaagtcggggtctttcctcagcgttgggtcgcggtggctgtgagggcggaagaaaaggccaggctgaggggagggtagagggtgaaaagctcggatctgtgtttggggaaggccaggcttgcgctcctcgccgggttccgcgaaggttaaccttggctgacttggctcgcgagcaaagggcagcgtctgagctcccggcgttccaggagtggcctcttttgtaggagcacctgaaatgcagcgtctggtgcactaagccgtagcggcagcagcagccacagcgacagcgctggggccctgtgtagaagctccatcccccttgtctttgtgcttgcctgcgtccccagactcagaggcaggtatttgggtaatccagttttccgtgtcgtagtgggtggggtctgtgggaggtagaggactatcaggagcagtgagtggccccgcatgtcttcagaatagatagagaaccgagctgtggagccgcttgctgataggtactgtctccatccctagctacagcccgcctttcctgtaaatcaggttcacctgagtcgtttgggaaccgtaggcttagtaatcgctctgtcactgcctcaaaggaaggctaaaggaggttagagaatctagaatccgcccctccattactcaccttggaggcagaattttgctttggtttgtttctggccctcgaggtttagtcagtcgtcaaagtgtaacacccccttgagcagtaggagaaagtgaagcagaggaaggaagttacttgaggattgtcagtggctgcttttcaaggatccctgtcctggtttctatctatttgagacaaaaataacctcttgagagaatgtatatataaaataaatgaattagtatcattttcctgttgaagaaatgtgaaattttattcatgataaaatcggcgtcttttgccctattttttactttctttccccattcgagtcgtttaaaactctaagttctttgagggcacagagtctgacttgttcattatcctttgcccaccagctggaaaaacaactgacttaaaataggggcttcaaaatatttgttgaatgaatgaattttcaagcccaactgcttgcactgctgtttccctcatctaatctctcatctctacgttttttttcccccggtagttttcttccactcacgaggtgtaagtgaatgtatgtgtgtgtatttttgtgtgtgagcctttttatgtacaaccatttaagaggtagtggaaaaagaacactgattatgctaattagtgttttatctttttcgatcattgtgttttatttggttattttattttcagctatgtgatgataaagacatctgattgaaaataaaatggtcgggcgcggtggctcacgcctgtagtcctagcactttgggaggtcgaggcgggtggatcacctgaggtcaggagttcaagaccagcctggccaggatggtgaaaccccgtctctactaaaaatacaaaaattagccgggcgtggtggcgggcgcctgtaatcccagccactctggaggctgaggcacagaatcgcttgaacccgggaggtggaaggatgcagtgagccgagatcatgccactgcactccagccttgatgacagagtgagactctgtctcaaaaaaaaaaaaaaaaaaaaaaaaaatcaagtagtatagcgtagtaggattgaataataaagtgcaactgtctcacctgtcctactctcagtactgttcttcaaagataaccacttttaaccttttctaattttaggtctgtaggttaaataataagttaaactgttaattctttttgttgacttcttgagatagccctaagttgaactgctaattctttttccgttgacttctagaaatagcccacaccattcacaatctcctctgaattttggaagagtcataatcataatttttagtttttgtattggttactttataattcaaaataatatacgtaaactacttttttcacatcaacttttgaaaatatatttgactccttgtttggtaaaacgagaaaagtagtgattctacctttttctttatcacttcagaaactacatttatgcccactttctcttagctggacatttacttgtacattgtcaaagttagtaatatatttcttaactataacatttgcgctttattcacgtgccaaaaaccaataaaaaaaataaaatgtttacagtattatggctttatagttgttacttagagcaagtccaagctgtatgctctgatatgtttttttccccagagttttaacttcatgatccctgtgccatactaaggagattatttatgatatcaaggtcaaatgggtttttatttctttcctgccaagggcaaaatatgctgtagttgagcatgctttatattttggagtatgtaatacatagtttttaaccgtccccactttcttaattgcctttctgctttctcctggggaataggtaggtggatgtgctttcttcactgaatcttctcattctttgtatgatgcacatagaagcaagcttccattcctctgtttgaagattttccccttaaagcccaatggctttctgtttaatttgaacagattgcattctagtccttttgtattgctcctatcctgggcttatattcattcttgggtaaataacat

SEQ ID NO: 316651 - DNA, 4001 bp, Homo sapiens
tcctcccttcattcctattcttgccttccaacttctttccctgatttgctacacaatctaattactggatatgtaaaaatattatagtatacataaaataccccacactgaaagaccgtccttattatagtgtaaagcaatgtggtaccttttagcactaggtgaaaattcctgctaggatttaaatcatatgtgtcaaaagtcagaatttaaagaagaaaattaaatacactgagaacaatgcatctgaagacactcaaaatatgtaagcgcagcaaccagcagtaattccctaggtcttttatcaacctttgccaaaacctataaaaagaatatctaaaattgcttttttatggaagttcctatttcccttaccagacagcctgctttccctttactgatgaggacatagggggtcctggagggtttaaaggatggctataaggaatgactatagggtggacagctatgagaggccagtccatgcatttctaaataccatcgtcattaacacaaaaactttcctccccagtacagagtccataaaatttaaaaaggagtatgccttggcctcccatgaccctcttacctcacaataaggccatcttttacctggttaagatttgcagactagacccattacataccttgtcattaaatacctataatataccctaacctttgcaatcttgacagatgtgatttccattttatagacagatccaggaaaattacatgacttatctgaatcccttcaagtaccacatagcaaagccatgattttaacttgtgtttgccactctgaaactcacactggaattcatttttcaagtgtcctccaaagcctaattaaataaaattaaccctgtcatctataatactcttacatatccaaattaagtgcatcaagaatataactggccatttcttaccacccatagtcaaaccaccattatgcttcctctggattattgcaaaactcttcttattggtctcctttctcctaccacgtcctcctctgtgtattttccttaaagagtgaccctcttaaaaggaagtcagagcccatcactctactgctcaaaacgctccaaagtcctatttcatttagaataaaagttagatgtcctcaagatcttcatgacctgctcgccttgatttaatctccagtgaaggactaaacccttcactcaactctgccctacaggcctccttgctattctagcacgtttctgcttcatgacctctgcaatggctggtccctctgtctgactgcactttcccaagatattcgcgtggttaaatctcccacttctgtcagccctttacttaaaagtcatcttttcagcaagaccttcctgtgtcactttatacccttcttccctgctttacgtttctcttcaggactatcacgacctaaaatacagtatgtttctaattactttgcttagtatgtgccttcctctctaaaatgtgagctacaagtagacacagatttccgtctgttttgttcactgctgttcacctaatgcctagaacggtgtctggaatagagtgggcgcttaataactattcgctcaatgaataaattcctgtcttcaccctcctctcccccaaagcacctaagtcctttgacacacacattcacataacagtaaatacgcttagggatcgatatttttctgtagcattcttaacttaggcctgcatcccatttctcaaacgtggctcctttagaaggaagtctcaaactctttcctgtttccttaggccagggctggtcctgctgcgaacggactacccattagcagcgcaggccaggtcctctctcctggaggcaagttagagaaggaagacccctacgatcgcaatcggcgatccccgagtgagtgacccgccacgacgtcactcacatgaagcggaggaccacgggttccgagacagccacagcaggaagcatgtaggtccagccacccgcgtactatagcagtgagaaaggacccaatgaggtgtccttgctgaaagcctgagtgttctacagattcaaccctcaattctttcttcctcttcctgtgctcagtcccattaacctgccataccacgctcctcgtcttccattccctcacccagtattttcaatcgaccccccccgtccccccgcacctctttctctctcgctatatgtcctttcgtggccagtttgggcaaggggaaggacaccacaagtcggggtctttcctcagcgttgggtcgcggtggctgtgagggcggaagaaaaggccaggctgaggggagggtagagggtgaaaagctcggatctgtgtttggggaaggccaggcttgcgctcctcgccgggttccgcgaaggttaaccttggctgacttggctcgcgagcaaagggcagcgtctgagctcccggcgttccaggagtggcctcttttgtaggagcacctgaaatgcagcgtctggtgcactaagccgtagcggcagcagcagccacagcgacagcgctggggccctgtgtagaagctccatcccccttgtctttgtgcttgcctgcgtccccagactcagaggcaggtatttgggtaatccagttttccgtgtcgtagtgggtggggtctgtgggaggtagaggactatcaggagcagtgagtggccccgcatgtcttcagaatagatagagaaccgagctgtggagccgcttgctgataggtactgtctccatccctagctacagcccgcctttcctgtaaatcaggttcacctgagtcgtttgggaaccgtaggcttagtaatcgctctgtcactgcctcaaaggaaggctaaaggaggttagagaatctagaatccgcccctccattactcaccttggaggcagaattttgctttggtttgtttctggccctcgaggtttagtcagtcgtcaaagtgtaacacccccttgagcagtaggagaaagtgaagcagaggaaggaagttacttgaggattgtcagtggctgcttttcaaggatccctgtcctggtttctatctatttgagacaaaaataacctcttgagagaatgtatatataaaataaatgaattagtatcattttcctgttgaagaaatgtgaaattttattcatgataaaatcggcgtcttttgccctattttttactttctttccccattcgagtcgtttaaaactctaagttctttgagggcacagagtctgacttgttcattatcctttgcccaccagctggaaaaacaactgacttaaaataggggcttcaaaatatttgttgaatgaatgaattttcaagcccaactgcttgcactgctgtttccctcatctaatctctcatctctacgttttttttcccccggtagttttcttccactcacgaggtgtaagtgaatgtatgtgtgtgtatttttgtgtgtgagcctttttatgtacaaccatttaagaggtagtggaaaaagaacactgattatgctaattagtgttttatctttttcgatcattgtgttttatttggttattttattttcagctatgtgatgataaagacatctgattgaaaataaaatggtcgggcgcggtggctcacgcctgtagtcctagcactttgggaggtcgaggcgggtggatcacctgaggtcaggagttcaagaccagcctggccaggatggtgaaaccccgtctctactaaaaatacaaaaattagccgggcgtggtggcgggcgcctgtaatcccagccactctggaggctgaggcacagaatcgcttgaacccgggaggtggaaggatgcagtgagccgagatcatgccactgcactccagccttgatgacagagtgagactctgtctcaaaaaaaaaaaaaaaaaaaaaaaaaatcaagtagtatagcgtagtaggattgaataataaagtgcaactgtctcacctgtcctactctcagtactgttcttcaaagataaccacttttaaccttttctaattttag

SEQ ID NO: 316652 - DNA, 4001 bp, Homo sapiens
cactggaattcatttttcaagtgtcctccaaagcctaattaaataaaattaaccctgtcatctataatactcttacatatccaaattaagtgcatcaagaatataactggccatttcttaccacccatagtcaaaccaccattatgcttcctctggattattgcaaaactcttcttattggtctcctttctcctaccacgtcctcctctgtgtattttccttaaagagtgaccctcttaaaaggaagtcagagcccatcactctactgctcaaaacgctccaaagtcctatttcatttagaataaaagttagatgtcctcaagatcttcatgacctgctcgccttgatttaatctccagtgaaggactaaacccttcactcaactctgccctacaggcctccttgctattctagcacgtttctgcttcatgacctctgcaatggctggtccctctgtctgactgcactttcccaagatattcgcgtggttaaatctcccacttctgtcagccctttacttaaaagtcatcttttcagcaagaccttcctgtgtcactttatacccttcttccctgctttacgtttctcttcaggactatcacgacctaaaatacagtatgtttctaattactttgcttagtatgtgccttcctctctaaaatgtgagctacaagtagacacagatttccgtctgttttgttcactgctgttcacctaatgcctagaacggtgtctggaatagagtgggcgcttaataactattcgctcaatgaataaattcctgtcttcaccctcctctcccccaaagcacctaagtcctttgacacacacattcacataacagtaaatacgcttagggatcgatatttttctgtagcattcttaacttaggcctgcatcccatttctcaaacgtggctcctttagaaggaagtctcaaactctttcctgtttccttaggccagggctggtcctgctgcgaacggactacccattagcagcgcaggccaggtcctctctcctggaggcaagttagagaaggaagacccctacgatcgcaatcggcgatccccgagtgagtgacccgccacgacgtcactcacatgaagcggaggaccacgggttccgagacagccacagcaggaagcatgtaggtccagccacccgcgtactatagcagtgagaaaggacccaatgaggtgtccttgctgaaagcctgagtgttctacagattcaaccctcaattctttcttcctcttcctgtgctcagtcccattaacctgccataccacgctcctcgtcttccattccctcacccagtattttcaatcgaccccccccgtccccccgcacctctttctctctcgctatatgtcctttcgtggccagtttgggcaaggggaaggacaccacaagtcggggtctttcctcagcgttgggtcgcggtggctgtgagggcggaagaaaaggccaggctgaggggagggtagagggtgaaaagctcggatctgtgtttggggaaggccaggcttgcgctcctcgccgggttccgcgaaggttaaccttggctgacttggctcgcgagcaaagggcagcgtctgagctcccggcgttccaggagtggcctcttttgtaggagcacctgaaatgcagcgtctggtgcactaagccgtagcggcagcagcagccacagcgacagcgctggggccctgtgtagaagctccatcccccttgtctttgtgcttgcctgcgtccccagactcagaggcaggtatttgggtaatccagttttccgtgtcgtagtgggtggggtctgtgggaggtagaggactatcaggagcagtgagtggccccgcatgtcttcagaatagatagagaaccgagctgtggagccgcttgctgataggtactgtctccatccctagctacagcccgcctttcctgtaaatcaggttcacctgagtcgtttgggaaccgtaggcttagtaatcgctctgtcactgcctcaaaggaaggctaaaggaggttagagaatctagaatccgcccctccattactcaccttggaggcagaattttgctttggtttgtttctggccctcgaggtttagtcagtcgtcaaagtgtaacacccccttgagcagtaggagaaagtgaagcagaggaaggaagttacttgaggattgtcagtggctgcttttcaaggatccctgtcctggtttctatctatttgagacaaaaataacctcttgagagaatgtatatataaaataaatgaattagtatcattttcctgttgaagaaatgtgaaattttattcatgataaaatcggcgtcttttgccctattttttactttctttccccattcgagtcgtttaaaactctaagttctttgagggcacagagtctgacttgttcattatcctttgcccaccagctggaaaaacaactgacttaaaataggggcttcaaaatatttgttgaatgaatgaattttcaagcccaactgcttgcactgctgtttccctcatctaatctctcatctctacgttttttttcccccggtagttttcttccactcacgaggtgtaagtgaatgtatgtgtgtgtatttttgtgtgtgagcctttttatgtacaaccatttaagaggtagtggaaaaagaacactgattatgctaattagtgttttatctttttcgatcattgtgttttatttggttattttattttcagctatgtgatgataaagacatctgattgaaaataaaatggtcgggcgcggtggctcacgcctgtagtcctagcactttgggaggtcgaggcgggtggatcacctgaggtcaggagttcaagaccagcctggccaggatggtgaaaccccgtctctactaaaaatacaaaaattagccgggcgtggtggcgggcgcctgtaatcccagccactctggaggctgaggcacagaatcgcttgaacccgggaggtggaaggatgcagtgagccgagatcatgccactgcactccagccttgatgacagagtgagactctgtctcaaaaaaaaaaaaaaaaaaaaaaaaaatcaagtagtatagcgtagtaggattgaataataaagtgcaactgtctcacctgtcctactctcagtactgttcttcaaagataaccacttttaaccttttctaattttaggtctgtaggttaaataataagttaaactgttaattctttttgttgacttcttgagatagccctaagttgaactgctaattctttttccgttgacttctagaaatagcccacaccattcacaatctcctctgaattttggaagagtcataatcataatttttagtttttgtattggttactttataattcaaaataatatacgtaaactacttttttcacatcaacttttgaaaatatatttgactccttgtttggtaaaacgagaaaagtagtgattctacctttttctttatcacttcagaaactacatttatgcccactttctcttagctggacatttacttgtacattgtcaaagttagtaatatatttcttaactataacatttgcgctttattcacgtgccaaaaaccaataaaaaaaataaaatgtttacagtattatggctttatagttgttacttagagcaagtccaagctgtatgctctgatatgtttttttccccagagttttaacttcatgatccctgtgccatactaaggagattatttatgatatcaaggtcaaatgggtttttatttctttcctgccaagggcaaaatatgctgtagttgagcatgctttatattttggagtatgtaatacatagtttttaaccgtccccactttcttaattgcctttctgctttctcctggggaataggtaggtggatgtgctttcttcactgaatcttctcattctttgtatgatgcacatagaagcaagcttccattcctctgtttgaagattttccccttaaagcccaatggc

SEQ ID NO: 316653 - DNA, 4001 bp, Homo sapiens
acagagtctcactctgtcacccaggctggagtgcagtggcacaatcatggctcactgtagccttgacctctcaggtccaaacgatcctcctacgtcagcctcctaagtagctaggactacaggcatgtgccaccatgcctaatttttttgtttgtttgttttgttttttttaaagagacttgcccaggctggtcttgaactcctgggctcaagcaatcctcctgcatcagccttccaaagtgctgggattacaggtgtgaaccaccgcacctgatccccacacacgtctttaattagcctgtaggattaggtagacttttaaaaaaacaattttctcattttttactagattaaaaaacatttaaataggccgggcgcggtggctcactcctgtaatcccagcactttgggaggccgaggtgggcagatcacgatgtcaggagattgagaccatcctggcacacggtgaaaccccatctctactaaaaatacaaaagattagccgggcgtgatggcgggcgcctgtagtcccagctactcgggaggctgaggcaggagaatggcgtgaacccgggaggcggagtttgcagtgagccgagattgcgccactgcactccagcctgggcgacagagcgagaccctgtcttaaaaaaaaaaaaaaattaaatattcccaactaagcacaggaatgcttgctatgtaaagaagatttagtgggtaagccaccaaaggaaacctatattaaagtcctttccaccaagcaagttccagagctgtactgtccaatacagtagccattagccacatgtgactatatacattcaaattaactacaattaaatacaatttaagtttttgtttctcagttgcacttgtcatatttgaagtactcaatagccatgtgaccagtgactaccttattggatagcccagatacagaatatcttcctcaacgcagaaaactctacgaggcagcactgttttagaatctgaaccctgatgacaaggaaatataagcactttagaataataaacaacactattagaaacattaaatttgattcatcaatattttaacttacaaggctttgaaattttcttctcccaaatctttaaaccgatgagcaacctcactcttgtctgggcaagggaagaaaaaaaaggattgttaaatactgaagaaaacaagaagtaataatgttactttttatatttctttccatttgacttagattatgcatttgtttcaaaatattgggctctgattcctacagaaaaactcaggatgatgttcaattatttcttctgcctttaaacagaagaataattcaattaccaagaatactattttaaaaattattaaatatttatagccttatattcaaacttagataatatctaatactcttttagtgtctatcaacagcaaccaagaagacagactaaaatgaaaataaatataaatacaagttctatttatgagatcaacagcacaggttttgtggtttttaaataaagcatagtgcaatggataggtctttgggatagttatgaattcaatcttcaaccctattctgtgaagtttcagtcactctaagttactttgcactttccttagtgcgcaaaagaaaattacagtcactaaacaattctgacctttttttttttttacctaggatgtttgaattttattaataagataaccttgtaagacttcacaaatacaaaatactatgccattttagaaataaatgccaaaataattctttaaagatgcagagtttactaaaactttattttactgggaaaatagaataaaagttgaacaatagaaaaatggatttcttacgtgcatctcgacgaaacacacccctggaataagccgagctaaagagaaaaagaagggaaataaaggttacccacttcattgtgccaaaggcgtgtggggttgacagaagagaaaagctaggacaaacggagggaaattagcactaatatacttctttaaccaataattgtagattattaactagactcatctttgtatttcattggctgccaaccgattacaaaattcataatattcttgccaaaaaattgtttgactaaatcccttgtgtatatttaccatctggaactgttttctccacaagaccttgtcaatgtattaaagttgtgtaaaacatcttatcaaattttacataagagtttaaacgatttgtaccttttattcattaccatggtatttaactgtaatttcccacttgaacattttagttcttggtgtttgcaatttagttctcagtgtttagtaattactaaccaaactaaatactttgcttagaaataagacatactgaaagagttaagtcccaaattgcatctattgctaattccaagtgtgcttttacctatagataatgaaaaatttacacacaagtactcacgcatgcacacacacatatacatacatacatattttagggcttctgtgtcttttttactattccaaagccattctgtctgaaaaagctgatgttgcctcagatgcaaactaagaaaaagacatagcaacaataacaagtaagataggacttagaaattccatgttcccattcctgctgtggcccacatgtgattcaagccctgagataggctatttagattcagtgtgagtatatctcatgggatcttcagttaagcagagatggagaggaaaatggacccaaatgagatgatgattatctttgccataatatacaataggacaggctgaccccaaattctctgtaggttatgagaacccttgaccttcaccaggcataggattctttccatccctgtttcatatttttttcctttctctctttcaataagtagaaaaatcacatgttcttttatgttgctttaaatttcaaaataaatttaacattatgtctaaaaacaaagcgaaggaagaataattttttaaatatttcataaatcttccttccctacccaaggttcttatctctacctcagaaaagctatcctacctctgcccttttgctcagaatatgaagaactactgagctcaaccagtaggaagaacaactttctctgatactacagaacaataattagtactaagccagttattttacttaattaaataactcagtcagtcaaaaccagtagtcaaatttcctcatggcacatagaggcacagagactaacaaagtattattttttctactcagtcttataatgaaagaaaattttttctattcagtcttacaatgaaagaaattattttctataatcttatgttatttcttcttcagaaatgggtactaattaactaataaagcacagaagaggaaaaaatcaaagctagatggatgatagatacatagatagataggaagattttttttaatgactcaagggagtcctgaaaggaaataccagacttgtctttctgactacagatgaacagacataaaacaagtgtgcctattttccattgaagaaaaacaagcattttttctaaagccagaaaaacctacatctgaaaagaaaaaagaaactattctaagttaagaaaataattctttcttggataaattatgtcaacttttaacttcctagaaattgtaggcattatttattagaagtcagtaaccaactctagctttttccttgtagaagtccctgggaaaggcctacccaaacataaaatccttactgttgaatacaattgttactaattgacaaattcaggcctttgtcactctcacatatactttgtgcatactttttcatttaacaaatgaaaagaataatattagtccatttagttttcaccacaacattataatgtaatatattgttaaatacaaagaaacctaaaaaaatctcaaattcatcatgactgaatagaaactttgaattgattttcctatatctaatgaagagccctagctttaaaacaaaattgatgaaacctaaaagaatctttt

SEQ ID NO: 316654 - DNA, 4001 bp, Homo sapiens
tcagtagcatgtataccatacttaggaaaagttgtatttgtatgtatctgatatttaagttataatcatctcttcttttcttcagacatagaagaatgatagcaccagataatattctttcttttaagtttgtctatcccacagttctctataaataaagcatattacaacattctgcaaaaacagttgtcaccatcaataacaagaaacaaagactcccccatatagagaggcaacaaatacaatacaaaatacaaaaaaaacaaaaatatggaatatattttcaccaaaagtttaaatgctcattcctttaagagttcttcaatccatagatattcaaaatttcaagaaagaaaatcatttacaatgaacagcttatgccaaaaagccatcattctctgcaatagattagagaataataaaagcaattcatgccttgtgttcatgggaaagggatcagtaaaattgtttggaatagaaggagccatggaatttcagaaatatcttgaaatgcacaaacttattcttaaggaaaacttcaggctctaaatccaaacctagatcacatggcacttgctgggaggtattgttacagcttaacacatcagcaaagctcatcacagtattattatatatgataatgcctaatatccatcataatttacacatgccttttctttacagtttaaaatagattttgaaaagtttaaagtaattattggcttcctactcatgcagatagagatgctatacaattttggtgtcttcttggcggaagaaatttgagagattcatctcagatttaaaagatctttgatatggggaataagttatttctaaaataagtttaagtattttgtttctcttgaggcttgaggttgatggggtgggaaggaggtgggaagagagaagtaaattgtttcggtcagcagacaaggactggacttgacattggttctagagactagagtgtatcccaagtgcataaattataccccaaattaaatggatattgtttcttataagagaattagtggcacaaagtaaaaagaaagtaaaagggagagagagagagacagagagagagagaaatatatatcgcaagcagagatgctattatattgtggcataaagtcctctccttcctgatcctgcctgtttgtaccctcacccatcctcaaatcccaaaccatcttaaaggttttaatttgtggcttttcaaagtactctaaagtactaatttcaaacactagaattttttaattaaaggatttttctaaatagacatgcaaaggaatttaatttttctggatgctttgtctctaaacaatgcttccacgcactcagaattcccgtcaattcacccatatgagacgagtaagtctcgtgccttatctacctgtttcctagcaaaattactgatgctgtcataaaagtggtagtttctattattacctatgtattccaggcaaaagtcatagagtttttttttaaacaaataatcctaacaatcctttaattaaacatctcagttaagtgacaagaccagaagctcagtgacttaagaaacttgttattaaaaccttatgaaaaactggtttgccttctccccttcataatgactacagtttaccattgtaggtaacttttcccttctctccctccccttccccactccacccccttcaccccaccaactcatcctcccctttctggaaagtttctattatagaagtgcaaaggttcttagagctctaaagttatttaaatataaacaagatcagcagatggaaactgagtcaacacttaagacaaatacttcctcatatattatgccatctactgcgttttgtcatttaaaggatgatactcacttttatcttaaagaggaaaagtactttaagaccagcaaatctaactctgagcagagttaattctggtacagcctctctgaaacacactgtttctcataaacggcttcagtttcaggaagtaggaattaaaaaaaaaaaaacaaccaatcctgtgactgtctcagaatatggttgtgtaattcaattccgggactttcagcaatcttgcaccataagacacacccctttaggaattgcttcggtgaaaggtattctgggagctgtattactacagaaaagttccttctcctaatgaaagtgcaagaaaaacttattatttagactaagaatggagagtcctcttagagccaagaagagagaatgtcagtaagaaacaatgaatatgacattgttgaaatctgttagcaaaagacagatgcacattaaggcttcattctgtgctctgtcttagaagtgagcttgttatcacagagacacatatattgctgaactggaaaataaagttaggactttttggatagaatatctgattaggctgactagtttgacagtgaaaagtgtcttattgagttacacagtggacattgtccttccatggaacaactgaaatctgcaactcgaaattttgacaaaaaaatcaaaagtacctaagatttctaaatgtcaaaatatattttattggaaaagttattgacataaacaatattttaattttctcaatcctttttgagcctgctgggttaaagaagtttcctctagagtgaaggaataataggttttattaatagtcatttgatacattttggtaaagcctttggtatacttcctagaaactgagagagtgaaggactccaaaagctgggtcataaatgctttggcaagtcaattgtttacaacaaaataggaggaaatagttgaatagtcagttgctcgatcacttaaaacacattttttttgtgtgatagatcgctatgtaatgtttaatatatgaccttagaagtttaaataaccaaatggcattgctataacaaaattctatctctatttatttatgtaaacacagttcctctcctcttccatgtgtatatttttgtggaatgttgttttattccaactataagtaacattcagctgtgaattaattttttaaaactccagaaatcttatggagaagtgacacttgaataaattttatcacttaatattcatcaaaacgtaccattttatttttgtcttcttcatcaattatgaatcaatacttgtacaattcaatctttaagaaagtttaatacttagagtctatggtcacagaaaacagaaatgtttaatttcttttttcttttctatttttttttttttttttgagatggagtttcgctcttgttgcccaggctggggtgcagtggcacaatctcggctcgctgcagcctctgcctcctgggttcaaacgattctcctgcctcagccttccgagtagctgggattacaggtgcctgccagcacgcccagctaattttttgtatttttagtagaggtggggcttcaccatgttggccaggctggtctcgaactcctgacctcaggtctgtctgcctcggcctcccaaagcactgggattacaggtgtgagccaccacacccagccagaaaggtttaatttcaatatatactttttttgagagacatgttgcccaggctggagtgcagtggcatgatctctgttcactgcaacctctgcctcctgggttcaagcgattctcctgcctcagcttcccaagtaactgggactacaggcacccgccaccacgcccagctaatttttgtattttagtagagacagggtttcaccatatcggccaggctggtctcgaactcctgacctctggtgatctgcctgccttcgcttcccaaagtgctgggattacaggcttgagccactgcacccggcctacatatttttactgtaaagaaatatgacaaaaactttcaagtatataaactgttttatactaggataaacttctatggatgaagtgaaatgaaacagaaggttacggaaatacaggaatgatataaaatttccaattgttaaaaaagatttgtacatgtgtctttatttttaaatttt

SEQ ID NO: 316655 - DNA, 4001 bp, Homo sapiens
tgtaatacacaattagccccatcactatgatatgttttgatttatgaaacttcagctctcagtcacacaatttcatgtttacaaggtaaatttgctagttaattactagctttaaatggaattatctagctgagttttgtaaccatagaaatttagagatagttctttttgaaatgaagaaaatgtatttttttcaaagaaatttcctctttccatttcaactttataatgatagcaataagttgataataaaatttcgccatgcattgtggagactatctaagcttttaactttgaatgagtggaataagatctagaaattgtcttgggactattttaaataactttttagtagaaatatcatacttcacttactgctttttttttttttttttaaatggagtctcactccgtcacccaggctggagtgtagtggcacaatcttggcttactgcaacctccgcctcccaggttcaagcaattctcctgcctcagcctcccaagtagctgggattacaggtgcccaccaccacgcctggctaatttttgtatttttagtagagacagggtttagccatgttggctaggctggtctcaagctcctcacctcaggtcatcctcctgcctcaacctcccaaagtgctgggattacaggcgtgagccaccgcacccggctatcacttaccgcttttggattgcaagactgacatctgagcaactatggcttttgactcaataggactaaaccactggattaaatcaagtgagtctatgcgtggactctcagtccatatcccttcagtgttgtttggagttcgacaatcaataaccttttctgggacacactctaaagactgacttaccggcactgcaaaactcatttccaggaggcataggatcagtatcaggtccttcattttgaaaagtggaatctaaaacataattaagttggagaattaaatcagatgaatttttattcagaatggttaaaagacaatttttgaaaatgagcctgagtctctgctcttacaaaaaccaccgggataaaggttagaagaacaaaaacaaaaactaaatgttactaaacaaccgatttgtatgtagtagtttctgaaataaattaacaagcaattaaaaaatatctaagcacgttttaaatggatctacagcctaaataagtatgtaggaacaacctccatcgatattctttgtgatatatttcatttcataaagtgaattatgagtttaaaaatccttcccactaagtaaaatattggtctataaggtattattcacagaagtttatactttgcttaccctttgggacacattttgaaatgcatgtgaaatgtaatgcaactaagtcattttataacaaacctttatttgcaggaatagagggtacatcattgcatgtttaggtaatctacgtaaccatgacaaaatttttcttttcaaatgagagtaaattggctatcttaattttctttgatgttagtggaaaatatgtctcaaatttagctttcctcttcctaaaatgaattatcttttaaaatttattctataaattcaaaaagctctttattcttacatgaatagagatctgaatagcctagaaatttactcatcttctaatattaaaaagaattaggcactataatcaaaaacattaaaaaaaacacaatctataaataaaagtctttttttttttcttagttgaatgggtgttaggcatgtcatctctgggacatgctaatggattacaacaagcaataattcagctactggtgacaaatgaagataaatcctctttataaaagctgtcaggagataggaaaaaaagaatttacaggaaacacatggaaatcataaaatcccattttaccttagatgctgacatgcactgtgctctcagggcctgatgatgccaaccaagatagttctaagaaaagaagattaaaatttttttcaggactgtgcgtgggacttgctctgtacttctcattcagggaagattagaaacctttatttaaagtgccaatccaccaatcaaagtgaagcaaaatggcgaggggtggcgggggggagttggggcgggaatctctgctcctgcaattagtccacacccttttattgcgtgcagggacattggcccagtagggtctcattatttttaattgtactgcagcccctgtacttattcagagaacttgatagcagggaaggcagtaaaggaataatggacataggctctgaagacaattattttggtgagctggggaaaatatatgtaaaataggtgcaaaacaaaacctgttttgtgcaggttttatctgcagataaagctagtgacccaatgctagcattcttcaggttttcaccctcctgtttgttgtagtaaaagagactactgtccttccccccagcacacacagagtttaaaagaaaacactaaaatgttagatggaaaattaatgtgtgtgatttcttccttgaatttcctagatattttcatatctggagataattgattagagatagccaagcttttgtaagaaactacagttggaccctttgcaagaatcaggtttacttcaggtaaacgtttggtgcattttaaaaaaaatctgtggggacggggacgtaaatcagaacattctctatgaaccaaatcaatgggcacaagtgtcagttcactcttcagatagacacattcccaggcattagtatcaagccaggttaataagacatatttcgatcacttaaaaggttaacgtcaacacagattggtttttctccgtgaacagataatatcttggatgtggattgaatattagctgcttttgttacttctctgcccatccttgtctttccaaagttgtgatttcagatatggtagggataagcatttaagattagttctgaagaagggatgagtcagtacactctttagggaagtagggatcttgtcaattacagggaacattgaggaagctggtattttgagagaaagctgtatccatacccaaatgtaggcctaacagcttcaaataatgttatcttagaagctgctcctgaaaacctctgtgttccactgataccagaattatctttaggatgcaaagaaatgaagaatgtgaatgtgttttgcaaacagcaaaatgttattgaaatgaaaagtattatttttcatgctgtctctggtgcttgatgcagtcccttaatctcttttgagccccagttccttcttctgttatgtaaggataataattaatgaccacaagctagtcttttttttttttgagacggagtctcgctgtgttgcccaggctggagtgcagtggtgtgatctcagctcactacaacctccgcctcctgggttcaggcgactctactgcctcagcctcctgagcagctacgattacaggcctgcgccaccatgcccggctaactttttttgtatttttagtagagacagggtttccccatgttggccaggttggtctgaaactaccgacctcaggtgatcctcctgtgttggcatcccaaagtgctgggattacaggcgtgagccaccacgcccagcctgagcttgtcttaaagattggtgagatggtgaagatgcagcagctgccatttattgggtgctgaatgaatgagttgattgtccttttggtaggagaaactacatgaaatatgagaccacaagaactgtgtgtgtgtgtgtgtgtgtgtgtgtgtgtgtgtgtgtgctggaggaggaggagtgctggcagctaggttcataagctccaaggaggtagaggagggacctgatggaggacattttctctgtggaagttgatgctgaatccataggaacgagcttcctagttggctaaaaaactggcaaatagtgtgtatgtgtgtgtcttgtaaagtttataagcgtgatcatgacacactaataatgatgttttggtaggattcttatgttctgctttgcttttgagccaaatatc

SEQ ID NO: 316656 - DNA, 4001 bp, Homo sapiens
actcaataaatagttgttgaaggaataaaatcttgttttcttctagagccttcactttctgtaaatttgatttgtcttgtatttatttcttctactcattgtgttttccatctggtacctatcctcaaaattttgatctactgaaaataattgctaggctgttgtatgtgtccacatttgcaaatggattcactctttttacctttatgctaactcaatacattcatttacaaataataaaaaataccttgtctatgtgtcgtgatgtttcatttggtattgtttccatactgaatagacatttcagtgtcgcctccctgctgccctgccccactagctctctagctgctctcattgtctattagcaatctgctgtggcctgcacagccggcctgctccacctcagcccacctcacatgagagctgcactcctggaaagttttgcttgttttgagttttcaccaattatgtggtaatttaaatatactagagaaactattttgaagaatctttcggtcaatgtatttgacgaagtgaaagaaccatttgttttataaaaaaattaacttcatactttaccttgtttagaaaattaaacttttacagacaacttctttcaaggaggacacacacacacagacacacacacacacacacacgtatgtagtatgtatttgggataaagtaagaaggaggttggctaccgtatcttgcttcatcctccccccgcataatcccaccctgttcatttccttcacataaataatcacagttattatttataatttaacatttctttaaaaatcatttgagtaaaaaataaaaaaattggcaagtgacattggtaaaaataaaaaaaaagttaaaaaaaaaattaatgtctacaatccttgtgaacaccatgaaggattatgcctttttttcccttctcactattgtttcttcagcacctagcacaatgtctggcatatagaaagtttttaataaatatttgttgattgtacgaatggatgcagaagtattgagtaagcttgaggcccaactaagtatgctttcttttattctgttatttcatagcaagtatattgtaatttttttcttaatggtcttgaaccatcttgaacagtcaaagagaagtccacctagagatccaaaccattcatccctatgtctacaaaataatggagtaaatgttggagttatagggctttttaattttttcctgttatatgtgaatactatttatgatttaatgttctaagtcaaaaattttgatcattttaatcatatgcctttgatatcatatgttttggtggtctttttagaatttatacaatctagatatttagcatttccaagtagaaaaattagaaaatatagttcacctctttattcatgagcaaataactagttgccaagaaaaaacttctttttggaaaataaaataatcatccacttaacacattcatttttctcctaatttctagcctattgctctgccaaaataattgaccttttaccacgatggagtggatgcatttaaaaaaatgcaagtacattgaaatatgtaccaacagcttattagcttgtcattttctgtcttggaaaataaacactggacactctcagggaatgagtcacaaaacagagcagttttgatggagggcaggagagaggtaggtctgcagctagagatgctgttgaaactggctggcatataaaacaaacataacatacttactggtaatgaccgagttgatcctagaagacaaaacagtagaatcgtactcctcatgtttcagattgctacctacaacaacaaaaaagtgttactcttccatgtattttttttccttttaagagaaaatgatactttaaaaacaaaagttctacttgaaacatggtcaattaatgttacctttgggtccacgaggcaaaatgtacaatactcaaggtccagttggtttctcaagtttactctggtgaaaaattttacccttcaatgatgtatgtgtttgtagaagaaatttaaactcagttccaggagattggaaactgagagaccaatcaggatttagctgtctgttaaatcatttgtttttttttcatttcccaacacttcattaggtgggttattagctgcagacattatgttacccaatgtctaccatttgaatagaaggtgtttcaaggagacaggccttatgtaattaaaaaaagatgcagacaataaaataatttaaatgcttcttcacctccttcttcttcccaaatgatttctcagatgtacgtgttttatcatgtaagtatgaatacataaatcaaacatcaaaatatagggctctgtacaaggtttaaaaaatgaagtctactatgtagattgctctggaacttatgtttacttaacaaataatggacaactttatgtgttagtacatacaggtttattttatttatttaatgggtacacatcattatatcacattttgatgaacatttaatccatttccagtttattttgtaattacaaaggtatcacaagcaccattcttataaaacctttttttcacacatatgggagtattttcgtaggtgttattcttagaagtaatgtatcagaggatatgtacatttaagtaatgtatcagaggatatgtacatttaagtaatgtatcagagggtatgtacatttaagtaatgtatcagagggtatgtacatttaagtaatgtatcagaggatatgtacatttatggccaaatggtgaatggcttgctttatattaaacagggaaaatgatactataacctaagcaaaacacagggaatcaactgagatttcttttacaagaagaacagttaagtgctacttaacattttaccatgaagctgtgggcttcacctggaatttttgagatatgccccaaagggaggtggaggtctgttaatcaatttctgagaccatttcaatgatgagcctgtgtcgcaccaggatttgggatttgacctttaaaaaagaaaaacaaaaaaaacctatagagtgtctatgaatggaaaattaactgagatgatacatttttttttcaaagcttctctctaactgttcaattaatctatataatcaatgtttgttactctgatactctgttaggaatggggaacattatgtaggaggagaaatacaagatcaacaagtatgtgcaaatataggagtattcaggtgtaagaaagagtgtggtgaattttgttgggggcaaaaggacaggaaaagcttaaaagaggagatcatccttgagtttggatttgaagaataaaaaaaaaatttatgaagaacgcaaggagagcacccaggctgatcaaaggtctagatttgaagtagtgacattgctttctgtcactggaacaagatggggtgaggatagcagtggaagacagggttggagatgatatctaattttaactacctatagctttttttggtttgtttctatcactgattttggcacttggtcagatattactttatatggcttttttattatttcttgactttttgtttctcttgaactagatggagagttcctggggccgcatcttatatttcttgtctttcatgtttgtaatattttaaagcatcatatggtcatcgaatgttgacgaataaatggtaaaggcatatactgtggggaaacagagcaagattgagttgagggaagattttagagaagagattgggctttaggtggatttggagaataagtataatccacaagacagactagcatgttaaagtggctgatagtgagaggagcaatgagacatagtgctgaaggatgtggaaggaaagcaactttaggttctcatgggctttcacaggcaaattcattgtttcttttattcaatcaattcatttttccagctctcatttaacatagattcactctttgttcaccaacattgtgtcagtgtctgggataaaacaattaatggaagggacaaaaacc

SEQ ID NO: 316657 - DNA, 4001 bp, Homo sapiens
atttattctgaagaatgcagttaatataattaaatcactgtaatttaaatcttaggggctgggcatggtggctcacacctgtaatcccaacactttgggaggctgagacaggaggatcatgtgagcccaggagttcaagaccagcctggacaacatggcaagaccccatctctatttttaaataaataaaaatcttaggaattcaggttttgtttcatatgaccagatatgcaaagcagtgagctatagtagtcaaaagagcacagaatcaaagttttggcttcagtatctcctttaatcagcctagactttgagtaggtctgggctttatttcctctcctgttaaagaggttcacttgatgatttttacttctacaatgctatgcagttctataattctgtgcctgaaaattcaaatgacttttagccctagaaaagtcagactgaaatacttttattctaggaatatataaatattgatcctcattttatttacttaattcctttttttttagagacaggatctagctatgttacccaggctggtcttgaacaccttgcttcaagcgatcctcccacctcagcctcccaagtagctgggattacaggtgtgatcccatcaccccactaagatcctcattttaaatattcattgagtgatgcagagaacagtcatacctgccctctagctgtcaaaagttttatttaagacccagcccggtggctcacacctgtaatcccagcagtttgggaggccaaggcaggtggattgcttgagcccaggagttcgagaccagcctggaatatggtgaaaccctgtctctaaaaaaattccaaaaaatcagcctggtgtggcggcacacacctgtagtcccaggggggctgagacaggaggatcacctgaactgggaggcggaggttgcagtgagccgagatcgtgctactgcactccagcctgcgtaacagagcaagacactgtcccaaaaagcacaaaaataagaaaaaaatgttaaaagttcacttacatatgctcttaccatagaagataaggtcaggaaaatggcttcaagattttgaagtgaataactggcccattctaaaaaggttgacctcatctttcacatcttttgttaattttactaagtctattcatatgtgaaaaaacacttcaatactggatcgtgaacaatatgtaaaactgctttggtagcgcagttactgctactgaacattgttatatatgctattcaaaataggtgcaatagttctgcataccgtttccttgacacctcccattgtatccgaagttgttctttaatcggcacacaagcacttgatacttactaaataacggcagacacaacggactgtaaactttggcaaggcctgaggcttaaacgctcaataagtaatttactgaatgaataaacagatgaataggttcagttatgaactagttgtcacttgcctgcaagttaggtgagatctagggcgagactattcaacctgcaaccatcattactaactgaatgtcctgttacctaaaaaaagatagaaataaagcccatctttagggcagaattcaactgccggacttgggactggacgccaccaagtggataaaatatggagctcggaaaagattggattcccggccctgaactgaccacacagttgagaggaagttgaggcctagaagagcgcgcaacagtaagccgtgtcggcaccagactctgttggtcctactgacacctccagcgttagaatgactaaggctccactcctgacccaccggccttgaggaaagcgcaaacgtaaaaaaagattgaaaccggagaggcgaatgcatctgtttacgctaggaccacgctcgacgtcggagaaaagcccacacactcacagtttccagacctggctgcttgccgaaactcagattctcggcacctccagcagctggcttcgccaacggcgttgaacaagggtcgcagctcaatgacgtcatatctccctacctacctccagggttccgcctcacgctctatgtcgcgcgcgcgcactacgtcctatggcttgcgcgtgcggcggctgggcaccgccattttggccggtggccgtgagaacacgctgtgtggctgaaaagtgaaggcaagagctgatttggcctctgtgctcccctccgcaaggggatcgttttctccaggtacgtgaatagcccggagaggtttggccgttagctgccatctgccaggttggaaagaatgtagggacgttctccgagagcctttggttaggccttaggtggcggagacagcagcagcgcgtggcagcggttcctgcgggacagctggaactgatggagcgcgggcgacgccgagagcttgggggcgcctcggtcttcccctccagccgacccggctgtcgccgctgttgcctgccacacccgcgagggacttcgagaatggacctagatgccgtagtctccactccccctttaccccactcccgccctgaagctaaacctgctggagaggaaggcacctttagaacttacagcactctctagtacccccacactcctccagcacccaaaatggatatattgtcacatgtgcatatttggttgtgggaagtcgtggcttccacgttttgttgagtggaatgagtcatggcatcttgccgccatgaagtcgaatactcgctgtccactcccaggctttatagaaatgatgcccacatgtcactctgcttttctcagaacagcgtgtacgcagctatgactggggttgtcccaagtagtttcccagtagaaatcctatagtttttttggtacgcttttgtagcactaggcactttctccccttacccgtttttccttttattgtatctaatactcattgagatcaaggttgatgtctttactcagaatacctttattatctcttcagggcttcgtacattgtaggcatttaatacgtattgtgaatgaatgacagccaaagccgaattcccacctcccattaactacataagcttattttctcttttttgatggtaaaaatctataagaggaagaactgtccaaataacatgttttatttttttactctttcccaacaggactgctaactagtcatttatgatagtggcatttatgttgcagtagtttgtcccatattctgagaatattcattgtataccagccacctgacactaatactttgttagtgtaaccaaaggctcagaacctgtatttgaaccaaaagctgtttggggtttgtgagctttttgagaacttagttctcccctattttaaaaaagggagtttttttgtttgtttgtttgttggaagagcatctaacaattgggagagagggggagaaaacaatattaagttagagttcttctaaatgtcttaaacttaaaactctttgaaatcagagccgtgtaccactcctaacttctacgtgttttgtaagactaataaactacaataagcatgggttagactatttcatgtgatactaaacatcattagttaacagcagtctttgaaatgcttttacacagcgttacaattattttggctttagactgtaaatgcttctaagtattcctcacttccttttttcctctcagctgtaagaatgacactgagggtcattgttctagtgtcaattttgaacacttttgtcttcgaatctgaaatatccgcaaatccttctttgtttgcaggagcctgttaactataatcttcctctccaagctttactgtgcctaggttttctattgaaaaacaagtagggaatccccttgccccaattattgaaactgatacagaaattgaattaaaagtgttcacacagttaattaacagttctacaaagaatccatgttcatttttcttaaatgcattacaatttatcactatttttatataaatcagtttattaaccacttctggtatgtttttattctactgtaaaaatcaagccagggtagtg

SEQ ID NO: 316658 - DNA, 4001 bp, Homo sapiens
gggctttatttcctctcctgttaaagaggttcacttgatgatttttacttctacaatgctatgcagttctataattctgtgcctgaaaattcaaatgacttttagccctagaaaagtcagactgaaatacttttattctaggaatatataaatattgatcctcattttatttacttaattcctttttttttagagacaggatctagctatgttacccaggctggtcttgaacaccttgcttcaagcgatcctcccacctcagcctcccaagtagctgggattacaggtgtgatcccatcaccccactaagatcctcattttaaatattcattgagtgatgcagagaacagtcatacctgccctctagctgtcaaaagttttatttaagacccagcccggtggctcacacctgtaatcccagcagtttgggaggccaaggcaggtggattgcttgagcccaggagttcgagaccagcctggaatatggtgaaaccctgtctctaaaaaaattccaaaaaatcagcctggtgtggcggcacacacctgtagtcccaggggggctgagacaggaggatcacctgaactgggaggcggaggttgcagtgagccgagatcgtgctactgcactccagcctgcgtaacagagcaagacactgtcccaaaaagcacaaaaataagaaaaaaatgttaaaagttcacttacatatgctcttaccatagaagataaggtcaggaaaatggcttcaagattttgaagtgaataactggcccattctaaaaaggttgacctcatctttcacatcttttgttaattttactaagtctattcatatgtgaaaaaacacttcaatactggatcgtgaacaatatgtaaaactgctttggtagcgcagttactgctactgaacattgttatatatgctattcaaaataggtgcaatagttctgcataccgtttccttgacacctcccattgtatccgaagttgttctttaatcggcacacaagcacttgatacttactaaataacggcagacacaacggactgtaaactttggcaaggcctgaggcttaaacgctcaataagtaatttactgaatgaataaacagatgaataggttcagttatgaactagttgtcacttgcctgcaagttaggtgagatctagggcgagactattcaacctgcaaccatcattactaactgaatgtcctgttacctaaaaaaagatagaaataaagcccatctttagggcagaattcaactgccggacttgggactggacgccaccaagtggataaaatatggagctcggaaaagattggattcccggccctgaactgaccacacagttgagaggaagttgaggcctagaagagcgcgcaacagtaagccgtgtcggcaccagactctgttggtcctactgacacctccagcgttagaatgactaaggctccactcctgacccaccggccttgaggaaagcgcaaacgtaaaaaaagattgaaaccggagaggcgaatgcatctgtttacgctaggaccacgctcgacgtcggagaaaagcccacacactcacagtttccagacctggctgcttgccgaaactcagattctcggcacctccagcagctggcttcgccaacggcgttgaacaagggtcgcagctcaatgacgtcatatctccctacctacctccagggttccgcctcacgctctatgtcgcgcgcgcgcactacgtcctatggcttgcgcgtgcggcggctgggcaccgccattttggccggtggccgtgagaacacgctgtgtggctgaaaagtgaaggcaagagctgatttggcctctgtgctcccctccgcaaggggatcgttttctccaggtacgtgaatagcccggagaggtttggccgttagctgccatctgccaggttggaaagaatgtagggacgttctccgagagcctttggttaggccttaggtggcggagacagcagcagcgcgtggcagcggttcctgcgggacagctggaactgatggagcgcgggcgacgccgagagcttgggggcgcctcggtcttcccctccagccgacccggctgtcgccgctgttgcctgccacacccgcgagggacttcgagaatggacctagatgccgtagtctccactccccctttaccccactcccgccctgaagctaaacctgctggagaggaaggcacctttagaacttacagcactctctagtacccccacactcctccagcacccaaaatggatatattgtcacatgtgcatatttggttgtgggaagtcgtggcttccacgttttgttgagtggaatgagtcatggcatcttgccgccatgaagtcgaatactcgctgtccactcccaggctttatagaaatgatgcccacatgtcactctgcttttctcagaacagcgtgtacgcagctatgactggggttgtcccaagtagtttcccagtagaaatcctatagtttttttggtacgcttttgtagcactaggcactttctccccttacccgtttttccttttattgtatctaatactcattgagatcaaggttgatgtctttactcagaatacctttattatctcttcagggcttcgtacattgtaggcatttaatacgtattgtgaatgaatgacagccaaagccgaattcccacctcccattaactacataagcttattttctcttttttgatggtaaaaatctataagaggaagaactgtccaaataacatgttttatttttttactctttcccaacaggactgctaactagtcatttatgatagtggcatttatgttgcagtagtttgtcccatattctgagaatattcattgtataccagccacctgacactaatactttgttagtgtaaccaaaggctcagaacctgtatttgaaccaaaagctgtttggggtttgtgagctttttgagaacttagttctcccctattttaaaaaagggagtttttttgtttgtttgtttgttggaagagcatctaacaattgggagagagggggagaaaacaatattaagttagagttcttctaaatgtcttaaacttaaaactctttgaaatcagagccgtgtaccactcctaacttctacgtgttttgtaagactaataaactacaataagcatgggttagactatttcatgtgatactaaacatcattagttaacagcagtctttgaaatgcttttacacagcgttacaattattttggctttagactgtaaatgcttctaagtattcctcacttccttttttcctctcagctgtaagaatgacactgagggtcattgttctagtgtcaattttgaacacttttgtcttcgaatctgaaatatccgcaaatccttctttgtttgcaggagcctgttaactataatcttcctctccaagctttactgtgcctaggttttctattgaaaaacaagtagggaatccccttgccccaattattgaaactgatacagaaattgaattaaaagtgttcacacagttaattaacagttctacaaagaatccatgttcatttttcttaaatgcattacaatttatcactatttttatataaatcagtttattaaccacttctggtatgtttttattctactgtaaaaatcaagccagggtagtgacatgcacctatagtcccagctattcgggaggctaaagcaagaggatcccttgagcccaggagtcccagtctgtagtgtcctgtgatcactgccctcagccaggacaccatagcaagatccctgtgtctttttaaaaaattgtcttttacagtcttttggtttttaaaatagtttgaaaaattaaatattttagtagtttaacagaaataaagtttaagcaatttcgtggtgatttatcccctggaggggaattcattatgctctttcactgagtaattgtagaaaggcattcagtatttaaattagaatgcatggtgtcca

SEQ ID NO: 316659 - DNA, 4001 bp, Homo sapiens
cctccagtgatcacatcttctactgcactcagccactcccagggtcacacctccggcctggtcattaccaacaactgcagggccaccaaaatctccattttaaacttcccactttccatccaccacccctctttccaggtcatctctacaacactcaactccaattctttgacctcaccaggatacagtctattgattctaccacctgttcactgtccctctccccacacatgccttcacttccctccttcatcaggttagaacccaaagttcagaaacacaatcactcctcttgcacgtaacttcaactctctttcatctttgccttgctttgtcatacttgcaaaacgacaatcctggttaaacccaaccatgcctgcacccacacagccaaacagaacggagagagacacatacaaccttattcaaccagtgtctctcaaataataacaccgatctcatgtgggtcttaacactgactggcaatcctattaggtttcccaagtccacctgctttgttagctttttcatacctcttctttctcctcaaacttccaatatattcttctccatcttcacccataaacaatgcccttgcttcttccttcactgagaaaatggatgtaacagtgccctctatcacgcctacccatctgattgcacggatgtgcctcccgtctaccttccctcctacttctgtgacggtaccacctgctgctctctagagccacaacagagtttcaaagcatcccggcagcggagggagactagctagatttcatggagggccctgaaaaattagacatcaataccctggcgactggatcatggtagataacatggtgcagactacagtctgcagggtgctaagatttccttatcacctagtttccaaatttggctctatacaactctcacatggccagataactctcaagccagaggcggaaagatgcacaggtgaaggtttccttacaaaatggctggcaggtaataactctcagcagaaagttgggtacaactggtttatactcgatgaagttttatgtgaacaagaaatgctgataacacccatgcacgttctgtctggaatccaatgcatgccttccttgtccaatttagaggtatttttagtggagggtggttatccaacccgtactataaaacgtggacaagagaagccaggttcttaaatatatcctgtgtggcagctacatgcaggcacatttgcagctgaagtttgacaataactcttcctactgctattaaaactgtaagcaaacttagggcagggtccctgcatctaccattatgtctagctcatgagcagcacatagtgggcttttttaaaaagttcatttaactaataaaccaatgagtgaagaagacttggggaagcaggattgcgtgacggtgttaagctgtgtgaaaactgttactttagccataaaagtaccgaaaatagcacagacatcacctttcgcatatatacttaaagtttactgccgtcctgggaggcagggaaggggtagcaggtggccagccatgtctgcagaaggggaaactgaggctccggccgcctgtggcccgaatgaacaggctcgggctcggtgttcttgggccccccgggagcagacccagcacaggcgggctcccgccggctcactcacctcgccagctgtgttggccaaagcaatgagatcccgcttgggcgaccagaccaggaaaataatctcctgcgggagctgcttctctcccaccacccggaaggatgggaaacaggtcggaaaacgcaacatggggacggccctgcaacgacaccccagtcagaggccggcaggagcccccggctctccacgaggagccccgaccgcgcctgtacctgcaagagtccccaccggcagactaacacggccccagtggcctctcccctccctctgccggccgcgcgccacagcctccaggccgccccgccccgccgctgtcgcgcgctccaggcacttccggcgtcgggactgcctcgcgagaggaggaggaggggcggggcgcgcaccggtcttgggggtgctgagagccagaaggggcggacagggacggggcgcggtgggcggggcagggaggagcgaggggcggatcgaggtgggggtaggatggggcccgtgggcggggcagggagcagcgatggggcagagctaggaagggtggggcacgcgggcggggcagggagccccgaggggcgcggagagggagggagccgcgcgccggacccaggtgctggtgggatcgctgggcgccgggacctgaaagggcccgagaagggcggggcaggcccctgcggccacacgcaggtcttttgggaacccgtgtgtgcacgtgtgtgggcatgcttgcatacctttcccgttttcccggaaattctctgctgtgggcaaagggacggtaggggtttatggggtaggcttcagcgacaacggggagatgaaaaagaatatgaactttaggtcctgatcagctggcgcctcctctaacagttactaagcgagtagttctcatgtcagtcctggtgggtcagtatagaattttaaaagtccccctgtccaagcagcaccccaaaccaattagaagaaaattaaccctggatgggcccagtatttactaaaactctttgggtgattccaatttggagagaagaggcgcgtgccctaaaacctccctaacaggcaaataatactgtgacatctcatcccatttaaccctcacaacttattggtagttgcagcaccgtcataacgaataaagagtgtgggctcagggccgggcgcggtggctcacgcctgtaatcccagcactttgggaggccgtggcggacggatcacaaggacaggagatagagcccatcctggctaacatggtgaaaccccgtctctactaaaaaatacaaaaaagtagccaggcatggtggcgggcacctgtagtcccatctactggggaggctgaggcaggagaatggcgtgaacccgggaggcggagcttgcagtgaggcggagcttgcagtgaggcggggcttgcagtgaggcggagcttgcagtgagccgagattgtgccactgcactccagcctgggcaacagagccagactccgtctctaaaatataaaaaaagagtgtgggctcacacacgatttcttctataggtacttgggcatttactatgtggaggaactgaggctacagcaatgcatgggacgggaactctgcccagaggctcacaggccagcctggcagacttgtaaatcagaactcatctgatgttgctttatgtaggacacatttaaatgagtcaacctgttgacagttcccacagctatgacctccctaagagaatgtgacagtaccatcctagggttcttaaacttaaaacctatggtagaaagccatctactttttactacctttcacttgttcaaagaagaaacagacggcaggtcctttaactttcaacaggccccatcttcttgacctctgtctggatctagcccctgggaagtagatgacggagggagactaattcattcagcatcaagtaactattttgtgccaagtactgttcttaatccttgactttatacctaccctgcttcctgtcacgggctttgcagcccttgcctttgccacaaacaacttaccaagtgcccccaactcttccagaatcaacatttctaaggtaaaaatgcatttgcctttgtttttcacaaaatgcattttcaggtgttagtgttttggggcagttataatggatcacctggtgggggtctagtatctatgcacattaaccttcttacggaaattgaatgtccattttcctggaacttacctgaatacaaacacccatacagcacgtgaaaatcactgttcccagaggcataaacaccgtactgcaaaggacagagtataaccacctgcacattaagtcttcacagaatataaattttctaagccttac

SEQ ID NO: 316660 - DNA, 4001 bp, Homo sapiens
cataaatgggtatcttcaccctgagaagcaggaaatgtgtgtctgcagagaaatcaggcctcttcagttttgtgaccgaggaatccatgtgcccaaggatgagcatcgttttatcacactccccttcagagagttttaggcatgtggccaaaaaagggggtgtggtctaggcagagacggagggccagatcaggaagactacctctgaattcctcacaccgtgctcgtctacaagaaatggctaacaaaattacaagcagtgatgcagaccctttccaagatgaatatagcttcactcaacaatatggaaggaggagaaagtagggtggggtgggaggatcttccatttctctatgtcttcattttatatggcttgtacctgtaacatacagggttcaaaagatgaattagaactgtctctgtgctagtgtttatgcagttcagtggaatagaatgggaggggaatcatccatgttcacaacactgggtggggcatgctctcttctgttgtttgttgttctgtgacttaaaccatatactgcaaaaggctaaaaaaaaaggacaaaactcatctaagcatattttctttgcattcataccatcatctttctcacccaaaagtttcttcaatgcctaagtgtttctggaatcagtgtttggccccaaagtctctggtttgtgcagagattcatagaaaagactaggttctcttcctttaaaaaataaagattttccaatgcttaaagacatagcctaattatttgcctattatccctcaaggggacaccatacaccttgacctagaactctatcaagtgttcacagaaaagtgccagggcaaataaacaatctgttcttctaaattcccctttatatctccttccaaccacacacatttattttcagtctctaaagcaaacttaatgttatatgctcaggaggaagagaaagatgttattgaatttattcctttgctctccaaaaaggccacacctaagacatcgtcgaggtgagaatcattcctgatgcatgagtgtgggaatgtggtgctttttaggaataaaaaataaaaaccaagccaaagaacaaacaaacaaacaaaaaaacactgctcagaaatctgtatctgttacatttctctctactccttaattgggctttcgatgcaggaaagacaattcactagctgggaaagggagaaagaactccatcattcttctactgccagcacctgttctgccagctgacactatttaatataaattttgaccataaaaaaaggcaacatactaatagcactgctgtttaccaaaaactaattaaatctctttactgctggttcacccccgctttctctcacaccacctactcacccaatgcagagaaggggtggcaaccactttctccggcacagacacagccagtgtcttaacacaagcagtattctgaccaaaagagccaccaccctcttgcccctctccctgcttatcatacagggaacaccaagtccactctggggctgggaatctcaaataaatcaattcactttaaccagatcttaaaaatctgccctacgattacagaaagagaaaatgcaaatcagaaaaacacatcacatggagaacaaaccaaaaccagggctggggaacatttgcacatcagcgctgcctttgaactccagaatggcatggaaagcgccgctgcccagcccagacccaaggagggggttttacaaaggcttccagcaccccctatcaacacaaacacttcctccccgcttccaaaatgctctgaataaagaccttctttaagcacttactgggagcggcagcttctctctgcaatgtgcctgtgagtcacgcagcaggaggggccccggagcagggcaattcggagagcccccagcttccctgcaagctgatgtctatgagacagcagcccaggaaccgactttcccattacagcctcagactgtaatccatgtgctttcggcgggccagtcccagctgcccacagagcaccacatgatctgctctgacatcagatcagccagacgtgacagcccatccgccagcctcttccacactcttgggttgcatcatttgagtgcctttggtttgcatttaagcaggtggtacagagtaaggaactgttgttttctcacaaaatattttttttctggtttcttctgttctaaaagaagggaaaaataagcaagaaaagcacttgaatttgttgcagcctaaatgtatcagatatatgggaagtaactggagttccacgcctagttcagagaagctgaggaataagctactgccaagatgccaatgccgtgggagtgatttcatctataaatcactaccaccaccataccccaccgcctttcagtagatcatcttttatataagagtttatatatatctatatatacatatatacatatatatatgtttaagtcataaaatattggtaggtggtgtgtgtgtgtgttttaagctagtcaccactgagtttagttcatgggcaatctcagtgaggtaaccatgagactcagtgcaatacacaataattctattttgagaggattcacatatagtccaacagaaatagatgtacagacctggacggataggcagataagcagacaggaagtcagaaccatccattcaggcttacattcattcattcaataatcatttattgatcacctactatatacccagtccaaaaacagattatcaaaatggtggaggggttggatatttgttacagagcttctaattctacttctgtgataagacaaggaagtaagagccttatcaaggatccttataaaatgttctgtgtctaatactgaatctaaaggctggtaaaaaaaatcaggttttatcttaatttcattaggataaatggtaacacatgtaatctttaaggtaagaataatcaaaatcaataagactttatgaagcaaaatcatagcccgcttagacagctgtgaccagaaatgatgtaattctaaaattacaaaaaatataatgctcccctagcagagaggagaattcactgttttttttggacaccgtcttgctctgtcccccaggctgaagtgcagtggcacaatcttggctcactgcaacttccccctcccgggttcaagtgattctcctgcctcagcctcccaagtagctgggattacaggcatgtgccaccacacctggccaatttttgtatttttagtacagatagggtttcaccatgttgtccaggctggtctcgaactgctgacttcaggtgatccacctgcctcggcttcccaaagtgctgggattacaggcgtgagccactgtgcccggccaagacacttcttaagtagaaaaataaatatttaattttagttttccttagtttaataattagctgtttcctataaaataatcacaaaatatgcaaacccttggttttcattattttgtctttgtcccttatatttaaagtgaattgtgccattttcttatatgttaattaaggctataatatcattatttgatattgtaatcaatataatagtatttgcatatttttatggaaataattcaatctaataattataaattactaatatcataataaatttgtcatttaatatataatatttaactcatctatttgctttgtaccaagtgtgtgatattttcccctgagttgaccaggatgcttgtgactgtggaattcaatatgagattccaagagcacttgtttccatttgttctctattggaaataagctatataaagagtaaaactgttcaagtctactactgtttctactgaaacagaacatctctgacaccagatatgtgggtttttcacatcaagaaatttcccaattttctgcagacaccaagtgccctacaatttaattcaattctgacactgactacccagagttaacgcagacaccacaggttaagggctcagttccacaagactgcccccaacttc

SEQ ID NO: 316661 - DNA, 4001 bp, Homo sapiens
tgtaattagcatttttttcaaaagcaatttcttttaggtgaaactccttttaacactcaatattcatggtgctctgacacacacattcaaaacttgctctttcattttggatgcaagtttggaaaaagacttactcctaaaataaatttatttgagaaaattcagcttaaagatatgatagttattacataggatgatttcgttgtctctacctcctcaaagactttaaaatggctttggtcatgtgaagttagtatcatcattcagagctcaaaaatctcaagattcattctccacccctttaatagtcctgagtatattgtttctaaagcaccacagggactttagagagaaaatacgggattttgaaatgataatgtgaattaaaacaaaaattcctttttttctttctttttccctctctcttgcttgctcgcgctctctcttctattttctttttctttttttatgttgttcaattagctaacactctataaaaatgccctcaaggtctagatctggaatgcttaggtacaaaaggaaaaggacattctaccaatgttcctgcttgccctgaattatccttttgcctgttatcagattgtatcactatctctacgctatgattaaaaatcatcacatgcttatttctatcaaattgcatgataccatacaaatatactactcccttgtttgctgatacagtgatcttttaaatatcagaggttgcaaattatttacaatctttagattataaaacatttagtacactagacatctagaattttgaaacacaatgcaacttcattagcaaaatgaaaaatattcatttgttcatgcttattattttttgcaatctgcttattcaaaatccaaaaccatctaatgttgaaagccatttacattacaatcatatctaatatcctgcccatattattgctccaggaaataaatgcattttaggagaatttatttatagagcatctctttcagaggtgaggctcagggaagctctgtgaggctgcaacagtttaccagaaggagtcaggccataaagaaagaagtgctggcattgggtggggctgaatagtttgcatcttttcccactgtttctcgctgctatcatttccatgaaaatcgagggtgtgggaatgtatgccacagtaagaaatcctacagactgctttgtgtgcccaagagcccccaccccataacatctttagctgtttttcttattattgaaagagctatcacactaatgtctgggaaaactgcagaggagctaagcaagccaaagaaatatcatgctggggatgatatttctcctgtcacagcagtcttttctccttaggaggaatacacttagcatgaaaccaaaaggcttttgctgtctagccatctcaggatcatcatagagcaaacgcatctggccaaaaatctgccttttgcttcacaatccacgttgcttaacactcttccttttacacactaaaaataaaacgactctctctacccagttaacaccagaagaatccatcagtggccacggtcctcagtaatccacatgtggaacacaccttatctctattcacttcaccatgctccagtcagtgtatccattatgagccatggctcctttactattctcaaaaagcagcagtttgcacctgcctctttaaaaagcaaggcttggcactgttatcgtctacagttactcataatgctccacggtttccatagccttgctgatattacacactcacacatgcacacacatacatatttatacacagacattcctaattccggcgatttaccttcttgggtctttttctcctctgactactgccgttgaacttctctccactgtcgcttttctgagctgcatcttcgttcatcattttgaacagtttggaaagaaaatatctctgccatcaaaccgtgccgcctgtacagaccactagcgggtatgcacttactggaggaaagcaggaggaggaggaggggtggggaaggggcgcgcactgggagggtaaggacggtgacgttgccatggcagcagctgccacaactgtttatctgactgcattgttaaatctgattcaaccaattaccatcaggaaccggttacaatgaagaaagccttgaaaaaagaatgccagggactcgaatgatttggggactctgctggttggtttctgacacacccttgataggatcagctctcaacctacacacaaaacctgtacttaattttcttcctacaggtacttcaacacggaacagatacaatgcataatgagaaaactgtaacattctagaatgtgtctctgaacctgaagaggtacatttagccagtcaagaggctacttaaggaaaaggattggttattaatatcctaaagtgaatataagaaagctatgtttttcagatgtcattcacttggtttaaaatataatcttttgaaactacactcaaggatgacttctgtcataaagccttgagaacagcttctccaacctccagataaccccaaccactctcttctcctgtgccttctctttccaatgtaagcttctgacagtatacctgtgacaatgtattacacaactgcccagatacctaaccatcttttcttgataggccaagagctttagatcaggagtgtgtgtgtgtgtgtgtgtgtgtgtgtgtgtgtgtgtgtgtgtgtgtctgggtagggggagaactgaatttcccagaaccaagcataatccatggcacattaaaggcagttaatcaaggcttgttaaatatctaagacactatcagtaataaaaacataaaaaactaatggagttgcaatattttataacttatctcaaaagttttcttaacctaattgtgtctattgactgatgaataaaacacaatccctcctctcaaggggtgtatactataaagttctggaattcttcttgattttaaaaaaatggggcttgtttttataacaagaaacccaaattcacttattgattaaggtggccatacttgtatatttaaaaatattaacttgtaggctgggcgcagtggctcatgcctataatcccagcattttgggaggccaaggcaggtggatcgcaaggtgaggagctcgacaacagcctggccaacgtgatgaaaccctgcctctactaaaaatacaaaaaaaaaaaaaaaattagccaggtgtggggaggctggggcaggagaattgcttgaactcgggaggcgaaggttgcagtgagccaagattgcccccagtgcactccagcctcggtgacagagcaagactccgccttgaaaaaaaaaaaaaaaaaaaaaaaaaaaaaaaatatatatatatatatatatatatatatacacacttgtagatgcaaccagaacctaatatactttgtacaaatgcacatatgtatattctaaacacttgcccttattcccagacaatgaacgtaaagtataatacacagcatacttagaagtaaaaatagagtaaggattaaaccaacgagatagtgtatataaatgcactttgaaattggaaggtgcctatgtaaatgtgttgctattgctaatcttattattattacaaatatagacagttttcaactctgaaagtgtaccttaagaaacatatttatgtgaaaatgactgcagcagttgagaactcacctttccatcagacagagcaacaaaaattcacctatttccccattgctgttaggattgctccttctctctgccttaccaccctaaggcccctccacgtcatcatctggagtcaactctgttttgctgcccctcactccctccaccctcctcctgtttcagcagacccattccaccaatgccattctctcaccattgcttcagtggtatcttggatcacacagccaggccaaagaggcaaaggttctctctttttttttaaaacaaaaccccaaagagcttctacagaagcctccagaagcccaactccc

SEQ ID NO: 316662 - DNA, 4001 bp, Homo sapiens
accaagattgacaaatatttaagtcaaatgatattttaaataaagagaaaaagctacttatttagtatgataggatgcaacaggtacatagaaactaaattaagataaattgagaattaggaaaactaaaattgcagaggttgttttaataactagcaacattgaataaataaggtaacatgaaatcttaacatggtattaaacaattgagataataaaaagccagttgttcaggtagcattaaaaaaacctatgcataaagcacaaaacagtgctcaagtaggatttcctcagaacataaataagacttctaaaatctgttatatgctgaagttttaaatggctaagaaaaattgtcaaatagatttatcaaaatctccaaagcacacttctttaaaatccaaaccaaaaaattttaaaagcaaattaaaatgtaacactagaactctgtaatctaattaggcttatttaaactgaaccactaaaaagtcatgtggccacttgtaattactaaactcctttgatgaaagtttatactactatttctaagtagataattttaccacacatttttaaggaaactcactaatagaaacaaagtaaaaaataaaagagaaaagaataaaaattaaccacaattcaacttagacctaacagcttttaggaaaggggaaaagagcacattggcaggtgtctgcaaggaggtaggtaataaatggaatcagttttcattctgcagaacaaccatgagacttgctgcaatgtcagctccaagcacacactgagggactccagaaaatactcattgatcatgcagcactttataatgcgcataggcttttttctcctgctaaccccgcctagcttccctttgcagcttcttctcccaagccctctccccacagtaaaataatcttcctgaagatgtgaaatagttaataaattatctcaacagtctaagtattaggaataccactcaccaccataaagcctctttatctgaattacccaggttttatctaatgaggaaaaaaaagaaaaaccctacacaatcccacagataagaatatgagatttaaatacctatacctataaatacaaatttctaatagtatactacattcaatgccaaaagcaattatagtttcactttgacatgtatttccttggactgatttatactcaaataggatcttataaaatttttacaaccagaaaagagaaaatataatttaaaatgttcatgattcaaattatagtaattttgtattgatgtctctctagcatcagtgccctaaatttcagggttttaatatttttaatttaataatttgttttataataatcaaagtcacatgaaaaatctaggaccagagtataccagctaaattaagcaatcagattgatataaacatgcttagtttaaagctaaaataaccgtttttaatagttaactgcagcaaagctttaggcttagatatgtaaatgaattctaagacatatgatactaaaccttactcaaagctgctttgcagaccccaccttctaatgagttaatctaaaggtcaccaccagcacaaggctttttattaagcctgagtctcccctttttccctaacaaacatatatctacaatttatgaaacatgaagtttaaacaaaataattatagacgtctatagtaatcatgtgaaccagtctgaaacattctcacacggaataggtctgaccgtgtcttgcttttatgctctgcttctctttgctctctcctctaatctattcatctgtaaaataattccggcagataagatttctttgttcagatttcaactttcatttcacttacaaacctagccctacctcaagaatgtcttctagaacatatgcttccatttcagccgctgtctccaccatgttttatcaaactgccatgtttcttactgcactatgattagatcattgccagcaggaacactcctctgtgtcagcaagggaacaggaaatggaatgttctattacatgcctaaagcagcttagctgttcactagccaggcatctaccaaaagagcagggggtgactcactgtgtattttttaaagatacagaagctctattccaaagcaaacttctgtcaagtaattttaacagacaaaataaagtctcttattttaccacttcaatttttaaaatcctaaaatttcaaaaaagaaataacatattttttaaaaagctatttaacacgtctggcttcctggttgaacaaaagaggttgaagtgggttacgcagcaatttatccttagtaaagccttgtagtgagattaatggttgtattaaagacgcaaagaaggaggcatgataatgccaagttagaaatttgctacatcaggcaaatgtattatataacatacatattacagttgacttcagggtttcaaaaataattatcctaatgtagattttttaatagtaaattggtttttataaactaatctgcttgtaaatacttatgagaaccaggttaacattcaactaatttacagttactgaagcaagctataatatttgatatatgcattttctagtagtgcctttaacttcatttactaaccaaagaaatggcctttttctcttacaataaatactctaagagactaaaatatcctagataaatgaaatttagagacaccaaatctggatcatcaaacagcaaataaagtgagtgagtgacagtggagccaatatatattatattcattcctgtaattgatcttccatttagtaaaacttgttagattgtcaaatttcttccttatacaactttgaatatgaaaaaatgcactgaaaaaggaacaatgggccgagcgcagtggctcacacctgtaatcccagcacttggggaggctgaggcgagcagatcatttgaggccaggagttcgatcaagaccagcctggccaacatggtgaaaccccgtctctactaaaaatacaaaaattagctgggcgtggtagtgcatgcctgtaatcccagctactcaggtggctgcatgagaatcacgtgaacccgggaggtggatgttgccattgtgccactggcaccctagcctgggcaacagagcgagactgtctccaaaaacaaaaaggaacaatgttttatgctctaaactgagaaaagtgatgtgatgatgtgcatgacattgctggtactatctcctcaaagtgatgtcatgttttagtggtgattttggagtactcttgggcctcaatttattaatcatgaaatgggataatattcattcaacttgaaatatcagaaactgctctaggtgcagtcaactagacagattatggtttcttaacagtttatatgaagattaaatgatataaagtacctactacacggtttctggtatttaagaaatacccatactgtgtcaagcaatatatgatttctttttttaaaaaaataaacatattatttatcctcataacaacccagctatgtcatatttttaaactacattttgcttactatatgccattttaaatgctttttatatattaactcatttaattttcacagtaatcctaaaacatattattattatccccattttacgtatgtggaaatgggacaaaaagaggttaagcaacttgcccaattatttcaagctaagctaattaagttgaagagttgagatctgaattcaggcagtttgcaccagactggagtccatatccagaatcatcaactatacttcttccctgtgataatctcattttacgaataagggaaccaagtatcagacagggcacacagttatatgcagagtcaaatccagatgcaaatccagaactgattgcaaagggtatgtggaattaatggcaaacaaatgacactatgttttacctcataccatacctagtgtttacatttaggtatgggtatgcctggcatttaaaggctgctcaaagtaatttacattgttgagacctggcttaaa

SEQ ID NO: 316663 - DNA, 4001 bp, Homo sapiens
taggccaatataagtctatcaatacaaacctattctcagaatccaacaggctaaaagggaataaaaacaaggactggcatatttttgtcatacatacttcagcacttaatatctctacctatacaacttcatccagtctgagataaaagagaatctggtcttctacaaatagacatgtgtcaaatcctttaaaaggtacttctctatttcaacagagaccaggattcaataattccaattttcggaaaaccagacttgcatcaaaataagttccatgtttgtggaagagaataaatagtaagtggtacttttagatgaatcacttggtctcctcttagaactaagtttaaaatcagcctttaaagctgttttccctctgctgataaagatttccctctccaaataaagatttttctagattctatttcaggaaggagacaagagagtggtaaaacagctaataactagtaaagctaactctcagttggttgtcagtatggtatgttttactgagcctttgggttgtaagggcttctgtgaggaataaggtcctgcaacgccgcctgtctgtggacccaggaaaaattataaagttattatgaaaccagatcactaggacaaaccgagaggccttcctattccaactcaccacaaccaggcctggctccaaagcctaccctttggctgtcccatattacgggacaacaggtcctagcttaattctaactcactaaggaaacattcgaaggcatgtatgtatgtacgtgtaaggatcaaatatatttttcatccacttacaaatgtatatggtcatttgtaattatttaaagttactgataaatttatacaaatacagcatcagttcatcgaaaatccctgggagatcgaggaaatgaagttacttcagcagccaggatagttacgaaaaaccctgcagaacagtatggaaaagtacagcttctcacgtgtccctcacatacacaaacacttagctctgagtccattacaaccttacgtcccccctcaaactgctcccctccacctcacaactgggagaagttgatcaacctcctagttggtccccaagagactcatttacccattattttactcctcccgctttgatcccgatcccgcctcagactaaggtggccctactggccccaggcagaccacccccccaccccccggcgtgcaaacagggaatctaaccaattccctccatccttaaccaagtgagccatcccatgataacaggctgttcaccaactctgtgaactccgtggtcctcccacccccacgtgtcagctaccctcccccacattcccacacctcacgatttaggccgagggaagaaagggggcagtcgaaagcctggcccctaagagatcaacccactggaatctgtcccactccaaatcccctcccaccttcggcccctatcccttacagtcccttcctccctccttcctttgaaaccaggcccttgcctcagaaacctcctcttcctcgtcgtcgtcgtcctcttcttcctcgctgttgttactgctggtgccgccgccgccacctccgcctccaccgccgcctccaccgccgccgctgttgtcgctgtcgctgctgctttcgctgctgctggggggtcggcaagtccggttacgcttggccttgtggtgctgctgctgcggcggcttcttcttcaggagcaggtcgcagactcgcaccatcccacgaggagacgaggccgagcgagctctgctgctgccgccaacgccgccgccgacctccgccgccgcgggggggcccgccacagccgccaccgccggggggctcccttctccttctgcagccgtcgccgccgccaccggaaccgtcgccttctccatccccagggaaagagggagggcgcggacgggggaggggcgtggggctacgctctaccgcgacttcggccgcactggggccgacacagcaatcggtgccgcctccgccgccaccgcctcggtcacctctactgccgccgccgccgccgccgctccgccagctctcacctcgtctcgcgatactaagggcggggagcctgacgatgggagggagggagggagggagagggagggagcaagggaaggagggtgaggcgtaacagggagaccgggtgtcgggagaaccagaggagaggagactggaaagaagcggggaagtgtgcctggggcagcttccgaaggggaacggcggggacagatgaggggggcgcgattgcaaccagagcgcccgcgagctcccggatttcttctctttcctcgctatttcccgcacacacagccctgcagccctcccttcttccttcctggcttgtgattagaacgcagccgcaggcggaagtgcagtgacgccatcagccgtcgcctgagccgtggcgcgcgggtggccgaaaggcgaaagtgagatttcaagggccgggtctggggccccgcgggcgcgcagtgctgcggcgtgtggggagtacggggaggctggagaggagccggccccgggcagtgtgaggtgcggaagcgcggtccagacactttgctgacgggaggccggtccgccagatccgggaggtggggcctcgttctggactgctgtacgtagttttattcctggtcatttttttccaccgccaaatcgagagatagagctttggatcatgagagatggcgtcgtgttgggaaaagagccttctttacctgagtttaagctcggctcatagacatcctctacctgagtttacacgtgtgtaatatgaaggcagtcgattaggagatgtctaagatcattacttacacctcaagtttccaaggggaggaagacacgggaaggatgcgtggtctgtgccagactttgtagacgattcactgaatgaccctgatttagctcttccggccctcttcgattcagcttggaagcaagcataaatagtgattgttgtctgtatacttctctcggaaggaatgctgttatgggagttgtgggttcatttttaggtgtctgaagaagtttcaggacttttgaaatgatagtggagcccattgaactcagaattatccctttctggtctagtaggagtatagtggcatacggaaaatgaagcaaacatcaaagacagatgtactggcacaagattaaaagtatgtctcagctgacatagttgccattttaagactgcttagtttagctgaatatgcctggattttttttttttttagcattttttttctttttagcattggcataccatatgaaatgtgggcagttgccagtactctacagagtaccaaggcagaattggcaatgactaaatcaattcattcaaacaaaaattcatcatgtgcctactgtgcgcataatttgtggaatcaaagtctcttgtttccaggggctttacagtgtaataagtgctatagtaaatatatatacggagtggtaaccatctgcctattcctctcctacagtcgttgctgagttccagtgtagaacagagcactgcattgtgtatctcaccactactgatttagattttataatttcagctgcatccctccctcctactttgtatattcttcagcatctttttctccctttccacttgaatacttttcgcaatctttaaatcccagcccattttattatatgacttttaacttagacttcacaattttccaagtgctagaaatttcctgagattgccttttctccagtatcaacgaatgagagactccctgttcatatatgagataaactcttcatacatattctagttccaatacccctctttctcatgcatttattatcttttctgttgtcaaccttctacaaattctggttccttagctaattcttctgtagctttcaattatttccttcacaagcaaactttctttctttaaaaagtattctatactcaggaggctgaagcaggagaatcgcttgaacctgcgaggcggagtttgcagtgagctgag

SEQ ID NO: 316664 - DNA, 4001 bp, Homo sapiens
taagaagtcatgtgtttttgatacatataaacctgcatcaacatctcttctaattaaaaacactactgataatcgtttgcaagtgcaacacttcagaaatgcagaattaagtaactagtggactattataacttcagcattctagcatacgctctgaaatgatcattcctttatttagatcttctagatacttttagtgattacattagggatagccaactccatgggctaatttgaaacatagaaatgtactatgcttgcatattcatttcagtatggaaccttctaaaaatctcctcctttggactgaatttttaaattcaagctttttatttttgtttttttcctcggtaagctgcaaaagctttttatttttgattagttcttttagtttgctttttcataccgttttcattaataaaaatgtgtggctgggcgcggtggctcacgcctgtaatcccaccactttggaaggctgaggcaggcggatcacctaaggtcaggagttcgagaccagcctggccaacatggtgaaaccctgtctctactaaaaatacacaaattagccgggcacggtggcgcgtgcctgtaatcccacctactagggaggctgaggcaggagaatctcttgaacccaagaagcagaggttgcagtgagccgagatcgcgccattgcactccagtctgggcgacaaaagcaaaactccgtctcaaataaataaaaacgtgtagccatatgcacatacattaaaatgtaagcaaataaaaagagttcttccagaaaagtttacaatttaaaattcaccatgctttaatattcagtggaagatgcaaactacagtaagaaaactctttaggaaattagaatgcttgtggacatagctcctaagtatttcaattgctgcagggagacttttggtaatgtagcaattacttcttttgaaataaactagatctgtgctgttcaatatgatagtcaacagccacttaaggctagagtatttgaaatgtggctagtctgatttgagatacgctgtcacaccagattgtgaagacagaataaaagaaagtgtaaaatatctaatcagcaattgctttgattacatattgaactgataacattttggacaaattgggtcaaatactaaaatttcatgtttcgtttattaatgtggctacttaaaaacttcaaatttctcatgtcctcacatcaagactggaaaaaaactcttaaattacatctgtgtcttgcattatatttctgttggacatcgctgctatagacatgtttttaacagctgaaacaactcttggcgtctgagaaatgtttgtgtgtgtctgggttggaggggacggctgtacacagcaacagttacctagttacctgctggttgaggtcagcgcccgtttgcagctgccagagaagaaagcaagcaaggccgcttcctgcggctaagtggacaggcgactgcttgcagggatccgggggtgcgttgaccgaggcccctgtctccagcaaatgcttcagaccatccacctgcaggaagagaacagatccagcacccttcccacctttgtccagtcccgcgcccctccgggctggaaacctccccgcccttcacaaccagctctgaccaggcagcgcccagtggtccgtccccgcattaacgagaagacgaatctagaagcttgagcctgcaggacaaaagctcgggctctgtgagcccgaatctcacctcggggttgcaatccagcaacagcatttcccgcctaaggcagatgacaagagtccttggaagtgcagagaggtgagacactcgccgcaccccgacaggtaagaatgcgcaggctggccctagcacgggagaatttaaagaccgctgggacttccgggccggcccttggcagccgcgccccagctccggttacgcccgagcagcctaatcctcaacgacccggaccctgtccagccccgccacggccgcacgtacacaaacactggcacgtggagcccggcgccgggggcagggggagggggcgggcgcgcgaggccatccgccgattggccagctgtggatgcgtcaggccctcccacctcggggcggggcccgcggcggccccacggagcctcagcgcgcgtgcgcagggtaagtcagtgggcgtgagaggactggagtaggagcgggtggggctccgcggccgccatgaggcgcgctgagtttgacacgtctcccggtagtgcgcccgccctttaatccttacggagaagcgggagtttcggctgcaggttttggctctgccggcgcgcacgtaaccaggaaactgggagccacgcgcagctccccgtcgacgccgccttcagaagccgctgtgcactgcgctgctgccgcctcggcgccggggaacgcaagttcctttacctcgcgcgcagtcgcccgcctcccaacccgggaggtgaaggcggggacggcgagcgcgaactcgaggggatggctgtcccgagtggcaacggccgagcccggcccgcgcagggacccttgtggaggggccctcggggagaggccgcagcacgctggggtcgtcacgctggtccacgccgggctctcctcccgggagagcggacccggccgcgtgcgattcggacccgcggggctggtgaagccgctgtccggccccgcgggtgctgtcgggcgtgcgtcactgctttttgtagaacatgacctgacttccgatggcagctactgacgtcagagctgctccctagactctccctaagcgtctttccagaaggatctgcttagaaaccaaagctccagccgagtgtttcttttcccctacatttttagtgattcccttctgttgatgcctttgaaagctcggagaaataaatacgtttattgttatgctgttagaaaacaagttcatgcttgtcctctaaagataagtggtcttttcattctactttttgttttgtagtaagagccataaaatttgcaatcgcaagtttatgttgttatacttagttacccaaggggtagttttaagcatttttattcatatgaatatttgaatataaatgtgtgttcaaatatatagaatcgttcttatattccacatttttaatatttaaactattcacaatatcttttaatgatgtttaaagaacggcagtgtagagatactgttgtcagatttgtgaggtgagcacacgttgatattgccagtttcgcttttgtttatcaattcaataagcactgctttttaaaacacgtgttgaagcttcaggtttgcacagaagttcattttcaggaattcctaactaataaagggtatcagacacgttcttacagttttgaacataaatactgcagttagcatatgtagtgggatatttgtgtggtgaaagtgcctccatatttcatatcttttctttgaaacaagattctgttcagtatgcattaagtggtagttattttttaacttcctgttacatacgtaaatttcataaggaaaggaaatttggggagtcgttacagcttttctccctttaatcacagcgtacctgtccattgctcacattgttttcagaaaaaaaagttgtatctcagctggatatctgacttgactttagtaatgggcctagaaactataaactgaacaaagcttataatgcacaaaaacaggataagtacatttgggggacaatatcttactggcaagtaactggagtttcaccaggcgtgtagcaggtgggatcaattttctaaaacggaagatgatctaagatgcatattttataggcgttctcctaagcagtgctaattctacatgttttaattgctggtagatgcgtttccagaacgaggatgccatttacagcgagtgttaaaaaaaacgttggatgatgagtaagtgaccgaatagatgagagatgtgtgggctgaatcttgagtagtaagagtttgctaaggagtccaggaagggaagagtatttctaagaa

SEQ ID NO: 316665 - DNA, 4001 bp, Homo sapiens
agaaacgcctgattccacagctcagcaacacttttcctaaattttaatgagtcacataactccatggttataactggagtttatgtgattgtggatgtttcaagaacagagatgagacaatacatgtggaaaactaaagaaaaaacccaatctttcaatttgtacaaaatgcttctccagattccaagtgttaattctgcatctgacaattagattctgaaaagaggtccactgcattaaatggcatcagagagattacatttatacggtatgaggtacagtatgtaagtagctctgtatttctcgttgaaggatgatcactcaagagtactagatcgtgccagtttcaggcatctgggcaactgccaggaactgtttcagattatagtctcttatgtggcagaaatgacaaccactgttaacaccttcttaattcaaagcattcataatatgcatttttcaagacagcagattcttaatgaacctgttcacaggtttcttggttttaagacgtccgggtaatcaacaatttccacaagtaactaaaataaaacaaacaaaaatacctcagtgcaaaatatcatatgttaaaaacttattaaggacaataaaggttgcagtgtaccagttaacgtaatctcaaaaatccacgtacttcacctttggcactttcaaaaagttggacaaaaaccactgaaataatcacattctcccttctgcatttttcttcctcattgttatgcttcccaaacagccacattttaatcaagttacccaagatttttgcaacttcaccatagcaaaggagggggggagaaactttacgcacatacagtaacacccttaactccaggcaaaacgctcattcacagtagactggtagaacagcgccagctaaggaagctctattaacttacacagtccagtcagtcaaggactgtctactcctccagccacacttctttgttgataatgtgcaaaaatctaggggaagattaccagggttgcagctggatgggaaacggtttaaaaaaaaaaaacaaaaacgatgggggatgactgttcttataagaatgataaagcaaacacaagtaaaatgtgaatccttccttcctctgggccaaggatggaggtcagggataaaatctaccagtctggccggagaaaaggctgctagagagaaattccttccaagacaggaaagggataaagagtagagtgcttcggtgctggtgggtgtctgcccacaggtccggcctccagtttcagctgacagacaaaaggaactccgggattcccagcgccgggcaccaccttgggttggaaccgcccagaggagccacaggggagccacctcagagaggccacgagcgaaggtgcagcctccacaccgaggtctgcccttccagaggctgggagcgcctctgcaccccgccccgcaccgagattggggtgtgtcttttgaagggggagggggtgactgaggtccttgccaatcccagacgaggggtcgcctcccggtcggcttccgcctctgcgctcccgccccatgccccgctcccgctcccacccggccgacggcggtgcgagggaagagggcaaatctggggctcgaggccggagagggtgggtggttgggtcaggtccaagccacggcctcggcctcccagcttccaacccgagggaggggcctcgcttccaccgccgccgccgccccccggttacctcggccccagccgccgccgtggccgccgctgccgctgttagggactctcagtctcagacacttgcttcgctgagaagtcgctgccagcagcgctcccaagactccactccaactgcagccgcctcctccgccgggcccggggcacgctcccagctccggatcctcctcttggcccccggcggctgccagttccagctttcccagcagaatcggtcgtgctcgccccagcccccaccggccaaccgccgccgccgccgccgtcagggcagtaactgtctcaggcagcccccggccggccggctccgccccgcccgcccagcccagaccccgcccccgcccccgcccccgccccgccgctcggcctttctttgcccgccggctccgcctccgcgtccttcccctcccccaccgcgctctcccgcagcatcccgtgcctgggcgtgtgcggccgcctgggacccgctgccggcgcggcggggagacctgtctcggggcggcgtgggggccccgcctttctcaggggaggcggagaacggggcgggggctgcgttctcacgtctccgagctcacgcgagtcgttgcccccaccctccccgtcaccactgggccctgatccttcctttgtcttccaggccggagggactcgccggctgttggtgccgtatctgctcctgggaggggcagttgggtagggggagattgcctcttgcctctctctgctcaacccttttgcctctcccttaaccccgttgcttccaaagccacttcgggccccgttctacccctcagtcgtccggtctcctttcagtccattaaattccagggatgcttttactttggctgggacgaagagaaggaaggaaaagactgggaagaatgttgcgaaaatagaaatagtgggggtatacagcgacattcctaccagcctcatgaaaaggacgtggcctccatcagatggaggttgacagcaggcttgactgggtctcaggcccctgctcctcagggccacttgatcacccgcagcgtccactaggggggaaggtcttggtcatgtggcgtcaggaaatgccctagagggcctgctcacaggggcctgttggactaagcatgtcagttgtttgcacttactggacctgagttgcttagattccaaatttctcccgggaaaataagtataccgtcaactgatggaataggaaatgtagcattttttattttaattgtttatgctaaaatccagagtgctctatttcccattcctcattaacttgcatgtggttatttgccaaaatattaagccagtctcccatctagttttagaaatttcatagtatagctatcacaataagaaagatggataaacaaatagatcgtgtttgtgcttactctttcatattgtttattcgtgccaattgaggtttactgatcttagtatttaattttaattcatgtaccctgaattttgggcttctttcctaaaacacaagcaaaagaggcagagtataaattctccagaattagggggatgaaaattgatttttaaaaagctacaatttttatttatttttgcctaagctgttttaattcccacttagcttgtttgccacgcagctttatagtcattgaacaggttgactccttcagtttcatggttgtaaaattttatgtttagaggaaaatttaaatgagaaataatgtatatcacattatcatttctattaagccgtttgctaacacaataattaaaataatttctgcccagtagagaagttaccgaaactttttgtttagtgggcctcatttatgataactaagcagtatcatggaatgctgttttaaataacatcagctgtaactaagctgtaattaatcttcagacctatttagaattttgttttttgctttaaaatttatttcacattttatttttattgctttttgctttttttaatagaaaacccttaacagtgacgtatatgtatatatacacacatatataattttatgaaacttctttttatcaattacctaaatgttaaacgtggcataagcagaatacttactcttggtacatattcacatactttaatcagtttcttagttgtattttctccaataccagatactcgcatttttccaaagaatgcaatttttttcaatgtggcctttcttatttttaatttgttcataaaatttcctgaaatcatcacagtttcacataaatttgaaattactgacagctttaacgaatgcttctctgaagactataatgttt

SEQ ID NO: 316666 - DNA, 4001 bp, Homo sapiens
ctacaaagataagccaatgacacttcacatatggtccctagcttgttggacaccttagagtttactcttactgggttttgaattaatctaaaattataaatcattttttgagtctttactgaaattctatatgcttttatttttatacatgatattagttaagtgagttattgggacttaaaaaatgatactaataactgctttattactagaatttattgaggtctccaattctatgctaaaaacaaaaattaatgcagaaaaatcaacataaatatagttgaaatgctgcaattttccagcaatcattatattcatgaatgccttgactgataaaggtattattgatgagagcatttaattactagtcttcattagtttttaattatgttactattagtttcattcatgttatttgacttgttgctggttgtatctttcaatgtacaatgatagttatttgtctcaatgcatttttgctcagcttttaaataaaaaatgtatagatgcacagtctctaaggtacaatatatattttccacactgtttttgctaaaataactatattcataatgtccccaggtatgctttattatttctttgcaatgattttgcatgatttaaataatttgcaacatgctattaaaataaaattctgagatatttgaagcttataaatcattgttttaataaataaaatcaagtataaagtgcattattatttttccaaaaatttgctttagcaaattatttccttattaataaattttaaaaatagaatttgctttaacaatacatttactgtaatttgttttaaatttttagcaacattttcattgtaaatattttctttcctctttttgttaaatcctggagcttattttacttgaacacagtagcaagcattaataagtggattgtagtgccttttccttggactaaaaggactatacttaaaagaatagaatgtgtaaaaaaataaaaagagagagagaataattaatagtaatcattctacaaagctagtatcccagttaatatttacaaatattattttatttggcagtaaaaatagtattttagtccaccgcctcctgccctccctccctccacaacccccagtacacttttcccgtctcattcccacagcaatgttacaatcagaaaaaagtaagtttcagggggcaggattggaggggggaggggatatgggtaaaaacagtcaaatcacaataggaatttttcaaaataggttattctacttagtcatcatcttctccctcatcttcaggttctcattttcgcttctgacccctttcttcttcaccaagctcttcttcatcttcctcgccatctacctctccatcgttataaccttcttcatcctcctcgtcccctccactcacgtcctcctcttcaccttcctcctcctcctcctcgccctcctcatcttccactacctgagcatcttcatcatactcctcctcatgctcaccctcctcctcgtcatccaggccctccacgtggtcctcaatatctgagtaaggggcctccttgtggtcccagtaacagctgtcgagatatgtgagttgcaggagaagcttgaacacgttttctccgtagtcgttcaggttggttacctcgcaattgaaaaggtctaagctcttgaggttttctaactgtttcagtggctctattgtgctgaggtctttaattttgttgccacttaaatatagatgcgtgaggtttggacacttttctgccaatacttccaggccccctgagactcttagttcaagctttctcaactttaactttggtaagtctgagattgaggtgaggcctccgttgattttacttaagaattccagttcttcaaattcatctgtgagggcttcgagtttgccttcattcgaccgactgttgtccagggcaagttctttcacatcagagggcgccctgttccgcagctctgaatgaatccgtctgcccatctccatctctcgcgctctctgtctgcagaggctctcgtgccagccgaattcaatcaataaacctcgaacccacggccgcacgttttaggactttgaagactcaaccagctccgctcggttctcgagccccaatatttacaaatattataataaagggactgataagtaacctgggtcaagcagaacaattattcaagtatatggatcttcctagtaagaaggtaggtgtgtgtgactaaagaaaatcttatctgatgctcacgttgataatttgtgaatacacaaggcactcccctctacactacttactgtgaatcagccttcacaagtacccatttttctttttacttttagagacctgacacgggatatctttgaatctatagactaggtttaaagtaacctgagaatatgcatcacagaaattaaataacacaatgaaccatgaaagacatattttggtgagatctcccctcaaatgaaagaataaaatgccaaaaacatcctgtaaaaagctaaatctatcttttattggtatcatcatgaattatgaattttccacttctgactcacaatgtgatcttggttgtatctgttctgtcagattatacctaaaaccaaagtatctaactaggtttagatacggcaagtggtagaggaataaaatttgagtggcatgtatgtttatttagagaggaataattttttactttctgagacatttatgtttttaatgagcaaggaaaatagtatttctagtgtgaattagttcttacacaaggatcatgagatggttttcagcaggtactagtcctatgtcccacattgacaaaatatgctatattaaaaataatatttccctaaaacaatcttttcacaggctatgggatttgtggaaaaacactcaggaagaagataaattaatatagtgttctattgagaagttagcagcacaggcattaggaaatttgtgtctgagccgtaattccaccaggaaacatggcagaagccttgagtgaataacattttttgcttcattttccccatcagtgaattgggaatagaagtatcatttcatcttgtctcatactatgtcccataagcaaaagaggggctcaaaaacctgaaaggctaaaattccagacaaatagaaatacattccctgaaactcttactataagaatatgagcaatagattcaaaaaactaaaaggctaaaattctaggcaaataaaaatatatttcctgaaatctttactataggatatgagcaaaagattcaaataaaacaagcaagagtagctagaaaatatcacagattccactagtaaaatgcttgtggattttaataatcctattcagtttactgatgtgtgctcagattgatcacatgttccaaatcctataacccacacatagcaagaacactgagacaattgaatgagcttacataaactgccttgaaagtaagacttgccttgtgtacttctcaaatagtttcgttctgtacacccttactgccactaatggatttcaaaccttcaacattttcttttatatagcttatacaataaacttttcactgtcattgaactctatcttgttttgcttcccacaaattcatctaccacactgacatcaaaatcaaacttctacaccaggcagggtggctcacgcctgtaatcccagcactttggaaagccaaggcaggcagatcacctgaggtcaggagttcaagaccagcctggccaacatggtaaaacctggttgttaccaaaaaatacaaaagttagccagctgttgtagagcccgcctgtaatcccagctactcgggaggctgaggcagggaatcgcttgagaggcagagactgcagtaagcggagatcactccactacactccagcctgggtgacagagcaggactctgtcacacacacacacacacacacacacacacacacacacacacacacacacagagagagagagagagagagagagagagaga

SEQ ID NO: 316667 - DNA, 4001 bp, Homo sapiens
aattcggaaagaaaaagacatttggaatagtatttgaagatgcttccccagagtctgagccaagtttctgggatccagatgaaataagccctcaaggactgaagggctgtcctaataacagcatgtgtgcaatacgaccttgaggcacttaaaagtaacatttcaggaaaagtttttcctataaaaggtttcagaaaagggaaattctacactttgctctacttctccactgcctagaaaagtaaagtaagaaagatacctcacaaatctctccgcaagttgctgtacgaaattataaatttcaatccagttatttgccacactcccagacctgaaagatgaaattgaactgatcagagaaacaaaacacggaactgaaaagtaaacattttgaaatggttccttcttcaatgccacgaacataggggcacctggcctctttttcaagctaagtaagggtatctgtagctgaaactttggtggtacccagagttaaagaagtcagtcccagagcaagactccgtcaaaaaaaaaaagaagaagaagaagtcagcccgttttctggggtgggtaaatacctgcctaattgtttagagtggaacccagctcttcagagtaaacacaaaagcctttcttcgcaggaaatgcaaaccacattgggcatgttaaccctaggcttttcctggctccaatgaaagcgctatgattaggataaaaccaggcaaactttagcctgcgtacgagcagggtcgaggaggtgggtaaggactctgtggccgatggagcgtggcccgcaagaggccacactcccatttcccaagaggccaaaagactggcaaacagtgaataccccaactccccaaagagccaagtagcccggggctccaatcactacccccgacccggctgatctccgcccacacagatccgaacgcgcttgccctttgaaagaagacagcaacagggcacccctccgcgggtttccaacaccactccccggggtgcgcacacgcatctcagcctcagccccagctgatccagtgccgccctcaccaggagaccctggacctccctcgcacactcacttgtccaggacgaagtagagatcaaaggctcttctgcaggagggctgctcctgggcgcgcagcagccccccgggaccgctgagcaccaacagccacagcccggggaacagccagctcccggggctgcgggccggggaccgctccgccaccatcctgcggccgggggcctgagactccctcccgctcgcagtcccctaagctcaggagggtcgcaaaggtggcgggagtcacccggcacgcactctggggtggggggcggcgagcagctgagacgccggcgcctgcggcagcgggacccaccagctgacagggagggagagagggaggtcctgagaggacaaagggagtctccgccaccgccgcagctgccgccggaactcttgacgaatcccagtggaagcgcgatccagtcctccccctcccgattccggagagttcctgcagacaatgcgggcccacggcgacagctcgcgaaaggagttcctctccggcctggggccgagcctccagcgcccgcctcggacccggacctggaacccaccccgcctggagggctgaagtcccccccgctgccgtgcgcttcgggacaaggggtccctgggacgcggcgacggcagaacaaactaggagtggagactcttctcctccggcggccccaactccctccgcactccgaaactttcctcccggtgctggactctggcactgcgctgacaggccgtcccctttaggggaggaggctagctggccctgggactcccggctggagagaagccacgccgagggcaggagcccgctcgggccgggtctgggctgcgtgtgtcagtgtgcgcctggggacgagggcggggccccagctgaagcctccgagccacacatgcacacttgtgggttcctgccgagttgaagatgactaacgcttgccagatttgggaaagggaagaaggagtttagaaaaacaaaagttatctagaaactaaacatacccgtatgtcctgcaggcctggcctattttagcagctgtgctaaaacagcccccatgcgtggttcacaaacccaagactaaggattccatgggaggtgacggcctcctcactcctcactccaccccacccctactaccacaaacactctttatgaacttcctctttttcttctaaagaaacctgcttagttttttttttttttttctttaaaaaaagccaagccaaggaaaggccggagtggggagtgggaggggatagcaggcctctttgggagtggaaagttgtacctcaaaatatttcagcccactgtcatttccctgcaagctccagttttggagaatttcagctttgggcaagctaggtctcctttgcaaaacttgtgcaagcactcaagtttgtgcacaaatcctctgtctactagttctgctctccctcctctctcttccccccacctccgtgacttccgccctcccttagtcaaaactggcttttagaacctaaataccttttcatttttaacaaaatcaatgctttatgtagtacttacatatacatctcttctgtttgttgccatatgtatttaacttttcatttattatatttgatatacaaccagatatgtcagctctttgaagataaaaattagttactttaacaaagattcattgagtgcctattatttgctaggcactgttccagaagtggaggttagtgcacagaacaagataacaagcccttgctttcatgaagctgacagtctggctgaagagtgaaaacagacaataagaaataaatacataagcaaggaaaaaaaatgtccatattggaaaggtggcctgtagaaatttaaaatattgtgatgataaagaatgacagactcagtgactaacaaaaaagacccagtcattccaagagctctaaggggaaacatttggagttactgcaaaggtccatagacattagcttagcatattcaaaaaagaaaaaaaaaaaactgtgtagctggagctttgcaggtaagatgatgtaagacaaataggcaagggccagattatgtgatgctttgtttactgagataaggaattcagatatttaatattgagtgtgacaggaggttattagaggggtttaagcccaggagtggagtggcagatgaattgatatgatctgtgtttttcaaagatcattctggctgcaatgagacaatgaatttggagttagcaacagtgacaacagggagagcagttaggagactattgcagtagcaacatgttgacaaacaatcctgaggttcataaatttggaaaggagaacttcatttcttataaagggttacagctgcaggctggacatcttgacaggctgggaagtgtagcctctggcagagacaaaaagcaggcactttgagggaggaaagggtggaacaggaatttatgctaaatgagttggccaagtatacatattcaacaggttataggaggaactatgaatatttctgaagcaaggggtacatgaactatgcatatttctgaagcaggtgggttaagtttccacatcaaagtgaacatgggacatatgcaacatgcatgtttagtaagcaaacatgaatagtaagcaaacatgcaagttgcatatgtctcatgttcactttgaggtggagacttaacaattaaatgtattataattaggccctatatgtcaaaaggtgaaacagaagacatgaaggcactcagtgccacagcctctgtaaaccagccagaaccagtctatggtcagtggtctcttatcaggagagttattaaaatcagtctcttgtccagtcagagctgtagttatggcttgtggaacaggggtaggggtggaggattaattagttagtgtcttgcagtcagtaagatgcaattgtttcaatattgcttatctggaggcc

SEQ ID NO: 316668 - DNA, 4001 bp, Homo sapiens
taaaagtaacatttcaggaaaagtttttcctataaaaggtttcagaaaagggaaattctacactttgctctacttctccactgcctagaaaagtaaagtaagaaagatacctcacaaatctctccgcaagttgctgtacgaaattataaatttcaatccagttatttgccacactcccagacctgaaagatgaaattgaactgatcagagaaacaaaacacggaactgaaaagtaaacattttgaaatggttccttcttcaatgccacgaacataggggcacctggcctctttttcaagctaagtaagggtatctgtagctgaaactttggtggtacccagagttaaagaagtcagtcccagagcaagactccgtcaaaaaaaaaaagaagaagaagaagtcagcccgttttctggggtgggtaaatacctgcctaattgtttagagtggaacccagctcttcagagtaaacacaaaagcctttcttcgcaggaaatgcaaaccacattgggcatgttaaccctaggcttttcctggctccaatgaaagcgctatgattaggataaaaccaggcaaactttagcctgcgtacgagcagggtcgaggaggtgggtaaggactctgtggccgatggagcgtggcccgcaagaggccacactcccatttcccaagaggccaaaagactggcaaacagtgaataccccaactccccaaagagccaagtagcccggggctccaatcactacccccgacccggctgatctccgcccacacagatccgaacgcgcttgccctttgaaagaagacagcaacagggcacccctccgcgggtttccaacaccactccccggggtgcgcacacgcatctcagcctcagccccagctgatccagtgccgccctcaccaggagaccctggacctccctcgcacactcacttgtccaggacgaagtagagatcaaaggctcttctgcaggagggctgctcctgggcgcgcagcagccccccgggaccgctgagcaccaacagccacagcccggggaacagccagctcccggggctgcgggccggggaccgctccgccaccatcctgcggccgggggcctgagactccctcccgctcgcagtcccctaagctcaggagggtcgcaaaggtggcgggagtcacccggcacgcactctggggtggggggcggcgagcagctgagacgccggcgcctgcggcagcgggacccaccagctgacagggagggagagagggaggtcctgagaggacaaagggagtctccgccaccgccgcagctgccgccggaactcttgacgaatcccagtggaagcgcgatccagtcctccccctcccgattccggagagttcctgcagacaatgcgggcccacggcgacagctcgcgaaaggagttcctctccggcctggggccgagcctccagcgcccgcctcggacccggacctggaacccaccccgcctggagggctgaagtcccccccgctgccgtgcgcttcgggacaaggggtccctgggacgcggcgacggcagaacaaactaggagtggagactcttctcctccggcggccccaactccctccgcactccgaaactttcctcccggtgctggactctggcactgcgctgacaggccgtcccctttaggggaggaggctagctggccctgggactcccggctggagagaagccacgccgagggcaggagcccgctcgggccgggtctgggctgcgtgtgtcagtgtgcgcctggggacgagggcggggccccagctgaagcctccgagccacacatgcacacttgtgggttcctgccgagttgaagatgactaacgcttgccagatttgggaaagggaagaaggagtttagaaaaacaaaagttatctagaaactaaacatacccgtatgtcctgcaggcctggcctattttagcagctgtgctaaaacagcccccatgcgtggttcacaaacccaagactaaggattccatgggaggtgacggcctcctcactcctcactccaccccacccctactaccacaaacactctttatgaacttcctctttttcttctaaagaaacctgcttagttttttttttttttttctttaaaaaaagccaagccaaggaaaggccggagtggggagtgggaggggatagcaggcctctttgggagtggaaagttgtacctcaaaatatttcagcccactgtcatttccctgcaagctccagttttggagaatttcagctttgggcaagctaggtctcctttgcaaaacttgtgcaagcactcaagtttgtgcacaaatcctctgtctactagttctgctctccctcctctctcttccccccacctccgtgacttccgccctcccttagtcaaaactggcttttagaacctaaataccttttcatttttaacaaaatcaatgctttatgtagtacttacatatacatctcttctgtttgttgccatatgtatttaacttttcatttattatatttgatatacaaccagatatgtcagctctttgaagataaaaattagttactttaacaaagattcattgagtgcctattatttgctaggcactgttccagaagtggaggttagtgcacagaacaagataacaagcccttgctttcatgaagctgacagtctggctgaagagtgaaaacagacaataagaaataaatacataagcaaggaaaaaaaatgtccatattggaaaggtggcctgtagaaatttaaaatattgtgatgataaagaatgacagactcagtgactaacaaaaaagacccagtcattccaagagctctaaggggaaacatttggagttactgcaaaggtccatagacattagcttagcatattcaaaaaagaaaaaaaaaaaactgtgtagctggagctttgcaggtaagatgatgtaagacaaataggcaagggccagattatgtgatgctttgtttactgagataaggaattcagatatttaatattgagtgtgacaggaggttattagaggggtttaagcccaggagtggagtggcagatgaattgatatgatctgtgtttttcaaagatcattctggctgcaatgagacaatgaatttggagttagcaacagtgacaacagggagagcagttaggagactattgcagtagcaacatgttgacaaacaatcctgaggttcataaatttggaaaggagaacttcatttcttataaagggttacagctgcaggctggacatcttgacaggctgggaagtgtagcctctggcagagacaaaaagcaggcactttgagggaggaaagggtggaacaggaatttatgctaaatgagttggccaagtatacatattcaacaggttataggaggaactatgaatatttctgaagcaaggggtacatgaactatgcatatttctgaagcaggtgggttaagtttccacatcaaagtgaacatgggacatatgcaacatgcatgtttagtaagcaaacatgaatagtaagcaaacatgcaagttgcatatgtctcatgttcactttgaggtggagacttaacaattaaatgtattataattaggccctatatgtcaaaaggtgaaacagaagacatgaaggcactcagtgccacagcctctgtaaaccagccagaaccagtctatggtcagtggtctcttatcaggagagttattaaaatcagtctcttgtccagtcagagctgtagttatggcttgtggaacaggggtaggggtggaggattaattagttagtgtcttgcagtcagtaagatgcaattgtttcaatattgcttatctggaggccagtgtttgtttagatgctagagaaaaagaaaacccttttggcagttagaatatagtttattttttaagtgtaggagtgtgtgacttgacctttgcctggcatggtcttaggtcttgtttataatttggtgtcttatgaacacagagtac

SEQ ID NO: 316669 - DNA, 4001 bp, Homo sapiens
agaagagccagtctcttgcttgagaacatccgattaaagagataagcttggcctcaaatattggcctttttagcactaaattctgaccactggggtcatataccttaagatagaaaattactttaaactatactgatattgattatgtaaaaccattttaccatccaggcttgctgagattatacataaaacataacattcatctctaaaatagctaatcaaaagtacttaaaatggattcttaggtatgctcaaatccaaatctttaatcttcagttttctttatttgcttcagaagcatagcaaataattgcatttaaaaaaaatcttgttagcctggtaatgtttaataatcccagaaatataatttaaatattctataaaatatgtttcttttgaaaaatgggcatataaatagtaacattagaccacacaatgcatagaatataatagtaattactcccaaataactatactcaaatgaacagagagagaaaacaataggcatttgcaaatttaatcatttaccatgctggcctaattacttgatacctttttttctctgtagtgaaatataaccaccttacaattaataaaacaataatggtaactttcaactgcaaaatgagatcttgaaatcttaagatgaaattaagattgttaaactaacagtgatggaaaatagctgccttttaagtcctaattcagtatttatcttaagaaacacaatatataagtaaaattttcctgcattgattactttgtatgagtaaacaatgttttgtgtgccaaagtttaacaaaataattatgttataatttttttgcataaaagttcccagaaagttgttttttgttttttgagatggagtctcgctctgtcgcccaggctggagtgcagtggcgcgatctcggctcactgcaagctccgcctcccgggttcacgccattctcttgcctcagtctcctgaaagtttttttatagtatagatttgtaaagaatcatcattaacacacatatacttgtatataatttctaagaccacaaggcataaattcacatttgtatataattttcaagaccatgtgaaatggagaccttttcatataaagcatattcagacaacttaatgttcatgttggctttttaaaaagtgaatgactattagagcagttggactaaaatgattcagacaaggccaaaaaaaagactaaatcttgttatacattgcttctattcaacagaaaattattcaaaaataagctatcttttacagaaagcatggatttaaaataaaattaatagtcaaaattattttaattttttatagatagaagtaaatatcgagataaaaaatcttatgataacttcagttagaattctgaatcaaattacatatgaaagtaacttgcctctgtgggataatacgttgtttcaaaattagcatggatttaagatttcataatattaactctgtttaatagttatattgaagacccactaattaaatggattcttaggtatgctcaaatccaaatctttaatcttcagttttctttatttgcttcagaagcatagcaaataattgcattaaaaaaatcttgttatcatagtaatgtttaataatcccagaaataaaatttaaatattctataaatgtttctttcaaaaaatgggcataaaatagtaagaaagtagtaagaataaaaacaaattagaacaacattttctgttaaaaacgtcaaaaaacacaaatgaaattttataaatcaagtttcaaaagagtgaaaagctttacagaaataagcattatactcacatagtctccacaaaacattttgatggtaattgttaacctcagggatgaaaatatttgatcgattgcataaacttgtttcactgtgaagccagaaagaattaaggttcactgttaaatcaaatgtaaatatgttcactgttcacctcagactcaggcaagaaaatgtaaaagcaaatctggatacagcatgacttgagatactgtatttatacttagttatcagtcataggtgagtaggcagaattattgcacaaaataagtagaaccattaacctaatccccagttgtatgttgatttaagacacataaagtagccaactaatgaaagaaatgtaatcttttgaaaaagctgatgacttatggaaagctaagttgattacccataaagttaatcatttattttctgcttaattgttgttaacatggaaactctttcaggtgctccagccctagtttcctatcttaaattgctaggttctatgtgtatccatacaattttaaaagaatatttcaactactgtttatctgctcttatattaaaaaataatgtatttaggggctgggcctggtggctcatgcctctaatcccagcactttgggaggctaaggcaggcagatcacttgaggtcaggaattcgagaccaggctgcccaacatggcgaaaccccgtctctactaaaaatacacaaattaaaaaaaaattattttaaatatatttagaaaagaattcattatccaccaataaaagtctttggagaaatatattcaccatcatttttgcacttaattttcctatatttatatatatgtaattttaatattaactattgcattttaaggaaataaattttagaaaaacctgtaaagttcaatatagtgttggaaactatctagatacattcatatatgattccaaaaataacaaaatgaatctgtattatattattttactgctacttgctatttattgaacaatatagtgttcatttataaaaattttaaaatactttgaataagaattaggagcaaataatcctttattgaaagaaccaaatactaacaagacaagtgtcaactgatcagcatccataggtctagaactacccaaaataattctgatgttaaaatatgagtaaaagccatgaagcagtatgtatttatgtaatacacacacacacacacacacaaacacaaatatatatatatataatgagcaactatatatatatattcttcagcattcaatttataatattatctgattaccttaccagtatacctggtactatgagagatatatggaaccatgctgcttggctcaaaaacattaaaatctagtaggtcctactatgtatgtgtatgtgtctgtgtatgaatcagggtcttgtgtttttgctatgtagacagcatatagcaattataaaattgtataatttatattgtataattgctataattgtataatttatattgtataattgctatatgtagacagcatatagcaattataaaataatagatatacttattaaaactataggattcagaattagaaacaaaagaagaattttcaactaaaattgttttttaattagaaacaatagaagagttttcaactacaatgattttttatgattattttagtaagttgcaggtcttatggcttttattagagactaaatatgtgaatatgaacaaaatttgtcaaaatatttgagaccaaaatcctttccctaagattattagataattcagagaaaagagatttgataatattccctaattttctcccagataataggtacttaatgtataattttattcatcattattttgtgatttagcttttaaaaaacatgtccttaagggaaattatgatatctggtatttggcttataatattccatagaaaagagggtcatgagacaccttttgataccagtgtggcaaaatcttgaaaactattgggaaagatggtagttaattatttaatataattctattttatgtttatgaaaatttccctgatgaaaattttaaaatgtttggttgtaacttatttactcatacttaaatatcatttgattatctacaacctgtacagtaataaatgttatcaataataaggattttcctctattctaaacattgtttcaagtcaatatacttgtataaattaatt

SEQ ID NO: 316670 - DNA, 4001 bp, Homo sapiens
gggttacagccagataaactattctgaagtctaaaaatcagaagtcaaaccatctgtacagtgaaaacaaggcattattggttctcattttgcctcttaaagctaaacacaatttctttgggcctcaatttcctcatctgtaaaaagtgaagaagggggtgttgccagcattgaacgaggtcagtttcacagggctggagattcttcttatctgtgtgcactggtgcacggtagatatttaaaaaaaaaacttattgattaaatgaatgatttaatacaagccgcacaatcatccagtgagttaggtattacatcttcgttttgcatatgaagaagctggagcccagagaggtatggtaatgtcccacagtcacacagctagtgagtggacccctactgcatctaggcagctagactctaaaggtatgaacctaacccccatgcttctgccttaatctgctgcctggcccacacctgaccaaatctgacacttaatatgcattgatccagcagaactggaaaattattaagaattattactaatctatcatttaacttttaagatgtaaagaattactccacagcgaaggccaaatgacttaaacagaatttcaatatatcctttcctgaaagggattacatcatttccttttacttcctcctctacggttatttctaaacaggtttctctacacaaccacagagttctgggaacaagattctggttttctttacatttaaaaattccctttctggtcagtctgaagttttccgtcttcgtgaaaaccaaaggtggtatcttcatggagtaacgttttaattagttacattttaaaaaatgatgttggtgaacatagtaaatgtatctttcccggagggcagggtcttgctgtcagtgctgaacacaaatccttggaaagaattcggcctgggctatgcaatttcgtatcagtagccagaggggcctccagcgacccagaacctcccagcacctgcatactttcctatatatggtcatctgcaatcaagtatccaaatcttccacctggtgactcaaataccaagggaatgattcatatctagtcaataggattctgttgcaaagaaaacggttagtcttttcaggaaaaagcaaacttcttgaacttccaaccctcaatatgcaaatccactgttttctaccttctaaaaaaaataagtaaaataaaataaattgcctatgtgagggggagaagatgctcacaggatgggtgcgattccaagtccacagagcagacctctgagccagccccgtctgccatgccggggacccgaggaaccttccgactcccagcttttttctgtcccctagacctttaggactggggaggccgagatggctaagtggatcccttacgctgctagctgtaataagcgaagctttcagggagcgaggacagctgagtatcagcttgggccccaccaagacctgggtgacccacccatggcacggcactttcccccccgtgggcccagtctcctcgactctgaaatgcaggactgaggtccctccagctccccacccacgcagctgggttggggccgggcgcgggcgccagccgccagccctgcccagggtcgagctgcactcgcgggggaactgggcgaggcgccgcgacctccccaagccacccgtcagcaggcggctgtgggcgaggctcgcggggacgcgccgggaggctgaacttacccaaagcgcggtgggggaaactggtgtgcgagtaaactgcgaacaaactgcgagcgaaggtgtcagccgcgggcgcaggtgctccgcgctggctccgggtccggatcgcgaccgcaccccttcctcctgcccctcctccggcctctcgactccacctgattgcggccccaggccccgggaaagggaagccgcgccctgctgccgccgggctctatccctgtacacaggcgccccagctctgctccctcaccggtctctaagcttccccacccttttctccctacgccctcatttcgctctcggtttccactacacctttactttctcaaatgtactgcaatgcttattttgttctaggcagtgtggattcggagattagactgtccctatacctaaggaactcactgcgtggcataggtggcggacacctaacattaataacattgatctggcatttactttgtaccaggcactgttctaacttctttaagaatatgcgcggatttattaggttggtgcaaaagtaattgcggtttttgccattaaaatggctccgacaacaactctatgaggtagatactattatccccattttatagatgaggaaattgagatacagagacgttgggtaacttcagccaatttacacagaaggtaaatgccagagctagtgtttggaacccaactatttcagtaattcctctactaaacgtgttgaccctctggtatgaggattccaaccaaaggctcagggagacggtaacctggaagggcattctaggcatttggaagagcaaaacaaatcatcgaggctaaaaggttaaagccctactcgtatgagggaattatgagcagttgtgtgctgaaggatgtagaaaaagttaccatgtattgagtatcaggcattgaagtgcttgaataccttacctcttttatcttcaagggaactctaggaggtgctatttttatcacaatttgcagaagagaaaactgaggcttagaaaagtgaagtgatttatccgagaccacgtaagtaaaaagtattgcttgcactcagtcatcactgggccccttatgtattcacccgaaggatttgaaaacttacctccacaaacacctgcacatggatgtttatagtagctttactcctaagtatcaaaagtcggaagcaaccaagatgtaattcgtaggtgaatggataaataaactgtgatacatctatacaatagaattttattcagcactgaaaagaaattagctatcaagctataaaaacacatggaagaaacttaaatgcatattattaagagaaagaagcccatttgaaaatgctacacactatgattccaactatatgacattccagaaaaggcaacactacggagacagtaaaaaaaatcactggtttctaggagttgagaggaggtagggtgaacaggtggagcacagaggatttttagaggataagcatggctggagctgcttgagtgtgagttgaagagattacagtcttggtccttaaggctgagtcctgggacctagaaactcattagaaatgcaaattccctgaaaccctgcgccatcaagtgattctgatgcatcctaaagtttgagaaccactggtttaagaggagctacaacggagaaggcagaagtggtcatgcttaaaaggccagtgccctgggagccctctcagatctacaaatccgaagtgatgggctttctgcaagagagaagataggatggtgttctgcattctgttctgcatagtaattcctgactcccattcagacttcaccacaataaactgttaaatcccatgttacctcaaaaaattctgagattagcatgaaatgggggaaaatatttattattatttgtgccagacactgggtaatgcacttgacgtacgtgatctatgtcatgcttaccaactagctgtaaattaggtatgattgcctctattttgcagatacagacacaggctcagagggactcagtaagttctacgagttgtattccaggcaactaggaagtcatagggctagatttatagccagaagaaaatgagtaacaggtgatgttttacatgtaggctttattttaattgtttaaaccattcaggatttaacttctttgatttcctgatggtaactttaacaaatgcacttttatcattttttgagtttttctagttgtatcaacagcccaattaccaccatttatattagaaacatgctatggcatattataaaactattttttccccaaa

SEQ ID NO: 316671 - DNA, 4001 bp, Homo sapiens
ggtaaacagtctacataatgaaaaggaattgatggaccctcagacatcactggggaacttacaagagattcaagaaactgctaaatgagcaaagatagagggaattattattcgatgcttgttaaatcttcatgtacatcaccacaccagcatatcaagataggaaaaatattactcaggaaagttaattccacataaaagtatcctttctatggagaagaacttaaaccaaactttccacttgaagtaatatgagaattggtttactgtaacatttaagtgcaaaagaggaggtaagaatgggatcactgtgtaagtttcataaagtaatcaactaatcttaatcctcccattttcacttggaaaggaccaagaaacctttttcaattttgataagtcaatctgataaaaagtgaactataaataagagacagcattgttttagcagttaaaacacttgtttaaaaaaaactatctggactctgacaagccggttagattgacaagatctgtgaaatcagttttagagtttttaagccctggtatcttattcacaaaagactgtataacatggtcaatatttaaagaccttaaactatcttctctttcctacatttttgataaacattaataacagtaaagaaaccaggcgcagtgggattacagtcctgaggccgaggcgggaggatcacttgaggcaaggagtttgagaccagcctggccaacatggtgaaaccccgcctctactaaaaatacaaaattagctgggcatggtggggcgcctgtaatcccagctacttggaaagctgagacacgagaattgcttgaacccgggaggcagaggttgtagtgagcgagatcactacgtcactggactccagcctgggcgacagagtgagactccgtctcaaaaaaaaaggaaaaaaaaaaaacagtaaagaaagcctgtagtagattatcaatttctgaaacagtcccaaggcaaattcaattgagaactcgttccacgagttcattgcttaagaaaaacagcgcttgtgtttaatcttttggattaaaaaaaaaatcagagcctacgtcctacagttttagtaaaactgggctgagcaactggaaaaagccaatgctcaatcacagtattaaaatacagaaaactttgcggaaaaaaaataaaggaagtcggggggcggggtggggggggaatgcgttcgcctcacatgaccacgatgagctgttcttgctccggttctaatttgagctactctctggattttggggaaggcccacttttacacattcactcatgaaaagggagcgcacacaaatccggccacgtcaccagctgttgcgcgcgaaggcagcttggcggcgtcggtgctggttccggagggcgctcagcgggaagaaccgggacacagaaacgggggcagggaagcaaagggggaacaagaaaagtggaagcgatgtccccaaagcaggttccctttcctcctaaactttttggctctcagacaaatcctaaaagtccctcgtcgcagcatacaaagttgtgggtaaatccagcgcagtggggggcgcacggccttacctgtgccatggcgactactcaggtcaggggaaggtgaagcaggactgcaaaagagaagaaacctcgggcttagcgcgccatttgcaactcgtgccctccccaagcgcaggtccgcggggacccggcggcgctcagacagcccggagggccccgccacggggccgacccgccctctcgcagctaccgggacagctctcggccgagcgtccgcgcgaatccagtgccccgcgaccacgctctcctctccagaaggagccccctccccgggctgcgaccactcacccagactgtgggacccaagtgccccgaaaccccgggagagcggcggagagccgggcgacggtacgcggggcgacgccgagatgcagacgctgaaggatccggcagctgcacctagactgatccaagcaacggaaacgccagcggccccaccccggccctgcccggcttggcccgtcccacccccgccagggccccaaccgcaggccggccgcgccagccgggcccgcccctgccccggcctcagcgcgcctgcgtgggtcgcggctcgtcccagttggtctcccgcggcgcggactgtcccgctggtctcgcgggcctgggtggggagcggccgcagagctgctggaaccaggaggaggcgccgctcccccgagggccccggagacctcttgtcctcgcgccgcgggaagggcctggggagctgtccagggctcggggttttggaggtgcttgagcctccctgccctctgtgaccgcaggaaccgtagcctcacttgggtgctcaacatagtgcgtgggcgtctttttggaggcgagacaaaatcatcgcagctaaggacagcgcgcctttgtcgatgggatagaaaaaacgtgaaaggagggccgtttcccaagttgtttttgtttctgttttgttttgttgttttgttgttgttttaatgcctattattgcttcctagatggccctctcttaaatgtacagccttctagtagcgtatgtgggctatttgaaaacctctgcttccaatcagtttctgttttcaaaactagcctagaactttaatatgacttaaatttgagcaatgcctcatattggttcaacataaaatatatgagtatatgagagagagggggagggagggagaatctacagcgtattgtactagcatggtgctgtgttctgtgaaagggctttatatgcaaagcagcccccaaacgcgaaggagtcaagaaaccaaagaacgagacagacaaatccagtctgtaggtaataggggtgctattggaggatgtggtagacagaagcgtggccttgggcggcggcaagcagataaatttctgcactgttactccccagaccctggccttatataccgtaaggaaagagtatactgctctgtgcaagacaattaaaggcagccctccggaacaggtgagaatgccgtatgcttcatagcctacaatgtgggcaatagcatcaaggttgacatgttcttatgctaaggacagtttaaaaaaaaaatcctaggaatcaggaggtattcatgggactggggttattaaaggtcaacatggcggattagcatccgggatataatcacttttgtctccatatgctggaaaaggaaaagtagaagacacagggaccttctcagacttactggtgtggggagggaaggtgccagggcagagggggcaagaggacaagtttgcgacactagatgcagtgttctagacatatgctagaatgggaagggcaaagtgcttctcaacgtggaggttaagggtaagagatgaggatctagtcttctttgagaatgaggaagaataaattaaatggacagcaaatgtggttctttgtatagaacttctcattcgctttcacgtgtgaaccacatgcctattccagccctgacaaagtcacaacagagtggttgttctctgggaaaggaggcaaaattgcaaaatttgtggagcttgccaaccccatcacccccaccccactggcgggttgcctttcctctgggagcctcctctccaccagcccagctgtctactcagcctcaggctctccccaagtcagcacctcccccgggttttctttacaggtattaatatatctgaaggcagcccttttctgagcatctgtctccgttgctccagcttttctactttctctctgccctgcaccaaaagcaggacctgtagtcttgcctagagcattcttttttctcacccatatccacttgaactcagtttgcttctctcactttctactctcacattaatggagttaaacaggacctcagagatcctgtatttaacaatcattgattttacagggacatgagactcatcatgggttagtgacttgctctatgtcctgcagctaaatactgacaaaatcgat

SEQ ID NO: 316672 - DNA, 4001 bp, Homo sapiens
cctacaattttaatgccgtactctacggagaccccatgaaaaaaacaaaactaaagtccacagacacatcatgtagtccaaagtcaaatataaagttttttgcttatccatttagaatgtaagtactgctccctcaccaaccaactttcttggagttagaatttaacgccctgtaacacaactacaaataatagtaaaagccaaagattgtgtggcatctagttattgggcaagcctacttaagcagcttgaccttgtaagtttcattcacacacaaaaattataaatacttaaaccagatgatcctggatgacaagataaaacaactgtcatgtcccactcaagagtaataactcataaattagggaaatcgaaatattacactaggcacaaactgcaaatccttgcccttccattctagggatacttagtgtaaaaccttagctattttgtatcagagaggtgacacaatgcctaattaatgaatgagaatcctatattttataagatctccattaccaaagattcaaattatgatcatttactgcaatttatttatgttgaacatcttattacccaataatgttagttaaatggaacagattatgaaaaattagcaatctgtttcagaaagtgcaaaacagtcttagtccttacacaaactggcttggttcagattttcaattctaggtttgaattccggagggacatttaataacaacaaagccaaccccaaaggaatttgctctaattttttcaatatatatgaaataaaaaaacacaaaaacggaattatgaaattactattctgtggatggtgcatatacaaaacctaagcaatatcccaggtttactcaagagaagtgaagttcagaaggactgcaatttacctaatgttacaggacgtttgagtagcaatcagggcaaggaattcctctcgaaatttcaaaaacttaatacgaaaaaattacacattgtccctgtagttatgagcaccaagaatctgaatgcccattgggaactctgcaattcagcaagtctttgtagctaccagagttcatcagtatctggaaccttattttactccagcatccaaatgacttctacttaaaatcaatctgaggcattaactccggagccagatcccacctgctctgccagggctaaagagagggtcagatacagggatactagctttggcgttaaacctaagctcagcgcagggtgtgtccaggttgccgtggagccggtcctacagcccattagcgcgaagctaccccttgtttcctggagatgatgtctcccgtgactccttccccgcgtgacagggcgccctggcaggagggacaccccgccccctcttctacctctttccgaggaggccccaagaccggaccccagactgggcctccaagacgaccaccagtctgacgtctgctaagcagtgagtgtagcagggctctcgaccgccacctccagccgccgggggacggtgaaagggattccccgccgggggccgaagaggaggagccacgggggccgggcccctcccccagcgggcttaccctccgccgccgcctactcgctgcagccgccccgcttccttgcgaagcagtccgaagcactgcgtccagcagcagttccccatcgcatgccgcccaggcgccgccgctcctcctcctcctcccgctcaatgcccaaacccaggcccggcagctgcatccgcacggcacgagccgaaatggggttcaaggaccgagggcgggccggccagagcccggcggcgtgagggcacggggcgacgaaagacgaggcgctagggaacaaaggcagtgtttactccagcggccgcagagccaccgctgcgcgagggaggagcaccgggctcaaggctctggactccctcgccgtccgcatggcccttctcgcctcagctcctagcccagcgtgagtgaccgcctccagctgccgaaggaggccagtccccgcgagccgagcaccctggccccgcccccagcgcgcccaggcccctgctcgccgccaacgctgccacacccccggcctctcccgcgccccaattgggcgcgctacctcggtgccccgccttctctggcgaccggcctgtgcgtcacttccgctcgctcctggttcagccgcctctgcctgcgagacggttcaattcctgcgtgcggacgtttgttttgttggaccttgacctgactaggaaatttccctctctcattgcagtttcgggcatcctcgtccggagcacgctgggcgtggcatggctaaggctcagccttcgaactttgtatcaaaggcgtgtgaggagccagagtcccaggccggaagtcataagtgcgaaggggcgtttctctgcacggtgtgcttagtttttgttaatactgcaccataagcggaaaatagactcgggaactgattgaggttactttgaacgcaccaagatttttttccggtctctggtttgtgtcttaatttccatactgttaatgttttagggaaacgtaataatggtgcattattgtcctcgttttgtttgaaaatcagatcttcacataattttgggttgggtagttggggttcagaggaaattggcaagagggctggggtttttcggggacgtcagcgttgccattccaagcatgctgcccagaactgctgtagatgggaagagaaagctgctctaatgtgtccgcagccctctcaagtgctaccatataattcgcgtcttgtttggcctcaagacagttggcctcacaatagatataagatgtggtttagtagacacctcgtccagtggataggaggatgctctcatggactggacacatcaagtttttagcctgtttaattaaacctagaaaaattgttacattttagaaagtttttattgatgataaaatgttctctgaactcattttcttgcttctttaaatacgtatctggtttcaatcttagcactgctacttactaatgtttattttatttgggttttagttgttttgtaatcagaagcataggataacatttgtcccaatggtttgctttcagtgaatgttgggatgaccgaatgacttcctagtgaaagcattttcttttctccttccaacccctgaaattagacaaatgtattaatgaaataatcattaaaattcaactataaatgtttacagaaactggtacatctatcctatggaatatttagtaacaaataggaacacagtattgatgaacacaccctgaaatgaatctgtaggaaattatggttaaagaaaaagccaatctcaaatgcttatatactgtgtaattccattatgtaacatctcagaattgataaatttatgtaagtggacaacagaataattgattgccatgggtcagggaatggaaatcctgcatcttgtctatattaatgtcagtattctggttgtgatattgcaatagttttgtaacatgtcaccactgggggaaactagattaaagatatacacggtcatctgtatattatttcttaaaactgcatgtgacacaattgtctcaatataaaaagtttgattaaaaaaatgcagctatagacttgacagcacttcctatagacattctataaaccgttattaaaactgaatctcacttaaaaataatttttttatagtaaatctgttctctcagttaaggatatgaatgatcctcagaagcaatacaaatgaataagacatttaaaaacttcactaagcaaaataatgcaaattaaaatgcatgttttagtcatttgtattgattcacttgtcaagttaacaaagctttacagttagaaatattcagtatttgcaaggatacaatgaaatggtactattctaaactgctgcagataatgaaactcattctgagaaattatttggaaataccaagagccagaaacaaactaaatgctcaaaaattgaaggatgattaaatttgctggtgtattcttgttatataga

SEQ ID NO: 316673 - DNA, 4001 bp, Homo sapiens
tctctcaaaggctctcagcaaatatctagagacgtggttacatccagtttacgaagactgtcggtgacttcggggtcatacagtacatggacaacgaaagaacagcaattgaaatcttgtacttgtaccccaccaccttccgccctatgatcaacccactgtactctactgccacctgtgttctctcggcatttccccagcctggaggtttccccattctcgccacaaataccatccttcacgaacgatgccatttctaggatgttgcaagttatgataaacaactgttgaacaaatattgcttacaagctacaagttgaaaacgagaaggttgctacctaagttcatgaagaaatcccctttcaaggattccatctgttcctaaaaggccagccacacaaattctaatactctgcattattatggccatttggggacaagattttaaatctgaaaccatgacaagaaaaaaaaaaaaagcaagatttaagagagtaaactccagaaacaacagatcaaactgccattgtgtttgttttttttaaatcagtgaaatattaaaacaaatgataaacccatgccaacctcacaaagtttcctcattccttggaattcaaacaccaccgatggcatcattttatgataatcctttgggtatttcacgtaagtaattagacacaatgtaaagccagtgactgagggacttaaacaaactgtcccctccgagagcccagttggagcttccgacactgaccttattctcctctcaattttaaccctcctcaaccactcaatccatccaaaaacgtctgtgacagtcgtggctctaaaaccgcgcagaacttgactacagaacggtcggtgacaactccacatatgatttatccaaattaatttatttttttgaattctagtcccatgctccctcggctgtttgccccgaacccgtagtctacaccacttcaccgacgtgaagaccacctttcattgtttctatgggtctcagcatccttccctccgtccagctctgttctcgccgcacaaatgtcatttctagcgtaccaccctccattccgcccggtgggcagcgcaggggctttcgggtcccagtggccagtttcctggagtcggtcccctatgcacagccattttctagttaaacgctctctctgccaccgagggggaaaaggaacttttcccccctttcatgtctcatgggctggcctctgaacccctcgtggagaagccaaccccggctccaactccccggcaggagcgcgctgccgcccaggagagacagccgagcggcacagcggaggccggtgccaggacaagggggtgtgcgctcttcccgcaggcgcccaccctcacttttcccctctgcagtccccacccgggcgcaccgcctccaacccggtctcccccgccccaggccctgccaagccggggctgctgagggaaagagggcgccgggaagcgggagggatggaagtcaaggagagtgagcccgcagtcgccgtgccactggccctgcggcgcgggcgcagggcgcacgggactccgcagcaggcgccccgctgcagatgccgcggcagctgctgcaggtgtggctgcggctgagcgggcagcagtggccgcggagccccggggccgggagcagaggagaagccgccgggggaacccgcagccgctcgccgcacgctgctgccgctacccgggtgtttccccagcactctcgtgctgccccggaatccggggcaaaggcaaggaagaaagctgggctcaccagtggtgcgcgcggcgctcgcctcggctccggcgcccagcggctctgctccagtctcgcccttcccggagcgcccagatcagatgcggttacagcgcactagcttcctacttgagaccagaacgggctccggcaactgagcatgctcagtgccgttccgcgagtcccgcgcagggagcggcgctgacgagattccacttctccaggctttggcagcggctgcgcgagggaaggctggagggacccggcggggagggggccgaatgggagaaaggcggggccggggggtgggggccgggcagaaggaggcgggccgcgctcccagggcgacccctgcaggtggaggcggcagggcctgcgggaggcaccctccccaatcgcctgggaacacgcagggaggcaatgggtcccccagtaagacccaaaggcaggacgtgcagtgcagcccgggtatcccctccgtgtggctggtgtctgtctgcaccaaaaggcagttgggttaccttagccctggcttttctcccacacgccagcattcccttgcaataggaaaatgtccccacaggagagctgcccacacccacccaggctaactgcaagttgtaggcgacaccttctccttccttctacctcctatccccacccccaggcatatgccgcacacacactcttctttgatccggaaatcacaagataatatcaggggagagatacaactgccggagaggaaaaggaggttttcctttccattgccaataatattatctataactctaattgtaagcgtgcaaacaaagccctgataagagtcgagtctcagtaaacggtaaaccgtgctctgccccagacgctgtgaatgacatccccaaagtatccttaggattgctcttcaccagggcagcggttgtcaaactggagcctggatcagaatcgcctggagggtttgctgaagtacaaatccctgagtcccaatctgtgtctctgaatgggtagatatgtggtggggcccaagcatctgtatatctaacaagttcccatgggatgctgatgctgctggtgtgaggactatacactttagagaaccctacccatacacacacacacacacagtcctaccaaggatctcgaattaaaaactcacgtgattcttcctatgaggactctatgcagtggggtgggcattactttattctttcctacatgagtttattaaggatccacgaggtcttgtactaggcctgaggatagtggtgaatttaaaagcccaggcccctgctttcatggaatttatagtccggccgggtgacagacacctatcaaataatcactcaaaacggttatttcaaacaggtagagtgctgggagggaaatgcacaaggtgcgaatagagtgtatagagggaccctcatgcagactcagtgaggttgttacgaagggatgggaggggggctgccttgtggaaggtggtttctgacttttgcactccaataacctctccaattaacaattatctccctcagaccgagctggaggccagcaatcatgtccctccttcctacaacataaaaacaatactgtcacagagaaatccctataaattcatgaaaagtgtttactcttgggactgagtctctgcaccccaagatccacctaacacgtccgtggaccaaggacagtcgagggccacagtagacctcttggggaaaatacaggctctctgaactggagagcctgtggttcttagtctgtgatcttcaaggccaaagaggcaaggaaaccagcccaagaccaccattcccgtcaggagcggagatcgaccagcctccaaccttgcagacgggtcctctttccaaggcactctattcccggacctcacagctcccctcagatccccggaacccggcctggccaccccgctctctctcgggggtccggggtaggtgagcggagcctgcccctcccaggtcggtctcttcccgacggagaggaaaacccgcggtggagtccgcggcggcgggggggggggggggggggggggcggggcggcgcgcgcaggcgcagaggccgccaggttgggccgaggaggcgccctgctccacacctgatgcaatcagccttccggaaacgggtcccgctgccgcgctcacccaggaaacacttccgcgccctcctctggccgctgagctcccggggacgggttcccaaactcccccgg

SEQ ID NO: 316674 - DNA, 4001 bp, Homo sapiens
cagtatcttcttgtctcaccttggtgtcatccacactgcttcccagggatgctccagtgcagagaacctgcaatgggccccacgccagcatagtgtgagctccaagaaaggaagaagacacctgttgtatttattatgccacttaatcaccagcaccaatgcccagcacatggcaagtgtccaataaatacttattaaataaattatccccattgcagaaaagctagaactaaacaacgtggcggctgttagaaaagtgtgtttctcacatctgcaaagtgagaatgataaaatgaggccaggcatggtggctcatgcctgtaatcccagcactttgggagaaccgaggcaggtggatcacccaaggtcagcagttcgagaccagcctggccaacatggtgaaatcccgtctctactcaaaaaaacagaaattagccgggtgtggtggtgtgcacttatagtcccagctactcaggaggctgaggcaggagaatcacttgaacctgggaggcagaggttgcagtgagccgagattgtgccactgcactacaggctgggtgacagagagggactctgtctcaaaaaaaaaaacaaaaaaaaggaagcaaaacggaaagtagggttcttactgagctacaaaccatgacaccttctttgataatactggctgatgctttatggaaagtctttcccctcttaagcatttcattcacactcccttttacttataacttttacaaaattacagaccacatttacaaacacattctgcttctaacttcttaggaaaggcctcaggacacttaataattcctttctgaactcaactaactaaaaggcagcagcaaggatctgaactttagagagaatcttacaaactactcttgtgtaagagctcggctggaggaagggccaactgctcaatggcctaagaaaacctaaaagagaacagcatgaggaaagcaggcagaacccccattcatgatacaagtcaaagccaggctgcagctgcagttataaaaagaaagaaaaagactaatgggattgccccctccttccgccttctcccacccaaggcagtaatgaagattcacagctacacattaattaggaatccatagacgtgcctggttacaatattggtatagggaaacagataatagaaaaggcacagattcccccacaagctaatagagtgttgtaagcaatatttaaatcttcacgcctttcttttcaaaaacactacttctttctcaatgccaagagctggctgcgtttctacatttggggaatttgagatattttctcgcatggaagtcacaccaatatcctaaatcgtgtaactaaaatcatttggaaatgcacagtttttctacacgaaaggatattgcttttaatccaaatactggattaccaaaaccctgaaatatctttcagtcctaatgtagacaggaagacagaaatgtggcctcaccagggggcacgtgaggcgaaggcagtcactgcctcaatcatagaacgctgtccacggcagaaatgccccgtgcagaccccatcaatgaatagcccaccccgaacagtcctgctgcactggcgaattgggggtccaaggacgcctcccccccatttcatacaagcctcactccttcttcccaccggcggggcagaaagccccctcttcagcccttccagccgtccaggaccaggcaactcgctaagcgctgactcggggaagggagggcgcagcctttgtcccgcaggtctcccgcgcccgcctcgctgtccccgcgagcgagcttgggctcgacccccgttccccctgaacgcacctgcaaacaaaggagagccgttccttcgccaacttcctcacctttgcctcccggtccttccgaagtcgggcggggatgccgccccaggtgctacgacaagccccagggtgccggcaccagccagcggtgccgtcgctcaagcagccgcgcgcactgccccgggctcaagttgaagagagcggcgcccgcgcctccctgcgccctccctgccccgcccgccgcggccgcccattggctgctggggaggcgcgtggccccgccccacccggccgcactcccgtgaagtgctcccgctaggtgctcccgccagatgctccagctgctaggggactggctcagggccggcaaggaggatcccccaccccaacatactcccttcctgtaacgaacgtttcctttttggactctcaagacttagaaacttcattcaaacccactgaacctctttagaaaaagttgatgctctaggcctgctgggtttctggtttcttttcttttcttcttgagacagagtctcgctctgtcgcccaggctggagtgcagtgacacgatctcggctcactgcaacctccgcttcccaggttcaagcgattctcctgcctcagcctccctagcagctgggattacaggcgcccgccaccatgcctggctaatttttcctatttagtagagatggggtttcaccatgttggccaggctggtctcaaactcctggcctcaagtgagccgcccgcctcggcctcccaaagtgctgggattacaggggtgagccaccgcaccaggctgggtttctacgatcctgattgtggggcgagtgggggaaatggggggcggggaggggtggttggggaagggaggtattgcagcccacagccagaaagcctttgggcagaaagacagaaaccaaattgtagttttataaatctgaataatcagatttcaagaggcagaaaattctgaatcgagctggaaagtgtttacagatcatctgccaatttacacaaagcacttagcagtacacccctacacccttttgtaatccctacctcttttaagacaccttttgtttatagctgacttgaagccaagatcccacaggcaccccaacattgtcatctctagctgagcgcccctccccccatatacatggaagcagaaaatgtccaattggctaagtgacagcactttcagcactttaagtaagagtcctggctagccactagtcatataaatatatgagttggaaaggaaaatccaaggtctctcactgactgtattctgtgagcactgaaagtacttcctctttctaattgtttctgggcaagcgtaagttatttgattagccaattaacaaagtgaaatagggaggctgaggcaggagaattgcttgaacctgggaggtggaggttgcagtgagccaagatcgcgccactgcactccagcctgagtgacagagtgagagtccgtctcaaaaaaaaaaaaaaaaaaaaaaaagagcaaaataggcaaagcatattagccatgtttttggctatattcaaagtctcatacgctccttttacaaagaaaggaacagaaaataggaaatacacatggaaaatcaagggagtatttaactataggtcttgtttgggtttggtaaaacacaccacaggtgtacagacaactttaatgttcatgtttaaatgaggatcaggtgttttctcatttgttcaacatttactaagctcctcctaagtaccaggttctgtgcagaaaattttatattatgcttttctagttaacagttgtctttctagggagggcaagatttaactcatgctgtttctgaatctacgatcagtaacacttcaattatttggaagagttattgacagtaaactgctttggcaaccacaactgtctggaacacaacacaaactgcaagtgaggctagaagagggtttaagacttggggttcagcagccagaacagacagcagcaagctcagagatatgaaacaagttaacaggattgtacctgtcaccccttcaaaggctgcctctccttccttacacatcattccagtgagtttggttgtctgattctctgtctatagcagggcagaagcaacaaatagatgggtctgccagatgtccacagggtacgtcaagtgtgacagctgagggtctg

SEQ ID NO: 316675 - DNA, 4001 bp, Homo sapiens
gcttcccagggatgctccagtgcagagaacctgcaatgggccccacgccagcatagtgtgagctccaagaaaggaagaagacacctgttgtatttattatgccacttaatcaccagcaccaatgcccagcacatggcaagtgtccaataaatacttattaaataaattatccccattgcagaaaagctagaactaaacaacgtggcggctgttagaaaagtgtgtttctcacatctgcaaagtgagaatgataaaatgaggccaggcatggtggctcatgcctgtaatcccagcactttgggagaaccgaggcaggtggatcacccaaggtcagcagttcgagaccagcctggccaacatggtgaaatcccgtctctactcaaaaaaacagaaattagccgggtgtggtggtgtgcacttatagtcccagctactcaggaggctgaggcaggagaatcacttgaacctgggaggcagaggttgcagtgagccgagattgtgccactgcactacaggctgggtgacagagagggactctgtctcaaaaaaaaaaacaaaaaaaaggaagcaaaacggaaagtagggttcttactgagctacaaaccatgacaccttctttgataatactggctgatgctttatggaaagtctttcccctcttaagcatttcattcacactcccttttacttataacttttacaaaattacagaccacatttacaaacacattctgcttctaacttcttaggaaaggcctcaggacacttaataattcctttctgaactcaactaactaaaaggcagcagcaaggatctgaactttagagagaatcttacaaactactcttgtgtaagagctcggctggaggaagggccaactgctcaatggcctaagaaaacctaaaagagaacagcatgaggaaagcaggcagaacccccattcatgatacaagtcaaagccaggctgcagctgcagttataaaaagaaagaaaaagactaatgggattgccccctccttccgccttctcccacccaaggcagtaatgaagattcacagctacacattaattaggaatccatagacgtgcctggttacaatattggtatagggaaacagataatagaaaaggcacagattcccccacaagctaatagagtgttgtaagcaatatttaaatcttcacgcctttcttttcaaaaacactacttctttctcaatgccaagagctggctgcgtttctacatttggggaatttgagatattttctcgcatggaagtcacaccaatatcctaaatcgtgtaactaaaatcatttggaaatgcacagtttttctacacgaaaggatattgcttttaatccaaatactggattaccaaaaccctgaaatatctttcagtcctaatgtagacaggaagacagaaatgtggcctcaccagggggcacgtgaggcgaaggcagtcactgcctcaatcatagaacgctgtccacggcagaaatgccccgtgcagaccccatcaatgaatagcccaccccgaacagtcctgctgcactggcgaattgggggtccaaggacgcctcccccccatttcatacaagcctcactccttcttcccaccggcggggcagaaagccccctcttcagcccttccagccgtccaggaccaggcaactcgctaagcgctgactcggggaagggagggcgcagcctttgtcccgcaggtctcccgcgcccgcctcgctgtccccgcgagcgagcttgggctcgacccccgttccccctgaacgcacctgcaaacaaaggagagccgttccttcgccaacttcctcacctttgcctcccggtccttccgaagtcgggcggggatgccgccccaggtgctacgacaagccccagggtgccggcaccagccagcggtgccgtcgctcaagcagccgcgcgcactgccccgggctcaagttgaagagagcggcgcccgcgcctccctgcgccctccctgccccgcccgccgcggccgcccattggctgctggggaggcgcgtggccccgccccacccggccgcactcccgtgaagtgctcccgctaggtgctcccgccagatgctccagctgctaggggactggctcagggccggcaaggaggatcccccaccccaacatactcccttcctgtaacgaacgtttcctttttggactctcaagacttagaaacttcattcaaacccactgaacctctttagaaaaagttgatgctctaggcctgctgggtttctggtttcttttcttttcttcttgagacagagtctcgctctgtcgcccaggctggagtgcagtgacacgatctcggctcactgcaacctccgcttcccaggttcaagcgattctcctgcctcagcctccctagcagctgggattacaggcgcccgccaccatgcctggctaatttttcctatttagtagagatggggtttcaccatgttggccaggctggtctcaaactcctggcctcaagtgagccgcccgcctcggcctcccaaagtgctgggattacaggggtgagccaccgcaccaggctgggtttctacgatcctgattgtggggcgagtgggggaaatggggggcggggaggggtggttggggaagggaggtattgcagcccacagccagaaagcctttgggcagaaagacagaaaccaaattgtagttttataaatctgaataatcagatttcaagaggcagaaaattctgaatcgagctggaaagtgtttacagatcatctgccaatttacacaaagcacttagcagtacacccctacacccttttgtaatccctacctcttttaagacaccttttgtttatagctgacttgaagccaagatcccacaggcaccccaacattgtcatctctagctgagcgcccctccccccatatacatggaagcagaaaatgtccaattggctaagtgacagcactttcagcactttaagtaagagtcctggctagccactagtcatataaatatatgagttggaaaggaaaatccaaggtctctcactgactgtattctgtgagcactgaaagtacttcctctttctaattgtttctgggcaagcgtaagttatttgattagccaattaacaaagtgaaatagggaggctgaggcaggagaattgcttgaacctgggaggtggaggttgcagtgagccaagatcgcgccactgcactccagcctgagtgacagagtgagagtccgtctcaaaaaaaaaaaaaaaaaaaaaaaagagcaaaataggcaaagcatattagccatgtttttggctatattcaaagtctcatacgctccttttacaaagaaaggaacagaaaataggaaatacacatggaaaatcaagggagtatttaactataggtcttgtttgggtttggtaaaacacaccacaggtgtacagacaactttaatgttcatgtttaaatgaggatcaggtgttttctcatttgttcaacatttactaagctcctcctaagtaccaggttctgtgcagaaaattttatattatgcttttctagttaacagttgtctttctagggagggcaagatttaactcatgctgtttctgaatctacgatcagtaacacttcaattatttggaagagttattgacagtaaactgctttggcaaccacaactgtctggaacacaacacaaactgcaagtgaggctagaagagggtttaagacttggggttcagcagccagaacagacagcagcaagctcagagatatgaaacaagttaacaggattgtacctgtcaccccttcaaaggctgcctctccttccttacacatcattccagtgagtttggttgtctgattctctgtctatagcagggcagaagcaacaaatagatgggtctgccagatgtccacagggtacgtcaagtgtgacagctgagggtctgctggcaggaagtcatgtgtgacaagtcctgccaactc

SEQ ID NO: 316676 - DNA, 4001 bp, Homo sapiens
aatggagaggcatacatctcctctgaaggcaattgtgtttgcgcagttttcttctcatggtcaaattaactgaaggaaaaagagagaagtattaggagcatttttcagaggcttaattgttgtttaatctagacaatgcaaacatattttggagccaaactagattgtggttatttgccatttgttcaaatgtgattataaaattaaaaaccaatgtgatgcatatacacaaggggtgttcctaacagttaatgttaatagcaagatcttcttttactcctatttttttaactccatcgttgagcaacatagcaacatcttaatagtaatatcctcctccttttgaatgattttttcctaaatgctcctagaccttttattttatgtagtaaattaatcacaaatattttgtaagaacattgtcaaagctactgtgtatttctgaaaagtataaatggtttgaatagtgactgctgtaaacaatgagaagggatcaagctgctttctcagagttgctgaattggaacttttttcttacttatgtaaaagcacagaccaggggacatcattcgaaataaactcacagtgatcaaacttctaattcactaaaaagcaaagtctgaatttttaacaagtgatgcatcgttttctgttctaactgaagaagtatattatcaagtgaataatttaacatatttggatgtaaatattaccacctttttatttaaagttgggtttgtggttcagaaaactttaactttctaatttctttctttctttctttctttcttttttctgtttctttctttctttctttctctcttcttttctctcttttctttcttttttttttcaaacttactggttctttgaaatcttagctgtttggttttgaagtaaaagtacattagaatacttttgtgtactaaatttctgttggttaagtacaatatacttgatatcatctttgaaaacatgtcaagtaaattaatattatgtatctttatcatacatatttttgatgctttttagctgtataagcataataataaaaactgcacttatttgttttaagtgacatgcctagttacataattagaaatgacagctattgacctgttttaagatttaatctgcattttgttgcattatgctttttgtatgttaattcagcccctactctgggcagcaacatactttttaaataaactgctttggagtttgcattttacctaaaaatctatacatttatttacctttataatgaatagacgaacacttctgtttcattttacttgtaaagacaacataatctgcaatagcttagagatctattttcttggcatttaggaaaaatagtggtaaaatacttatcatttcaaagtccagatgtttttaaaatattgaaataatagacccaacaggatagatagcatactttcaaaatcctacacatttatccccaatactactaactgcaagcacacctaagtggttttcagataaacacaatcatgctcagagacccagggatgcaaacaggcaaaacaagttacttgtacaaatgtatcaaaggcctacctggtctctgtccgctgataaggagaagactcataataaaaataaaaaatgcaaaaaggaattgctgaaatctcattttcctaccgcacaaaagtagagcaatgactctcaatgtaaaccaaacgatctgtaaatagtctgtgcaatatctgtgtggctgtcttcacattctagtgacaaacctcagagaactgccagctgtgttttgcaggaaggttaatgatcacattagacaaagttgccggtgctctgtgctgtggtcagagcctccctcagcctcaaacccctcctccactcctcttctcctttctcctcggccactcccctttatttccataagcaaatattggtgaaataaaccattcaagcatgctataactttagtggaagtgtactccaaaagctccaagaagagaatgacttaaattcaatctggatatgaagaaatacgtaaaacaagacgtgacactgcctcctccccttaccatttgcatctgtttaaactttgcccatattggtcccacatgcagaaaccagtggaaatgacaggaagtctctcttttgtctttttcagaaggaattctgaagctctaacataagagtcccaaatgctttgtggcagaacatgtgctgaaatgctttatctttaccaaacttactgcaaagtagtgcctgtttacacgaactctccaaattgcctaattcactgggtttgtaacagtaaagatttttggaatttagaatgttttgaaataaatctgcaaaacatatacatttatattaatattttgtaaagtgcagttttaaaagtaacagattattttcatctgcaaatgtccaggattttaaaaaaggaagttcaggcaagccacaaactcatgaaatctgtgttcggttaaaaatttatatgtggtggaataccaggctaacataccacagtcacagaaattggagatggagaaaacaagtcttagttcatctcccagtgaattcagaaaacacaaaaacagtctagccttgtcttttacacacatgcaccaagatctctttttgtttcaagtgctcccttatatatcagatacagctgttataaatggaaatgactatacttattatgtaagtataataaattccatttataacatccatatcgaacatattttaggtaaaatgcaaaatgccaaaagaatagtataggtatgccttgaaacacaagtacagccaaagtactagctctaaagcatgtgtaatttgttttgaaccattaggaattttgttgtatttggcttctttagactcaggtagttggtacataaccttggggcttcctgaggtttgaatttaatgcacaatttgtcttgattttataagtcaatctgtaaatttccctgcctgtctagttaggcatgaagtttataataggcgatggcatacaaaaattcttaaattcactttattgaagtcttgagaatatattgacctgtttggggactgcaagcatagtgttaaagggtcctactttaccatgctgtccattgcttcataaaatcaatggaatacaatagagtttgaactcatgatatacaagtgacttaagaatggcaaagagtttattcagatttttaaatccctccccatttcccgccccagtcttcttagtacagcattcaggaaaacagcatgctaacaaagttgaatgttaaatcaataagagatcaatatagattttggcactatattttcaggccaagttttaagtctattcaaaggtttagtagtgagtctttatagataagatagagacctaccacagagagcaaatattgactaaaatttttatatttcattaccaggtgatcaacaatgaattcctagaatatcactaatatgcaccagtgctgtggaagatacatatctccactgatcaggacagagcaaactgttatatttaagtcatctaaccacatagaacattatttttctcattaaaagaaaaaagatgtgataaaatacctggttttctacctgaaagagtgattatgtattaaactcatgaaaatttacacatgatttatttacatgttttaaaattagtctttcaaaaagacaaacaaaaagatgttgtttaaatagttgacttttggagtatagtaataaagtgattatacagtcaatgagcaactgaaatgttagacatggaggtacaatgaaaagtgatccagcatttctgtggaatgtgagtcaacaatagcaataaatcattcatcttagtactgaataactaggtatggagaaatattggtaggaaagtgtcagaacaatgcaactggctctgcaaacagcactttcagcctgcaagtataagagaacaaggcatcttctttgtttacaggaacacaaacctagacttctatcctaca

SEQ ID NO: 316677 - DNA, 4001 bp, Homo sapiens
aaactattaaagcaatgactattatttatacttagcatttttatagtcactttcaccaaactttctcacagttgcagggaggtgggttagaaagtaacaaaacgaaacaacaacaacaacaaaaaacttctcatatatcatgaagtctataacccagaattctacgtagactttaaaacttcatagtttcaatgcgttaaagttcttaagaaaactgtaattcattataatctgagttctatacttctccacagtatccaagaatagttggatctgatattattgcatatccatgagccttacactgcaaggagcttgcagtgatattagaaaaacaagaatttgtttttaaacgtaccatcagcttctccttttacagacaagccacataaaatctgacaggtttacagacgaaggaaaaaatacaaacacaagcacacacccatataaatacgttttaacaagctctctcacttaccctctaggtacattttaattcaaataaatctttgagtactgacaaatctatataaaaccctcttcgtgttaggaaccaccttaaatgtgtatgtgttaaatatgtttagaaagaagccaggaagatatttgcacttaaccctagcctagttccatgacccacttttttttcttctttaaacgttgttggacaaaaaatgtcatgagtattttctctcaatatttctcctgtaagtgtatggaagtcataaataagagttaaaaaaaaaagagtttaaaggtatttctctttttttccttaaaaaaagttagcttgctttttatcttccaattacttacgggcaaagttccatgggcctgtgggggtgtagagtgcttaagtgcagataaatcaatactgagcttgtaagtacaatactattatgagtaataacaatgacatcctattaaatgtacttttaaaaatagcttattttcaatacacttcttgattttttttaaaccgaaggctgtattctactgaacagcctacttcaaggacaagcttgcaaaaaaaaaaaaaaaaaaaaaaagaatttgctatcaggatacctacttacaacaccctaagatgtcattattccacacaaattagcttattttcttgtgttttcctctaattatcaaaggctatataatccacgaaccctttccccaaatcaaaataactccagatcacctcaaggtaggaggtgtttaagaaaacaagccagaattagataaagtaaaacttactttattaaataggatggacaccacttctcccaagagaactgtctccaaaagtaaacaagaaagatcaatctggtaaactcacatcatacaggttcccgtgtaaggtatcgggttcaggcaggtggaagccaaatgatcgtaattaaagttaattaacaggccagtcgtcttaacgtggttaacaagcagggtgcggggcagcacagacacccgggcaaattcatgatctctaccgagtaaataacttggtgcctgaaactcactacagcttcttcttatttaaaggtaggggagaggaatggagggagtgtccagctgtctatccggatcctcaccctcccgggtcaaatcccagaagtggagttcttggatcacttaccggcttctggtttcctttcagacgcccacacgcgggagcgaaatccaaggggcggacaccagagccgagcactttgcgctgaggaaatttacccggtgaagtgtcgaaaagccccagcccctccagacagggtcctcccacccccgcgtgggccatcccggcccagccttcccgaggccccgggtactcgccttgcgctcgggtcgcggagttcgaaaagcgaggtgaggcggcgctgggaagctcagcgccggcgtctctcccagccttgggcgctcggtcctcgcccctctgccggaggcgccaggcctcctctttcccggtccccgccggctgtccgcagtcgcctctgctgcctggcggcggccgcgcgggcggcgctgttagtggggccggcgtgtcgcggccgccgcacctggaggcggggagcgcgggccgcggacccgcgctcagctccggaaacgccgagcccggcgcccgcgccttgctcaggtgctcccgcgcctcgcctcggccgccgcttcctctccgcccgcgggggcggggagcaggcgccccgcgcgggggaagccggagctcaacggcgggggcggcccagccggcctccctggttccgcagcatagttgggtgactgactcagaccgccgcgacttggccgcgcctggcaccctcgccacctggcgcacctcggcccggaggcgtcagaccccgctggggaagctgcgggggcgcgccctggagcccagagcgacaggggcattacccaccttcccgggacggagatgcccaggaccttgtgttggctcctcctggccagtgggtttgtctgtgcgcactcatggggggttgaatgtcaaatgggcggaacctcgccacgactgattattagtattactcttccaagtacttaaagtgttagctcagcgtttcccaaactgaagactcatctagggcactattttccccaggctgcttctatgtaaatttgctccttcttgcacctgtggcggttagatcccagaggggcatttcccctttgagttggactctgacaaaggaggcagcgaaggaaaataggggatcccaaagaacccttgtggacctccaaatatctaagcgtccgtaaaatccagttatttgcaagtgagttcacagaccaactactttttttttttttttttagacagggtctcactttgtcacccaggctggagtgtagtgaggcaatctcagctcattgcgcctccgcctctgggtccaagctatcctcccacgtcagcctcccaggtagctgggattacaggcgcgcaccatcagccaaggtaattttttttgtatttttggtatagacggagtttcgccttgttgcccaggctggtctcaaactcctgacctcaagtgatccacctgcctcggcctcccaaagtgctgggattacaggcgtgagacactgccccctaccagcttttttttttttttttataaacatctcccacagactacctgaaattctcttcattaaaaggtgaaatgtatttatctttcccctgttcctgttgatggaagtgaagcaattaaggaaagcgcagaccttatgaaaatgagataattggtgaagtgcggaaagagagaggcttcccacaagcctgggcccttaggattcttcagtcatcaccttcacccacactaactacctgcccaaagcaccgtctttccctggggagactctgaagcagctctgtcttactagagacaccaaatatccagttccttttgaacttaatacctcatagccgacctcatttccaccaggaaagttttattgacattttccaaaccacgggaactttttctctggattcctatagcatttataggaggaattttatttatgtggctcttttctggcttcattctctgtgtgtgtgtgtttcttttgttctttttcccttttccctctccaaattctcacatacttctctctttttttttatctctctcttttttgtttttgtttttgttttcgactgagccccgctgtatcgcccaggctggagcgtggagagcagtggcgcgatctcagctcactgcagcctccgcctcctgggttcaagccattctcccgcctcagcctcctgagtagctgggattacaggcatgcaccaccacgcctagctaattttcgtgtttttagtagaggcagggtttcaccatgttggccagggtggtctgaaactcatggcctcaagtgattcgcctgcgttggcctccagaagtgctgagattacaggcgtgagccaccatgcctggctctatttttatcattgtaagccatcttcggtccttctctaaacaaggtgggttataaat

SEQ ID NO: 316678 - DNA, 4001 bp, Homo sapiens
cttgtcacctgtagaacctagagcaaaacctttttcggcttcagttatcacatctgtaaaatgaggataacaattcctacttaaagtcattgtgaagattaggtttaaaaatgagacatacaccatttatgatcactctggccatataggatgtgcccacattatggttctttttgtcacagtttacctaggggctatccaacagatatacaataaagccactagaaaatctggggagcagctttacttctgaagcagctttgctcatataaacccacatctcacaggccatatttttgctttatcccctactcacctctgactgaatcatcgacaatatagccaggtatttgtggttcgttatcatactcttctgagtagtcatagtcggctcccgaggacggttcactactagaaggcatttcactcacaggggaaatctcactccctgaagacatctcacttcttgaggtaacctcaaatccatcagcactgtggtccccagaaaatggttcacgcttcccagagtaggtgtcattgaggtccaatccagcagcataatggcctgcaggggagggaataaaggaagaaaagaaaaggtaaagtagggtgcctttcgagtcagctgtgttaggtagaaaagtttatcttttgacatcaaagcagttattgcacatgtgctattgtttgtgattgagtcatttctatgaaagaaactttacatttttgccagcaagcaaattcagctgtcccaattacagaagtgcttttctgaagtttttcttttccacagataatccacattaatttccacatcaaaaaaatcccgccaaattggcaaattaatctaatacaattacttgatgggtaatgtctaaaaattcccatcacttcacattccaaatgcatttctttttttgctagaatgccatcctggcctatttcggtaggttttagatacaaatatcagattttcttcagatgtgttcatatttttaaaagatatttttaaaagatgtgttcatatttttaaaagatgtgttcatatttttaaaagatatttttaaaagataatcttttaaaataatataaacagtggttaattatatcgattattattgtcatttttcattatcattattattattactacatagacaataaactgagtactaagtaagatttggggcccagagttaagccactgctttatcttgctttttcttaggtctcaataaaacagcatcagagtggtgcttttaacctctcgccgggatactctaagtccctctaggaaggtaaagaagaaatcactagacagagatggagaattaggcaggaggcagcaaacactgctgggtccaatatctgcggaaatcacttcacctctctagatcttggtctttttaatcttttaatctgtgaaacgaagggttaggttcaaatgatctctcccgtcttctcagctgaactaaagaaaaagtacagcgattctctgggacaccttgtcctggacgtttgagacatctgcccttctcttttcctcctagggagggagctacagtgatcacctcctgcggcgcagggtcgggggaactaaagggcgatttttagagaagcaagagccaaactcaagaggcaaaacctgccatgggaggagagcccagcagttcagcgccggtgaatcctcacctgagccgagtatcaagagcgacagcaccaccggcgccggcggtagcagcggggctctcattggtccttcgcagcggcggcgtctcggtctctggggcaactcggtctctgggacacgagctgccgccaaaacgagcgggtgttggaagagcgagtggagaccgggagtgtgcgccgctctcgaaggcttggggagctcggggcggcgggcgcggcgcctcgggctgtcccgggacctctggggcgctggcacccaggtgtgcgaacgtctgtagggcggcgcgcacctgccgctttataggctcagccgggagggggccgcagcccatgacgtcaaggcccggccgtgggtggaggcaggcggcgccccagaaggtgctacccgaaaaccacgcgcggaggacacacgccccgcctccctcgtgcgtaaggattcgctgagaggaagtggaacttaaacctctagctgcaagccgtttttgagggcgagcaggactggagttccggagctagtacctgacagaagtccagatgtttcaaactctgacaacctctttgtatacttaacatctacaacagacagggattaaatagaagagttccgtatttagatgtaaaagtactttaagaccaagagtgactttgcctgatgtttccaacaaggataaaggacgagagaactcaatgaggaattgcttcatgtaggatgggcttctatctcaatcaagagccccttcccacccatttctgtgaagtggccagaatttcaaatcccctcactccctatttctttatgtggcccaggggcctcatcaacattaatatttattgatgatttattattgccaaattatgcacttaaaattttacctacaccatctcacagccgataatgttcaaagccaggtggatatgaattcttcatctgactctgaaatctgctgttttcctctctgatgaatttaggtttaaactgatccttgaaaagagggtttctgggaagaacaatatttagcctaaaggataatttctactggtggcatactggcatttaggtgaagagtagtgctctagactgtgcctctcaaatcccaagataaaaaggtcagcgttgagggcccacttacaacctagtaggatatttaatcatgacaagtagataaaatgaagcggagacaggaagctacttaatttgactaacttggatgtactgtcaactaaagaactggatttttcttgacttgaggaagagaaaaagcattgttcattttccttcacctggagatatgattctttcctgattgtttcagtaacacagcccttttaagaatgtaggtcaggccaggcgcagtggctcatgcctgtaatcccagcactttgggaagccgaggcgggtggatcacctgaggtcaggagttcgagagcagcctggccaagatggcaaaaccccatctttactaaaaatacaaaggaaattagctgggcgtgatggcgcgcgcctgtagtcccagctactcgggtgggctgaggcaggagactcccttgaacccgggaggcagacgttgcagtgagccaaggtcatgccactgtactccatcatgggtgatagagcaagactccgactcaaaataataataataataataataataataataataataataataacgtgagtcacagtgcatctgtcctaattctggaaatttttttttaaaaatcacttatttttaatggtatatcacagtgcgtagtccaaataatatcatgcatttagtagaatgaaataatcatgaatcatgccttctattccacatttgttgagagtgtattttgtgtgagccacctgctttatattttatgaaggggagcagtataggttcaccaggagctcagtggtgtgggccagatacatagataagtaattctaatagatcacatgatgagaagggttcagagtgccatggaaaaaaaggacatggtttaattttgcctctgtttaatggaaagctctgtggaaagatgaagaggcccctcaaaggccttcccagcaaatcttttacatggaataaagacctgatgtgagggtatgaccaagtatgggaaataaggctagaaaagtgtcatgcccattccaaagtgaagtaggggcctgcactgttatctgttctggtggatgaggcaattgtgattcagagagattgagagacttgcccaaagatttcaaaagattcttttggagactttgtttggagctcacgcagttggtctacactgttgcacctttatgctcccataggcttcatttc

SEQ ID NO: 316679 - DNA, 4001 bp, Homo sapiens
ccaggggggaaaaaaattcactcaaacaaaactgcatataatttcaggggtgggaatgaggaagacccctgaaagttgttgacccttaggccatgaaccccaagtcatcatccaggattaaggcaaatcataatccaaggaaaaccagtttatcaatttggaaagaaactaaagtaactgaggcagggatttaatccacaaaatacattagaaatcttttctcttttctcagataaaagtgtgttagacttggtagttgggagaagacgtgggtcatgctaagcaaggaaaacaaaacaaaaaacaccacaggacaaacgaaagaaaagcagaattaaggcagcagtaaaatatagtaatctgtagccgctctgagagaacagcaatgaaatggccaattcggccgggcgcggtggctcacgcctgtaatcccaacactttgggaggccgaggagggaggatcatttgaggtcaggagtttgagaccagcctggccaacacggtgaaaccccgtctctactaaaaatacaaaaattagctaggcggtagtggcgcctacctgtaaacccagctactcagaaggctgagacaggagaaaagcttgagcctgggaggtggacgttgcggtgagccgagatcgtgccaatgcactccagcctgggcgacagagtgagactctgtctcaaaaaaaaaaaaaaaaaaagaaaaaagaaaaggccaattcctgaagccttaacagacggctgacttaaggtaaccatttctggtgcacatttctatgccaattaagttaattaaatggcaaacatgaacacacccttacaggtgaaagtatgaaagcaaaagtttatgcgaagttctggatctcttccggcttttccttatcaaataataatgtagttagatgaattttatactttaggagaaaacagggtaggggcgggggacagaaatcctaagagtggccaaaggatctgcaggaagtataaagtgtaaactttttgaaatcaaagggctcaagaggaaggtaagaacaaaacaaaggaagtaataacaaaataaagtaaaagggaaaaacgtctagcatctaaaaactgtttttaaaaaattatttccttttcctagacacgtaaacagtagtaacttggcaaacaggaacggagcagaagacaatcgaacaactccctttccaaaactccagcattccttagtcaggcttgggacatttcacaggcaagactcctctctgcaccactgccagatgaatctctcagagggactgtcactatctcccttcctcccactgcgggagagaggaagctggggatgcagggagaagaggggagaaatgagggttggacagcaagcctgaaggtggcccactccgacactttgtcaagaaaggtccggattctggatcctgcaactccttttcccacccaatgtatgcaaagccaagagagtgcctccctgcaagggccggtcctacaccttcactcgactgtttcgggggcacactcagagggacagaaggaatgaaggacagaagaaaccaaaggcataacacttgggcagatacggcacagactaaggagaggcgtgccctgtgaaagttcggaacggtgaacccgtaggcaacgtgcccgccccaccagccacctcaaaccatctttcccccgccttttcccaggcgagccagctccgccctcacctttcttagggtaactcggtagcttctaagtcgaggcttatcctttccgccgctctctggaatcgcctcaaccctggcaaaaactgagcggaaacgcgacccggaccttttccttcttccccttcccccacgcacctcggctgctcgggggcggggagcaactgcagctgtcacaaattcacactgaccaaccgccgaggacagtcggaccggcgacctctcaacccagcctccagaaccagaaccaagagcagcgaagccggaagtgaggagaccggaagtagcgttgtccctggccctggacggcctctctctccctcaatccggccttgcccggccacgtctcggtggtgtcagcgcacctcccacgaggatccctccgcccttctccgggaggcgggctacgcccctccctctgctgccctagcaaccacatccgggactccggcggtgtcgttgcccgggtaattttctggcagcgacctaatgcgcgcggggccagaggcaccggctagagctgggagcttgcggaagggcgcccctgcctggtcttgagaggtcgaaggtctccaggaggcctccgcctccctctttttcattcacacaccctagcctcacacgttaggaggacccccccaacagaccgtgagctggtgccgggagggtggaggtagatgtacctcacctccacgctaccacagaagagcgaaagctgctttctcagccaccggagagcacgaagaaggttattccagtcccggggggaaggtgggggtggtagggagaatgcgaagataaggcagcagacggaatgcgggcgctgcctcgcgctgcccccgtgcctggggagccctctcccttcagaaaggctagacccccgggcccggcatccctgagctcttacttgctctggatttgtgatcgctttttgctttttgctcgctctctcacagtagattccttgatacttttctttccggctcctctttctttttccggatgaccgagctctgctttctttgcttgccccattacttcttaaatagatcattgttctgtcacggaaactgctgaacaattcgctctctcagagcccttcgtagtttcctaaacggggccccaacctgcactactctccccatccccagagctcagtggtgcgaaagcgtggctcccccgtggcgctagatagacctgaagttcatttacacactgtaccatacagttggtccatcacagaatatcccttcgaactgctggactgcttttcctttgacagctttgaatgctcatttttactcccatttcacttgtagaaatgcgaagggtaactgtgcacacggcgagatttacccttctttagaccgtacttctcagctgcctttacttgtcacagtagctgacaagatatttttaatgactaatgcccaaaggcagagctctacctctacagatttccagggagtttcagtgtagtgaaatatccctggcaggtatcttccccagatctgtgaatagtaaacacctatggcaccataaatgtttccaatgtataacaatattgattgagctctctaggataccacctcttaaaaaaatagtactgaaattccaaaacataaatctcttatcttaagtggttctgtcttaaacaaaagaaaggagcaaatatatatgccaacccactcaaactgtaacttcaattgttatagcttactgtggatttttctgtacaaagccatcttgttggtttggagaccattagtcttctcaattataagaaaataatcccaatctaaattaattactgctgtaattgtgtaggaactgagcaactacagaacttgcagctaagtacaagtgttgttcctagggtttcagaagggtgacttggaggaagtgtacggtaggactcagcggtgcttgaatgatgtggacaatgaatactaaattgtttttgctggctgttatcttaaagattcctgctagctgtctcttgagtttggagatgcttagcttgactaaagttagtctaactattagactgtcagactctgaagtgtttcttattttggaaaggtgaagacttgctttagtttgttcatagtttccttggcagctgctgatggttttgatggagattcagatggatttggaactaatgctaacttctgcttggtgaagatgctaaccaagttagatactcttcagtgaattctggtactgtgtacgattaatcctcatccacagtattacgctgtgcaaggctatatatacacaggattaatct

SEQ ID NO: 316680 - DNA, 4001 bp, Homo sapiens
gctgctggaacctaacgcatgtgtcctgatggcaggaaagctaatatgctgtcacagaaatagctttctaccagtggccaaactggctttgccctctgcctctctccacacctctctagctccagagggaactactacaaccaatgagagagaaggtacattctcccggccactgactctggttaacatcaagttacagaaagagtcctcagtcctcattctctcgtgttcactctgcacccccgctcccaactcctcctttctatgctcactcctccatatgtataggcgcccccctacttcccacccaacacacataccagatgccaagggcctggagagccctcaaccaaataagcccacttgtcacatgtcccagagtcccatttctgattcaagcagcagagacttaaaaacaaaacaaaaaaaccctaagtgagtcccagtcctgattttgcaacaccaaagaggtcagagaaccaaaaggaaccttggagatcatccagagaagttgagtgacttgcctccaaaattacagggatggctcactaaattcttcccacagaaatgtacttcaacttattcattaaatgcatatttactgtaccaggcaccatgctgggtgcccgagacagtataatcaatatgttttaatcgcccttactgaaaaatggggcggggcgcggtcgggagaacagtgagatgggggattttccccagaggtggtatctacaaacaaatgtacaagggacgaatacctaaggctgagaattactgaactgagaatctaggtgagtgatgaaggccctaagaacccagcccctcaaggctggatactgcccaagtccctgtctgctgtatggacaggtcttttaaagggggaaaggggacattcaccgccatcctccgaaggggttatggatccaagggatggtcaggctgcccagctcctcactggggctaattccgccccattttccagtagcatcactaactcagtatttctgcatgaattttggccccttctctcctagaaagactctcctcaactacactaaaatacagttatctctcctgtatctcgtgtcttcttccgagtttaagagacagaagttcaggggaggaaggcaccaagcctaaccggggtggaattccctatttgcaagcagtgcccgcctaggctagagggcaggctgtccgctcacccttccaaaccccaatctttgaaccctcctcagcacggcaggggaggaatgtgcggaagcagcataaagccaggtggactttctggtttggcacgtgaaggacctggaacaggactgtcggggaagatcagacaatgagagggaaaaggtgaagcttaaggggactctggaaaactcaacactcccgcagggtttcaaagaatccccaagaaatttcttttgagaagtcacaaaacaaaactaggcaaacagatgcctcggttttgtaagagattgtgagtagctttaggcagcaatgaaacctgactccgggccaggagtgcctagggtcggtccagcggagcgcgcattcagcgaggggtgttcggccggggccaggcggggcccaggcggggcccgctggcagctggttcccgccgccgcagagccgcaggggcgggaatggggactcgccgcgctgcctcgaggaggaatgattccagggaccccccggggttccgagagagctgggctggtccggaatgaattccccgttcctctggctgctggccccggacacaagaccctccgtctcctgccgagagaggctcccccagccgcctcgccacgccgcagcccgtccgcgcccgcgtccccgcttacttttcgtcgcagcgatgaggttcttcccgtccttaatgagctctttgatgaacttgttggtcctctcgagttccgcttcgtgagcgcggatcctctcccggaaccacgggctgtcgaggtagcagtcgctgaactccaggggctgcagccccatgacggcagcggtcgctgcgcggtgcgcacggccgcgcgctcctgcccgagccgagctccgaggccgctgccaggtgcggcgccgcgcgttcagggagcacagaggagctagcaggcccgggcgcgcggcgagcgcggcacggacatgtcccgtagagccgagtcctgcggcgcggaggagctgccaccgagaccagcgctagctgcggcgccccaatcccggcagcccccgccgagctctgagcgcccgcggccccgccccgcccggcccccgcgcggcagacactccccgaggcgccacccggccgggcccgcgctcccgctcgtccccttctctttcctccgccttccttcttcctcccttcccttccctggacgcctcttccttctcttccccacgcgcagctgcccctcctcttccttccgaggcgtcctggggctagaatttcgccccgcggctcccctccaccctgggcgctctcccctcccctttgcttgggctcccggggccggggtgactcacagtcggctccccgctgcacggaacccgaccgggaccgagaaggagcgtcttaattgcagtcgttagtccccgcaggcgggcgacataactctgaagtggctgccttgcaggagatgattaactcatttatctcatttatcctgggacgcccccaaccccgagctgggaacgaactcgcacagggggctcttttccttatcccggttcctttcccagtttaaagtgagatgcgtggtaaatctccgcttgagatcgaagccttacaatggcaagagcgttttcttggtggcccagcagctcctattacacttctctgcgtatccgcactaaataacttagttgaagagagagggctggctaaaccacagaaaagttgtttctgttgtgttcagcacattaaatttgctggggtaggtgaagacgatctttattattctaaaaataactaccggaaaacatgccaggtaacgtgtggttttcaccgcgtgggggtgacgatcaatgagaatttatgtcagtgccctcaaaaagcctattttgtgtgttatgaaacaactccagtgtgtcccaaaaaaagttaggcattttaaagtattaaaatgtataccttaggccggacgtggtggctcacgcctgtaatcccaacactttgggagacggaggcgggtagatcacctgaggtcaggagttggagaccagctggctaacatggtgaaaccccgtctctacttaaaatacaaaaagtacccgggtgcggtggcacgtgcctgtagtcccagctgaggcaggagaatcgcttgaacccaggaggcggaggttgcagtgagtcgtgatggtgccactgcactccagcctgggcgacagagcgagacaatgtctcaaaaaaaaaaaaaagtatttcttaaaaaaaaacactaatagttcattagagtaacgtttcataatcgcaatttattaagcaattattatgtgccgggcacccactaggaactccatacatctacaaactcgcgatatagacttacatgatatgatggtaatattaacgagaaacttcaaagtaattcctcaagacgttcagactctcagctgggtaattaagaatctgtttggacagcatgttgtaggagggtaaccctcccgaacaagttaaataagcctcctactcaataagcccttttgttacaaaacagcaccaggagtgcctaacccacagataaacattattactctaatgtccatcctccagagagttcaaagtgttttacaaataacttttaggcggtgaaagcttcagttcctactaaaaccagcaggagactggagtctacagaaaagagaataaaagaggcaaataaaggggaagaaagacaagaagagagggggtgtaaacaaaaatgagggcctagcgaaacagccaagcactgaccacactcaatcctcagagcagaaacccaaaccttttctcatagaggggc

SEQ ID NO: 316681 - DNA, 4001 bp, Homo sapiens
aaaaactcagtttatctcttatccccacttaaaggtcttccaccaagaatatactgcctgtgaatggtaggatgttatttatttcagagttttgtcaatatttccgtcctccaagatgtcaaaggtgaagtctctgaccactaagtaatggctctagagagaacagatttctggacttgctacctgaaggccaggcagtcagggaagataaaatggtaacttttattactgagctctcttacaagttgaaatatgcccagaaaagaggaagaattaagaaatttaaaagggggagtgagatcttcacaagtctgatgtgactttatggctgttttctggctttttctaatacatacattctgtgtgttttattttacaatgcccagttcaatagcgtcatccatttttgccctgaaggattggttttgagttctaattggaactggggacagattgtttgtatttaatccgtctgtacatcttctactcagtaactgagtaaagctcttaaactctactgcaaatatccctggattccaatgaatttgtcttacttagtagacatagcaacacatattgttttatttatgtatttatgtataagcaaagccttaacaacttttatattccaaatactcagcacgatttatttatttcctttttagaaagagatgaaacaatgatgccgtggaaggttaaaaaaagagtaacataaaatgtgctggaaacagaaattacttggagaaattacttgtttaattcaaatgaattaaacgagatatagtctacaaagaagtctgggctccctattactggttgatgctgaaaatctatctaaggaattcagagtaacattgtctcccttctatttgggtacgtataaaataaatgtagtcttaagtattttctaaaaacgagaccatattacatgtttatcattaaatgttatttttaaaaacatttggacaaaatcttttgagtggcttcaaattcaccaaagattccctaacgttttgtgtttacaaatatatgtatatattttataatatatatttctaatatgtaatatatttataaatattttaaaacatattttatacatataaaatatatatttttgcaaatatatatgcttattattaaaacctatctttgtgcgcctgttacatagggaactcctataagatactagaggaaacaaacaaggggaaggggaggatggataccaagagaggaaattgaattgtacaaagggtttttattaattccatctatttttaaagccagaaagacatactaccagcttgctgtctcccggcacaaacatgcgcgcgcgcgcacacacacacacaaacacagacaggctacatcagcacgggattcctgcgatccctccccgccccccgcagccccctccccgccccccgcagccccctccccgccccccgcagccccctccccgccccccgcagccccctccccgccccccgcagccccctcccctggcgcaggcagccgcgtccgtccttcccgcggtagctccgcgcacttcctcgcgaccgcatcacctaccttgctgggagctcaagacagatgccggacagggctgctgctccgaaggaaaaggctcccaggaccagcagtaagaaaacgcaaagaaaaaaaggtggtagtgaggctcctttactttccacaacaaggggaagtgttgaactctatgcactgggctgctccgcagcgcgggtttcggaggaaataggcggccgagagagctgcgcctgcgatgggaagttggggggattcccccagccacccagccacccccgccaggctcctctctggtccccgccgcagccttgacagctcccctggtctccgagcccctccagagccctgctggtttccacccggagctgggctgtgttgccacatgcacttgagaaatcctagcagttgcgcaaagagtcccagaagttagaaagggtgattgtgtgtgaatgtgtaaatatacagtacaagaggctggaacaactgagtggggccaaccctcagacacagctcgaggtttcagatttcatttggcaactggtagcttcacaggactcgagccgcactacaggggaggccggcaggagccccgccctcccaaagcctgggttatctgagagctggagctacaccgcctggcgccactgacagaatgcgccctgcctggttcctccgcatctggcatcgctcgttcctttcaagtgcatcatagatacttgttggccacagatctggggctgtgggcgcgagaaggttggtgaatacatgtctcctgccctcaaggagctctgcatttcattggccaaaccccatacaccggttttacttgcttctaccaactctgtctcgctaacattttatttctccaattagaattacctgggccattaaagcaatattcctggaaatgcacatttagatggatgctctctaactagagccttagagaaattcaaagtataattactttcttacggtggtgtaagaactctcggagttacacaatatgggacaaaaggacaaactagtaaacattgttttgatgcaggccgtctcttcccaccatcaccacaatgtctgtttcaaattgtgatcttacagttctggttacctggcatgctgagtcaaattatttcaaaaagctttgtaaagatctctgttttagaaacccacttacagtggatcagtcatgcaatcctagcactttggaaggctgaggcaggaggatcgcttgagcccaggggtttcagaccaaaattggcaacataatgagactcctgtctctataaaaaaaaaattaaaaaaataaaaaaaaagttgggcgtggcggcgtatgtctgtagtcccagctactcaggaggctgaagcgggaaaatcccttgagcccaggaggtcaaggctgcagtgagctataattgtgccagcgcactccagcctaggtgacggagtgacacccccgtctcgaacaattactactgctactactaataaaagaaactctcttttagaaatcatcaccagatatccttaagacacagaatgggggtgtcctcactagggatctccagtgagagagggatatggaagaagagcaaatgtttagttttagaaacaccaaaaataaaaggctgagtggacactgatatgtttttcctttttgtcctctttctccaagttcttggagaaacgaatctaccccatcccatgctgaggtcctactataaacttgattttctggtgggagaattctcagccctttaatgaatcaaattaatttgtgtggggaaaaaattgcgtttcatatttcattttaaaaatatgtatggaattcctaagctagaagtaatgtagcttattttccaattggtgggaataaattaccttcatcaacccacatggccttacatgttctagcaacaccctagcaggtgaatgctgatgggcagtttcagatgaaagctggaaaataacattaacccaaatgaaatttgcacacatttgatggactcaaaagcctcaggaagacaagtaccaataattatgattcaagatggggacatttaaaaaaacaaggaaactgtcatgtcagtaatttatttcagggtctaacaaatattaccacagcagtttagtctcaaagtgatacaaaactgaactcagggtggttactgggtagtccctagtccaaaagattaagacacacctctaatacacacacaggctgtgttcaaggccttttccttcccatcttctggttctgtctccaccctttccaactgatagcacttcattggtgtgtgtgatatatgtgattatcttaagctagaaagtacaacagaaggagaggatggttgtcacttggggattagacagttgagaggataggaaaggagttatatccaccaatacaagccccttcttcccctcctacttagaaagaggtggaccattgc

SEQ ID NO: 316682 - DNA, 4001 bp, Homo sapiens
aaagttattgcctcttattcgtccataattttttataaacttgttcattttctggtgttcttgctcccagcacaaaataatcatgaagaggttgttgaggttgaaggaagttattagagatatgcaaactgtctacaccagtaagtaaagaagtcactcttcaatatggaaggtggacacaggaggaaaaaaaaagtcctataaaaataatacaagaattaaaaaaaggctgggcgcagtggctcacgtttgtaatcccagcactttgggaggccgaggtgggtggatcatgaggtcagcagttcaagaccagcgtggccaacatggtgaaaccccatctctaccaaaattacaaaaattagccaggcatggtggcaggcccctgtaatcccagctactctggaggctgaggcaggagaatcacttgaatccaggaggtggaggttgcagtgagccaagagcgtgccattgcactccagcctgggcgacagagcaagactccatctcaaaaaaataaaactaaaaaataaaaaataaacagtgattatgtgaccatttgatctaagaattaatagccttatataccatgcaatgtattactgcattatagaaaaattctataatatgtatccatgagtaatactgagaaattaagggaacattaaattgcatttagtcccctccagagagagctcaaaacatatagtggatctcatgaagagaatgatccacaagtggctaaattctttgaaaagcttttcaagttttcagtggtaaaagtttactttttaaacttcactttatggaaaattcacatatattgaaacccttaatgttctccattgttgttttattggccagcagcaaatattatataccagctagccagggcctcggggaaagagtgacacctggaatgctagggtacacagggatttttttctgtgccgcattgggctattccccttctgctctggaagaccctctatggatcggtgacttgaaatctttttgaaaatttcactcttcttagaaatgttcctccattaaggtgaatgagcttacactaagataagcttcattaaaaaaagaaaagtaggcttattagaatttttttaaaaaataatgaataaagagaaggaaggattaaaattaacagctaaatatagaagcaaactggaggcaaaaaccccaattcaaaataactgtgtttcccaggtcagatctaccaagctgtgatgagtttagtgagccttgactgaatcagttaaagtgcctagactgccctgcccaggttctcttgtctgattggctccatattagttctatatttcaagttgaagattcattaagctccccctcctgcccagtcaagaacattctgtacattttgtaatgctaaagtatatttatctttatccaacacaagcaataaaacacaaaaaccacacatgacaagatacaacaaagaaacaaacctaaactaagctttaaaataaaacaacagcaacaatcatctggttcctaaaaacactaacaaaacaaagcaaaatccgagtagtttcaaatatcaacagccagaaaataatacagttaaaaagctaaaatattttcaagggtatattttctctcaaaatagaggtgaagagggaggaaaaaaaggtcaaatgaccactaaatacttgtccccaaaacaaatgaaccctgaagatttaaatgagtaaaaacagtaccttataagtcactggtctggtctacgcacagctgttcccagtgccgactcttgtttaactgtccactgccttcagtttaaagttaattcttttggcaaaaaagtacagagcttgtctggaaaatgctgtttggacacaaaccattcctttcaaagcggtggtagctatatttaagttttcttgtagaaggggatataaactcttcctgtagctaattttctttctcctccttctcagacttagtcagtatcctcccatcccatatattgaagaaagagacagagaggggaaaaaaaacctacaaggaaatataccttaaataatgtagtatttgagcatttagaaacaaaacaaaacaaaataagaaataggaatcatagaaagctcatcaggaccttaaatataatttagccgggtgaacccattttgtagataagggaagtgaaacccagagaaaaatatgatttgtataaggtcactcacacggctagttagtgccacagttaacaaataaccaggtttcacaactcctgcttcaatgctttttccactacactaacatacctgaggggaaatagtttgccttttcctctatatccttgcataataagcaaaggaattggcagggagcagtaacacaattaggatgtgagaactgtctcagagaaaacatttcctttggatttaaaatccttaatattgaaactttccctttaatctccaatttctttgtatattaggaaataatcttttcctttgctgattgtccagaatatttttacaactcaggagctgccatgtttcaagggatgctaacatttattagtccttacagagtactgcttcagtaaggcatggtgctgtgacaggtggcagaataagtgttctacctagtatcagtgatactactccacggctcttaaactagacacacatttgctattatcacaaatccccactttcaatctatcaagattttttgaatacacacatttggttttgattattgttgattgtataatttgttaaataaaacagagaagcaacataacaattttcattggtgtctttcatgtatttcctatttattggtgaataaattatgtttttctaactgaaagagtgatgtgcttattataataatttttaaaattacctttttgaaatgtattcattcattcattcacttatttaacaaatatttatcgaacattcataagatctatctcatccctcccacgtgaaatagtgtaacagacaagcaatagcttccttagaaaagtagggaattttcaaataaaatcaaagggtttgcatgggaagtaaggtcaattctctatgactacttctgtattcattctcacacttcaaacatgtgtccttgatttctttatatcctatcgattgggttgctccaatcttaaaacatcctgcccagatcaagtaaaccaaaatatgaagtggcccacactgaaatcactctggccactattaatctttccatttgatctggctccttaaattttaaagcaaaatcttctttacactttgcaattccaagacacaatgagaaatgctcagatcattcaaggcctattttcaaactgttacctattctttaattcagaaatgcactgtttggttttaatatttctcgtctacttttaaggcatctactcttgccctgttctttggcaggaagcagtatgcttatgaccaaataattataaaatgtaattaatatttaaaatgacaattagattttctggaacacattttccaaaatgttgagaaattaatgggtatgatagcacttttctaatgctgacaaataagcaactgagattcaaaacagaaatgttgagaaagaaattttggaaaaccatggtttttgacacaatgacagcatcttattttccttttattctcatttgattatgtctgtttgagccctatgcaaaggttaagcaacattaatatgtcaaatgtgacaagagttggacacattgatacatattacttgcatttgctaaaaatattctgtattttccttttacttcttaagctttactttcgatattgacagttttacctttagtccattagaaagagcaggaaggaaatatgagtaagaccttgtaaggtaataggccttgaggagacatagagttttacatggaatgagtcaaggtgattcagagggttaaatggctgcaggaaggaaggaaagagtgaagagaagtcacagattgtttagaacaggagtgg

SEQ ID NO: 316683 - DNA, 4001 bp, Homo sapiens
tttcttggctgtatacactgattatgattcatcaaataggtgacttactttctagtgtttcaacatagaagctgaccatgggttcacatggatgccacatctgaacatacaagactgtagtcctcacagagggatgaatactcttgtgttgataaaacagttacacaaggccttcctgtacatcttttcagtcatggtgatagtcatgttaaactcttttcaagaagcagccaaattttacatcatgaaaagccaatatagtacaggttcccatatagaaatgccaatcatcaattctttgtacacctcaagttccacatctgtgaaatgaaactttttcttaactcgcatagaaagcattacagtgttagagtcaggtgtttctgctcagcataccacagtgctcttacatagagtctgaaagcaaggaaccatgaagagagtgtcccaggaacttggcattccacatgcatgtaggaacaggtgacgatctagtttacagtattagaatcttctttcaaaactgacatactttaaaagtgggacagataattttaatattatatgttctttgttaattgttttgaataattttaatgttcactgccttttaataaaatttattttacttcattagtttttaaagtctatcaaaatggatatcaattttaaataaaaaatttaaatttccttttttccttctcattttattaatctcagcaacagaatccaaattaattaaaactgacaagtacattccacaggttgacatgttttattaagaattcttgttcttggcttcatttctgctgactctaaattttttaagtatgctattgttctttcattagacataaaaatttgagcagttagagtaattttttggtattccctcataattattcctcatttcaatgtattatcttctttttcattttaaaatctgatattctttttcttcttctacttacacagtaccaaattcctatacttttcccttttctcaaatacgagtctcagaaatacaaacctcctatatatttatttagatatttaaaaagtatctcctttttatagtttatgggttcacttaagtagccaacatacaaaactgacccacgattaaggtctgttaacccaagagcatgattttaattcctattgtaacagactcatagtgagtaatactctgcgttcccatgtacttctacaagcttacatagcagttgtattgtcctgtgtacacagaatgtaaggttacaaaattcaaatatgcggataacaaaagctttataggttgattaagttaattgtaagtacatcaaaagatagcacgtattatttggttttcttttggctttttttaaaaaaaaaaaaacacacacgcagacacacacaaatggccaagtagttgttttcattttgacaagcaattacacaaaaaactcccactgcttttgtcaacagatcaaatcctaaggcactctactctctcaaagtttcaaccactaaaatgtgggtaaagcaaagaatacaccacagcaagcactaaacaaatatagcaatttagatttttatcggaagcagtttttatattccttcaaattagcactggaattctgtatatgaacagatacatcatgtggcagcagcgattaacgaaagaatccaagaaacactgcactataacgatcacatttcagcgtggaagaacagcactatgtccaatctgttgccacaatgtagacaccgtggagagctgaatggatcatgacagaaaacaagggtataaataaaaccgcacacagtctaggtcctgaatttgtggtgatataaatatccccaaattattaaacacaatcaacaacaatacctggcaatttgtctccaaattaagaacaaagcacccagctctcaccttgcacaaacatacacttcagtggtcagtgacaaatgcaggctgcacttgcaagctgggagacagagcagctgctctgtcctgagtcgcttaaagcacattcgagcccaactcaggtcctactgtgtttgctcactgcagtttctcccatgactccatcacccaggaatggaaaccacggctcgctccccagcactagtgggctccccagctactgagctcaggtaaaaacgctgagtcctgcaaggtcaccacaaggtgaccacaagcaaaaggagtgtacagggaagaggaggggctgtcatggaaagaccctaaactccagacaccttgcctttcgagattctgaactccgtaaatcagagctgggacaataaaatctgagaatcccaaatggcaccaagccaagcaaccaacccaggggcactgtttaagcaataatctctctctctctctaaacacacacacacacacacacacacacacacacacacacacacacacacacacacacgggcagacttcagtgtagctattctaattgcccagacatccctctcaagcccaaaagttgtttatttttttcaggtttccaggtaacagggcttaaagaaggatcttagaaaattgaagtatttgccaaaatcaaattaattctaagagcaaaatgatttctggcccataaactcatataataaagtcttgcattttgcatacatactggaattatgcaaacttccatattaaaatatagtaaagatgtatttatttcagagctgacagaatcaatttaaatttctcataaaaattcctatcatctttcaaaatcagtctcgattatgcatgcacactttaattttgggggtcttcaagaaggcatttcttgccaaaaatataatcactctgaatgtatatattataaatagatacaaacgtgttaataaatatttccctgtagagtctaagtttttatttctcatattttgatcttcttagaagtggagaaggaacaatttttaatcttgcaagtgccttacaaaacatttcttcttagttgtatatattttttaataggtaaataatgacttaactgaattttagattgattgcatgagcaagaaattattctcaccctttagacaatttttttaacctccttctccaaccaccactgttcattagcaatttaacctcctaggtgtcagttttgtaatctataaaacagagatttcttactagtgcctgttttgtctacttccttggctggtgacatcagggtgaaatgggacagagtgtaggacaaaatgctttctatatgtgcagtacttgaaaaaatgcacttgctgcatttcctccctcttatttccccagtgagtactgggactagtaaattacttgctgcattctcaaggagggcttcttgggcttcaaggaaactgcttgtttcaagtgggctataaatagagttcgagattttattgaactgctgttctctttgtggcagatcttgagggcagccaccacatggccagagtcagttaattgtgagcagcatgagccccgtctagtgtttgaggcagaacaagactagtcaaaattctgggagaaaatgctcacgtgcatggttggttacatagttcgcctggcatcctgttgtactcctgtgtttgagggggatggagaaggggattaatgaaggggaaaggttagctatggaatgccaagttcactgctgagttattcagtaacaaatgcatctgggcattcatgctaatttctctacaattacttaagcattttttagaggtcgagttgtggagaggggcggggaacagagggagggagacaggtggagaacaggaaaggaactgaaaatgtggccacccgtcttatgagacacacagggctgggagctgggaactttatgtatattatctcagttagctctcataataatcctaggagatacctgttattcttattttacagataagcataattaacctgtacactgttaaaggtcaatggtgaagttagaattacaatcaagatctgcatggtctagagttccatagtctgagta

SEQ ID NO: 316684 - DNA, 4001 bp, Homo sapiens
aaatttctgtcattgttaatttctctaccaatgatgcaatcctatggtattcagaaaatccctatagatctataaaaatatgagacatgcatctctcatttaattatctttgtggatgagataggaatgtaaattaacacctgaaatccttgctgataatatatgatggtgattgttgccaggtcttagctacgcaaaggaaagcactctgcaggaacaatggtttccttaaaaaaaaagttcccactgtattttgtaattttgatttttcttatttttttttgttagttactaactagggaagattaattaatgggtggcaaatcaaaaaaaagatgtgggggagaaaaaacaaccctagatgtcattcaactcagcacctgactaaattattagcttactgcacatgtcattaacattataattacttagtttctacttaaacagccattccatttaattattcttattttaaagcaaaaagatatttataaatattttgatccataaacttttcctgaaaacattttagtttacctattttgtattctctaactccccccaaataagtcaattcagaaatgtcttagtttcttttactgatcataagttgttctatgttctcacccctgttcctgatagttctatctttgccctctcccagtgccaccttgtgatatatttgaaatgtcagggtgactcctattcccagcaaatattcatcaatatggttgaaagcctcttgaaaatgggtcagcacgaataattcgattatcaaatttttctcaacaggggaggtgaggcaagcacaggcagccagaatcaaaacaaggtgacgggaacacagcacagggatttgcgagggccctgttttgaggggtcagaacatggctgcttgatttgggtctaggaagggcccaagatcactctggcccctcctctgaggacggtcagcccagcttacttagtcccctgtcagtcaaggtgatccccataggatcactattctttaagccccacctaccccacctattcacagacaataatatacacatttaaatgaacctcagaaaataagtatagacaagcaaggatacgcacaaatcactcttgtacagtcctaagctcttggtttccaaactcccattttatctgagcataaacagaccttaaagcctaagataatattatttatatttataaaaaggacatgaacatattatctacctacctttccgaaaactaaaacaccgtttgattcttctgtatgtagttttagggatgaaaggagttgaggctaaggcaccagccgggcaccccccagaattccggtcttcaggcatcgtacaggcctgaagttctgaacccggttttggcttcctttaaaacctgcctctgagcgaaacccaacagccactcctcatgcttgtttacttgttatttttgaagtgctgatccctagaatttgaaggttttgatcatccaggtcctggcttagggataagttaccacctctcatttactcctgtttagcaaaaaaaaacttccttttctcttgcctaatccagggagtttttaaggttttttttttcttttttttaagtttctgcagacattccaaaatgtcacaggaaaagaactgcagcaagcaagctaccattcccattcaaacagcaggaattggtttttgcatttttttgtttttattaagaactgtcttctcagctggactgagattcctctggaaaggtcagcaaatagctctgtgcaagaggaaagaggaacaatgacaaaaagtcccctgaggaatatttcaggactgtccttgctggctcctttcatctgagcaagaggggaggaaaataatggcaccttctccagaaagcatttcagtgcatgatagatttctttcaaaggacccccctgcttcttttatagcaccccccatcctttgatgctctctgcaggtttctcccctttcctttctgtcttcaaactcccgagagaatcacaacgtcagaacagtcgagtgcccattccaagaggctctttggatctgtggggggaggcagctttgcagggagcatctcctccccctcctcctgctccgtctccccttttctcaatgagaactgggagggagctggcagggctgcggttgctcctcaccaaggctgtggctgcggctgcttccagtgcccgccggtcacattcagcaggtgcagtcacaacaggatgaggggaggagggagaatgccacgctacggtacaaactcctttctttttcttttgactttgtgttgacttcccagctcttgtcttgtgtagcacttttacagctggctggctcagcccctccagaaatcacagggcaccaaaccaacccccagggggtaaactttttgccccttcatacctgcatttattcccctcccatacaagttttactttctttcaaatgatttgtaattgaattcatttgtgagcactgatttaacatgcataccctgaaaacatatttatacatgtgtatgtgtgtgtctgtaaaacagaaaaatgtttaaaatccagtggcaaagagtctgtgggtaaagctgcaaacacatcaacacatatttgtatgtgtatttacacacacatatatgtttctctaggcatggtttgcaaaccaattctgttttcaacattcttccatgctcttgcccgtactttctgcaccccagcccccatgtccactaagtctctcagtcctactcactgaacaatttacttgctgggttaatcattcatccacctggttgttccatgaactgatttggaatgctagtgccttaaccccaactgacccccaaggcctctgtgttccttcccagccatttggcagaagctttacaagaccatgaggagtattaaaaaggtctttccattaaaaacatcattactctgactagcatgcccatgtaggtaatcttttgtcattgaaaggattattattatttagttctgccctgtggttcaaatggtattttaccttctgtgtcacagcacgctgctaagaaaataaagaaccacaaagtgtaactcagcaccacgaagacagagacagtgctgcccttcaagcacttcagccaatagaaaaatccactgacctgaacactgatctacagggaactcctgtaatcacaggattttcacaggaagtgaaagcatttttttcttctaattttcttatttcacaagtgagtaaaaccaaaggcaagggaagtaaaactacatatccaagattgtgcacttggtctgtgcacgttgcctgaccacgttgcctcttaattaacctctgtctgcctgcataccaattactcattgtaaggattattcacaaatagtattcttactgccttgctgggtctctgaatcaactcttttcattaggaggcagaaatatacaggaaagacctgattttggcagtagctaacattaggctaagcaatcagagctacaagaactattgggctgggcacaatggctcacacctataatcccagcactttgggaggctgaggcgggtggatcacctgaggtcaggagtttgagaccagcctggccaacatggtgaaaccccatctctactaaaaatacaaaaaaaatttaggtggatgtggtggcaggcgactgtaatatcagctactggggaggctgaggcaggagaatcactggaaccagggaggcagaggttgcagtgagccgagaatgcgccattgcactccagcctggacaacagaaggagactccgtctccaaaacaaaacaaaacaaaacaaaaaaactattaatgaattttcactctcctcagatctcagattccggactagacacttccataaatattgcctcaaaaacaattgaacagaaacccagtataaaaatacacaaggaaggacgggaggaaaggagggaaggaggagggaggaaggaagaaaggaaaggagagtgcgagggag

SEQ ID NO: 316685 - DNA, 4001 bp, Homo sapiens
aggtttagaaactaaatgtgtatgattttaaattctcatggtacatattcatcatggaatactacacagccagaagaaagaacaaaatcatgtcctttacagcaacatggatacaaccggaggccattatcctaagcaaattaatgctggaacagcaaaccaaatactgcatgttctcacttatgagtgagagctaaacattagacatacatggacataaaggtggcaacaatagatactggagactactggagtggcgagaaacggacagaggcaagggctgaaaaaccacctactgggtactatgctcagtacccaggtgatgagatcatttgtaccccaaatcgcagcatcacacaaaatacgcaagtaacaaacacacatatataccccctgaatctaaaataaaagttgaaattttaagacatccattctttccaatgtatctattgcttggagaaaaattaatttcaaagattaaacaatgctctccctcattttaaaaaaaaagtatttgaggataagattgatgctgtgctttagtgctgaactactggtaattttttttttatttttacacattaacttatagtaataatttttagatttaatttaaatgcatttaatttaacttatttaacttaattaatttgcataactaaatctaagctcatatttgtggaaagagatttgttaaatataagcatgtcctatcggtctttctgacctcatcacagtttttaaatccaaaacgacagctcacagtgggatgatgagagttcagacacaccttgtgctaaaagcaggagaggcaagttctggaggaccacataacaagtaccgaagaaaagacttaaaatgctgcccaatatcaacatcaaaatgaaattttactagaacaaatgaccttcaggaaacaggagagaaagaaaggatagataggacaggatatagattaaggccctgaaacaaatgatgtgctatcataactgtgccaaattatctttgtaccatcacaaaataaactgaagttatttcctcaaatgtcattcaaaataagcatgctaaacatttcttaccatatttgagtattattcaatttactcaaaggaaataatcacctaagtgaatttcagcaaatctttttataccgtctctctgactataacattccttctttgtcacagacacgattatagtttcatgcccctatttaagataaccacaatcatagttcagtaccattacctagatatatctcatggtgtaatatcacatatctacccattgagataaacaatcttttgtaggtttctaactcatttgctttccagtgtttcccacttcttaagttgggtagagaagggagaagaaaagaggaagttagaagaaaaatgattaccctcaccaggaaaaaaaaaagaaaaacacagcaatattaagagtaattcggaattgactctttaacattgaatcacgtaataaatttttttccctataatttataggtcacatttactttcatcttcttattttgtgggaaggagaggtggtattcaattttcccctctgccttgtgtgttttctttgcaattggaaacgtagcagaaatggagctgggagtgcagtaactgggacaattgatttctttttggttaccttgtaatttctggttgtattcggtcctgtcagattggctcctcctcaaggtgccagagtggtccccagaaacactgctctcaaccacagtgtcagtcttccttctctccagcatatagagtctagacctcaagaaggccagattctttttcttggtgaccatgttttctttcccagtggcttctttgggctccatattaggcaaagacaagctttggaggcttgcaggcaatggctgattgctaaggtgcctcagggtgagggttaaagctactagagtgacgagtttatctgctcccttctaactaaaccgcttcactccagggttacctggctgtgactgccaccacctctacgaagtcccagagctccacccacatgaggtcattcttttttaaacctagaatccaacaggggaagctgccacctgttacctgagagacttgcagcacagagctaggcaaagcagggactgtgctgtcacatgctactgaagcaaacaaaaatcctattgtatggggtgaggggtggggaaaaaggaaaatgaacaaggtgaggcagtgaggaaggaagtacacgttagcataacccgccgtttatgggtttaatgtgtgcccatgggtgtgtgcaggtgcactcagggcactgtgttgtggtctgctgcctggaggcagaccagggcttgtgcgtggcttttggctagagttactcacaggtgacccacggagtcagtgcaggggctatgagaatttgcatttgcatcaaaacggtgagtacagaatcattttcagtgattactgtgcacactcaaagttatgcttctgcctttaagcgttgaacattcagcaattatttactgaaaacatacttgccaaaccctgatccgcattcctgaggaaataaggattcacatgtgagagtcatctggcagcaggcagaagaagtggaggggaatgcccatagaagcctagagccttttcagatttctcactctccacaggctgcccttgcctgaaattaatccttccatggtcccaccctgtccttttatgttttggtccttaggaaaataagccccgtgtcagggttcagtttctataagatcttttccctgtccctttcatagacggagtgccagaaaagggcatcccaccttgggaatttaaggagaggaaaaatgtttgaaactgaaggggcactacacttctagaaagtagaaaggatagggcagggattaaaagagagaaaggcagacagtgataggcctttcattaatttttttgaagttgtttttcctcatatttcctgagatctctcaagggaaaaattctaagaagctctgggaatgtgctgagtgctctgtatgccttcgttaaagaaaagaaagaccctaaggaggaaaatggattctctcctattgtaaagggaccaccaaaatccagctctgtgctgaccagtctgaatcttgcataacttctgttggaaaagatttataaatgaggagaaagatgtaaaagtcatttcccagctcaggatgtgtgtgctcaatatagtttgcataattatcttaaaagataaatgacacatcttcacccactatggagacatctatatatagcttggcgtattgaatggcttttatttaatataattgatagtcttttttgaataaatcctcccaagtacatttaataaatacttttaaaggcttatttacctctaaaatataaaaggaattttttggatttatgtcaaaatgcctcaattgtgttcgaatattatatatgtatgaatgtatgtatgcatatacacacttatttatattcacctggtaaccaccagggatttatttagatacggtatcactgaaaaaaaaagttcaattaaaactacaggacttaatgggtaacatgaggtttaggacagagcactcagaaactttgtcaatggaccataaaaatcagatcaagacctaataaaaatggtagcaagaatttacacatgataaatgcttaagaaatgcataaatactacagcaaatataaccctttatcttgaaaaagacacggcatttgcttgtggaaatgggcctcagaaaggtcacagcttaagggttgtgaaatggcagaagaagcattatttgaaatcgggggaaatttattacaccagatgtggatgggtgtggctcataactcaggcagtgaactgaggtcactggtaaggtttgaggattgtacctgtgtgagttttgtgtattcttatgtggctcaggtcatctgggtagttttctgcattcgactagtgtttcaagtagacaaaatcacacacaaacaaatgcgaaa

SEQ ID NO: 316686 - DNA, 4001 bp, Homo sapiens
ttgtaaaacagttcagacacaaaatgtgattctgaacaccgtttttgtcaaaagttattcctttagccaaatatgagtctatgtagtctgtgttttaccagagatcaaatctctgttaatccgtggtggctcacgcctgtaatcccagcgctttgggaggctgaggcgggcggattgctggagcccaggagtttgagatcagcctgagctacatggcgaaactccagctctgcacaaaaatacaaaaattagctggacatggtggcgtgtgcctgtagtgccagtcactgaggttgggagatgggggcggtgccaggctgaggtgggaggatccctccagcctgagaggcagagtaagaccctgtctcaaaaaagaacacacacacacacacacacacacacacacacacacacacacacacaactgtgttaatcattcataattgtttagaaccagagcgcagctctaagccaaggagccagctcaggaactccaggagcacagagaccattcagctgacccaaataatgccaagtttctaagacctgtcagttaaaacttttccgccatccattcatggtactggtggtctgaaaacaactgcagcgtccccaaacacctcctgcgttcaggaaccctgccccttctgacaaagaacgcattcaatgcaaagagggcctgcgtgtggggagggttcggggctggtttctaaatgtggtcaggtggtctgtgcgctagtgttgcgcgctggacagatctaagggcagtagaggggccgttccccatgtccccatgaagaccgagatctcttgtccctcaacaacagacccgactgaggttaagacacaggggtagcgataagggctagggtgggcagggggcccgggaaaaggggatgggtcgttcaaagtttggcgcatctctttcatccataggtaaatagccctcagttgagatccattcgctcccacgcggtcgggggcctccgacgtaacagagacagcgctggggtctgaacggccgacaaaagccttggggcaaggggtcctgggcactgggtctcttaccagcggctcgagcggggtccttgtcaaggtgctgtccttgttctcccctttctcttcttgtcccttaaattgttccttctctttgtttgtctccttcccttgctttgtcctcttttcctctttctcttttccctttctcctctcctgcttctcttgcttttgtttaattttctgctccacctcctttcttttcactttctcttccctacccttttctccgattttctcctcctgcgtctccttttccttctctttcttcttcactttccccctctccatccccagcgccgcggtttccttccctcccgccgcgtgcccgcgtgctgagcggtggctctgggccccaggtgtggctcccgaggtgcacgcccgacagagacgtaggccccgcggcgtagacaacccgcgggcgctgccaaccccggcaccgccgccaaccgccgcttacctcgcggatgcagggcttcttgcagccgattcgctgaacccgcaggggttcgcaaagagggaagggcggaggcgtacggatggattgagcccagccaagcgaaaccaagaggtcccaaccaggacgtgggacagttcggcggggtatatcattgctgcagaaaaagcgtccctagcgcgattacctcgggccaggcagggtggctaagagccttccacgtgggccgcagtctaagcaaccttagcgtctgacgtctccggcttcaatcccgagaccggccagcctgtgtgaagaacccctggggcgtcagaatccagaggttccgggaggattctcagccttccctcagctcccaaccatgagcctgtactgctcatgtcatgtatttctccgccctctcccgagtaaactccgctaggagtgtctccagactactacccaggattattagttgactattacccaggattattaaagacaaatagaagaacgtgaatgggttccattgttttaagttcctgttttgtttttgagacggagtctctgtcacccaggctggagtgcagtggtgcgatctcagctcacagcaacctccgcctcccggattcaagcgattctcctgcctcagactcccaagtagctgggattacaggcgtgggccaccacgcccggctaatttttgtatttttagtagcgacggggtttcaccatgttggccagactggtttcaaactcctgacctcaagtgatcctccccgcctctgcctcccaaagtgctgggattataggcataagccgccgtgcccggcctgtatttcactttaaaaaaaattattcggagatagcctgccaggatcacagctgctagtaatgctcagtattaaaaccaaaaccaaatagtctagtcacttctaattatctaataaatggtaaataaggcacacgaagggcttttcaaaggtggtattgtttctcaaactggctaagaaatatctggagggttccttttatcttgctaaactgaactctttagtatatttcagtttagcacaattatatattttttgagacagtctcgctctgtcggccaggctggagtgcagtgacacaatctcggctcactacaacttccacctcccgggttcaagcaattctcctgcctcagcctcccgagtagctgggattacaggcatgtgccaccatgcccagctaatttttgtatttttagtagagacggagtttcaccatgttggccaggctggtctcgaactcctgacttcaggtaatccgcctgattgggcctcccaaagtgctgggattacaggcatgagccaccgcacccgtccagcacaattattttttgagacggagtttcactcttgttgcccaggctggagtgcagtggtccgatctcagctcactgcaacctctacctcccaggttcaagcgattctcttgcctcagcctcgcacgtagctgggattacaggcatgagccaccatgcctggctaattttgtatttttagtagagatggggtttctccacgttggtcaggctggtctcgaacttctgacctgaggtgatctgcccgcctcggcctcccaaagtgctgggattacaggtgcgagccaccgtgcccggccacaattatttttcaatgtaataaacttattttccttcattgtatctgtttcaaatagacttgtaaggaacaatgaatagcaggttccagaaggcttgagtgatgcaatgatatttaaggttggctgttcccaatagcattggaattgctatgcttaatgactttttcaaaggtttacttctgtttatacacacaccaagatgaattttcagtaagtttacacggggttctctcaatcccattagattagttttatgggtttgctaagagggacagtacacacaattttgatactcagcttaaaagaaaattcttggttatactaaccaggaagtcctccataaaatgccaacacccaaaacaccttaatccatattcactgctaaaatattttattttaaaatgtaccacagtgaatggatgtatccatactggttcttataaatgtacacatacacatccatatatttgacaaagtatatatatgaactggttaaagacctatccaaaagaggaaatatttctagaaagttcatgtgtttatacttcatttgacaattaaaacttatttgaactgatgaagttttagttgcttagcaatgactaataataccaatgcctgtcaataatgacaactaaattgagaactataaatttcactgctgtgccttgggtcaaaattttcaatgatggaatcctaaataagtaacagttattcctataatggggtatatattcagaaggaataaatacctgccactattaccaaaagactgttctctgtagagctcaaaaaaaggattatgccacaatacataatttttatttaaaaaagatctctt

SEQ ID NO: 316687 - DNA, 4001 bp, Homo sapiens
agcactttacttaagcatccaaatagtctgatttctgttggttagtcagaaaattccagacctgtgaagagcaacagaaaactgcagatgaagtttgactcctcttgagcacttaccattgtatttccttgcattttgagaactgctttgctaattaaatatggccttcattagggggtctcataagagaaaatgacccatcaaagaccgaagcagagtcatacataaactggtcatattttacattactctatatctgtttcgttggttcattttctctgataattctagatttaagaatgcaccaagagtaaaaaaaatttttgatctttcttatcagtgatggtgagtgtgaattctagtatgacatctgaaacaaaatctgagcatgctcaaaagtagaatagatttgaaacaggagaccatttctggaaatctctggtttgtgggtatttatacgttctcatctcatttagaaacttataattggctctgtaaaaaggaaaactagactacactagtgactagaaaattaagatcattaacattgtatccattttaacacggtaccccaataccatacatcattcattcattcttcattcattcagttgttccccatactttctgttactcccttaaatttggagctggatcttcattaaatgcttaagatttctccaaggaataaatataagaagtaggaacacttactttccagtaataaactgactcctggatggtgtgcaaataggctggacatagtagttctccagtttaactccttcggcagcgagcttgtcaagagtaggtgttttaatctcagatccgtggtaacccacatctctaaatccctgatcatccgctaggatgaaaatgagatggggctgggaggtggaagttgtgctgggctctagtttctctccagcttgagctagtaaggccccttcttcctcctcttctaaggcctggccccaggacaggtaaccataagtgaggaggcagaggatccagaatcctgccagcgcccccattgctagcatctttccaggacagacacaggcctgtggagaaggcggaggcggatgccccgcacagcccctgggagccattcactcaggtcccaggtgagactccacgcggagaaccacgcgccccgcgccgctgcgggcgcacacatgcacccaacagacggtgaagactctccacctggcaagaaatcctcctctcctctcagctgtcaccatgtccgacaactttaatcttccagaagtgatggcttaatggatgggactccggaagaacaaggagggctcgctcttctccagcacatttcactttctcctcctcctcccccctccctagagcagcttccaccaaggaaaaaaaaaagaaaaaagttaatatctccacccaaaagttctctggagaaaaaaaccaagcaaggaattgagaatcacagtggacaggaacttttcgtggccagagcgccctcgacgttggggagcgaggctgactctcctgggagtgctggtacggagggcggcgggatcggccgtctgtcctgcggtccccacacctggaaagaactgcgaagtggacgcgtcgcgtctggctctgatcagacagataaactgccgtagtggaccggcctcctgatcaccttctccactttcccagggctattttccccagtcctttcctaggcgtttgccaatctccccgacactcaccaggcggcgaagtgaggaagaagccgtttcctgatctccctccacctccgcagaaactccgggcagcaattccttttccccgctgctagggagcctgaaggccaaagccgggtccctagccccgcggccggtccgcgcggagcccgcttggtctttgcgtagttggcgcacccggcgcaggcgctgcaaactgcgtgcgttttctcagctaacttatttagctttggcactccgagttcttttgcctcctccctcttttctctccagtgaatcacagaacggtactttcttcctgagctcccccgggaagagggggtgggggaaaaggactgtttagaggctcgatctttcctttttcttttccgggaggtggatggccaaggcagaggaggctttgccagagagagagctgcgtgctgctccagcccagcgggattccgggggatccgcctgggctaccgcgtcccaagagtgtcgcctcctgcccatcaccccgctagagggaaaggacggcggcgcgaatggggaagggtaaagcgggcacttcttttcgtggggctgttggtgaagagccccgtctcccatccctaaagttgcgcttgcaaactttttctagcttctggagggagtgagagagaaggagcaggaataaaaacaaaatgcgtatgacactctttcctctttccaacttcctttgcaggttttcctttactagtccccccacccccatcattttcctattccttttgtccctacctttttttttttttttttcagtaacgatgacaaatttttaagttttatttcctctcccaatagctggcttttacagcctgattcttcgttaccctttccctatgtgaaaatactggaattgcccgctccctcttacctctcccctaacttacccacagggtgtctccagccaaaagcctggagaggaagagttatgcatttctccttcaagaaccccgaagccagtctgcattcctgcattaaagaagccagtgtttcccatccagtaattcagggagcttcatcattttttttccttctttcttttttaccatgtggaggaaaaccattgtaaaaacttatcttggttgtgaaaatactcttgattttactagagtcatagagttttaaagtcctgctcaaaggcagcagagggatgtatagtatagtctctatagaagaggcaatgaatgccaagagccactgagatatttttttctaccaccaaatttattcaacagttacttactgaatacctactgtgggctggcacataacatgtcagattctctcaattgactgaaacataaatctaggtttcatttagccatttatttctaattctctcctgttgctaaagttcctgctgagttcccaggcaaaactttgtgaaatgggaactttgaaaggcacgatggtgctccatgaagttaaccttgctagctgctgtaggccttctggtctctgttcttccttgcagcccttctggctaagctggggagagatagtcagttttagaagccatgttcagaaatgtgagtttagcaattctgtaaattaagtcaccaaatatgtaatgagagtactgagtgtcaggggattgaaaagcattgagaggtagggccctaggcttaatgggcctagccaggtgcttgaatgggaaagatgcaaacattctggtcaatctagccttttatttggggagatagtgacttcttgtgacatagcacaagaagtatccatgttctgtgcaagaaggagacacattttcagttgaggttccaagcaataataataaaaaacaatcaaaatgtatggaatacttaccatgtgctaaccatagtattctatatactgatacatacacacatatacagtcgcatctatcagggattagtttcagaaccctgagggataccaaaattcatggatgttcaagtcccttatgtaaaatggtgcactatgtgtataaaacctacatattaatgtatcttctatgctttaaaacatctctatattacttatgatacctaatacaatgtaaatgctatgaaaatagttgttggactgtattatttttattgttgtattgttatttttttttcttctttccttgaatgtttccagtgtatagttggttgagtcccataatgtagaccctgcgaatacagaggactgactgggtatgtttgtttatatagtgctatatacagtttatttcttttccatctatatcaaccttatgaggtattc

SEQ ID NO: 316688 - DNA, 4001 bp, Homo sapiens
tatcttatttggagaaaaacatatattcagaatatctgatgacatgcgtgacatgcagcatagtattaacttaaaatgcaaagaaaaaattctatgtacagtgtgaacccatttttgtaaattaaaaacagtatacacatagaaaaaagccaagaagcctgtatacaccaacaggttgggaatcattccctctgagtggaggaattatgaataatctttactttcctctttttgcttaattttaattttttcaactttttacagttaatctgtcacatatttaaaatgaaaagagctacttataattaatttacctatcctacctactttcatttccaccatcaagccacacagatgcctcaggtaatgttatatcaagaatttccattccaggccaagcgcggtggctcacgcctgtaatcccagcactttgggaggtcgaggtgggcggatcatgaggtcaggagatcgagaccatcctggctaacatggtgaaaacccgtctctaccaaaaatacaaaaaattagccaggcgtggtggcaggcgcctgtagtcctagctactggggaggctgaggcaggaaaatggcatgaacctgggaggcggagcttgcagtgagccgaaatcgagccactgcactccagcagtctgggcgacagagagagactccgtctcaaaaaaaaaaaaaaacgaatttccattccaatgaccacatgcttcccattcccaacattacctggaaaatgtccactagaatcatggttgccagcagcatggtgactatttcaaaatgtcccgtcttcatttttctcttctaaattaaaataaagaaatttcaattcagtagactcaaaaaagaggtgtagggaagtagaataggatgacactgcgtattttttcatttagaatgtgagtggatagcatgatggtcaggaagtgattatcaataaattcctaacgggctacaagagccattaggctttatctagtggtctaatgctctcattctacagacgaggaaacaaaaacaccttagaatttcagtgatttgctcaagattaaatctgtgcatttccatactcctccagacatgtcatctctcccaccacagtcactgggagtcatattttcttcccatctctaaatctcccctcagcgtgcacaggaaataacacaatcagactaaaaaacagcagtctcaaattggtcccctagctcccagtttctaagaattccccaggaatatgtccatgcacattatccattcttctatcctctttgcacattgtcatgcccttttgagtgggacagaggagatgatgaggtcagtagtggtacaaagcagtggattgtcagagatggcccccttcccccaaatacaatcaagagaagcccgagggtaaaataagtgtcttacataactttctgaaggcgggaacaagaataagaaggaactgggtaggcagcaattctaagattatacaactattggccgaatgcctaatattcatcccagtatttatgataatgtaactcaaatgaagcttctattttaccctaccaatcaccatattctggattctaaaaatgagaatgaacagcacaggggaagggagaagtcttcccttttatagatcattttggcctcagtttcccatatttcttcagaagcagttttgttttgtttttactaaaaatactaaaatatagtaccaacatgctactttgtgttaaacttctctttccaaaaaagatttgaatataagatgatagatatctgtcacaaggcaatatgttttaagcaagctttgatcaggattttcctaaaaattgttcatttctttagtctgagtgtaaataagtcaaaaggtttacctggcttttgtgcctttggaggaagtttaagtgatgctaggcctcaaactgactccccactctcagttgtggtaagcaagtcttcaggatgggatgttgttgacagtgagagctgagacaggaatgcttttctttttataaacacccccagcagtagcttggcagtggcacactacgctacttgtgttctgctatttatatctggcccccccacactatgccttggaatcactgctgttaacactttaaatctccaagaggcttgtaaagccatagcaattccctttagccacacagcacattcagttctgagcccacagttctgggcttctctcagagagaaatgacttcccattcctaatcctttgacactgagatatcaaactaaagcatggattttactctaggctaagtgattcacataactagggaaacttgctctgttaatcactggcaatggtgacagctatcaccattcgctcaactagcttactatatttcaggtacctcgtcaggagtcgggatacataagcaagtaaaacaaagtactaaaaagcactcaaaatctaataaaaaacatgaatacgcatacttaaccaaaatacaacatgttaagaatcccaagtatagacaaagtccagtgataacattaaggagggaaggatttggtaatgcctgcaactacagctgtcatttgagtaacgcatacatggtaaatatactgactgcaatgctgaggaacacttagggttcactgactgtggatttaaaaaacacaaaaatgtccaaagaaattcacgcatacatacaccaaaatacattaatagaatgttgatagtagcactattcataataacccccaaactggaaaccaaatatccatcaacagtagaatggttagactgtaagtgaaattttatatagcaatgaaaacgaacaaactctgaccatatataacaatgtggataaatctcacaaacaaaattttgagtaaaaaaagagatacaagcatgtttatactgtatgatttaatttatatcaagaacaaaattaggcaaaacacttccaaggcatgagaagtcagaatagtggtcaccctgggtagtagctagtaactggaaagggcacagaggagcatctgagatgttagctgggttctgctttttgctatggatgccaattacattgacaaattcagtttgtgaaaattcagtgagctatatacttatgatatgtgttttttttgtacacacatatattacttcaagaaaacattttaaattatcatgaaatacacctatatttacaaaatccaactctactctttagaatagagatatgttccaaccttttcccacctcactggcttggcaatccaagattaaatacacagcacagactcactcccagaaataatatgattttttaaaaagcaggagtttggttagaaagaaaaaagaaagtttgcatgtcttcaggccttaggctcacaacaacctgcttttaagttccaagcatgtaggcctacaggaaatgaggtagagaagttctcctgtcgctggcctccattcctgttttgttccagtttttaaccaaatttctttcattcattcattgaacaaatatttgagtccttaaaatgtgctaggaactgttttaggtactagagatataccagtgaacgaaatggataaatatcttgcctttgtgaagtttatattcttgtgagggaaggcagtcaaataactaaaataagtacgtaaattatgcaagtatgttagaatgtagtgagtgctatggttttggcttttgtttataagtagcacaaaggagactaggagcgcatggagtgtttgcaatttaaattggattgttagggaagactcactgaaaggtggtatttgagcaaagacttgaaagagatcagccatgaagactgtggcagtcaaacacagtgaacagcacgtactaaagccctgagacaagaatatgcctacttttgtttgaggaatagtaagcaggccaatatggttggaacattagagtagtacaagataaggtcagagatgtaagggggtggtgggaagaccatgtcaatctctgcaggccactgtaagaacactgg

SEQ ID NO: 316689 - DNA, 4001 bp, Homo sapiens
tcagacctaactcagacagctgcgtctgaacccatcagccagggttgtgcacttctctgtacctccaattattctgtacaatcctttatcataccacttcttctataataagtgttaatgtacatgctgttttcccccactgaactgtgaactctctgaggaaatcattgttcacatatgtgacctcagagtctagaaccataagaataaaagtttggtggatgaaatgaatgataaacagtaaatgaagatttttaagaatgtggattttttcttgtaaaattacttacatatgcaattttaaagtgacattttaaataagtatggatattttaagtataaacatgttttcttttcaggataatttttctccaggttagtcagcagcttcttaatggctattgttacatatcctcagactacaagctgacttgcctaaagtcaccaagcaaaaatgttgctattgtcaacattttgcaaaagttgtcctttacatcatgtccttaacatgctctctcaaaactgtttattcacaaacctaacccagtccttaagttttacatgagaaatataaaccaagaagccagataataagattagcaaaggaagaacttggtcctttctcttagtgacttagatgcagacaggatataaaacctcccacagctaggatttgcctgcatgtaactcaccatgttgtatttaggaaggaaggaatgactccctgcgtggggagaggagagggaaaaagaaaaatcagaatattctcttggggcttctaagactttcaagaaataaacccctttctagtcagtttaatactaacaacagctgccgagaggaggggaaatccacactgtgagaaattcaaacaggcctggaggtttctttatgagagaaacttctcctctcacaagtaaaaagggaaggctcttaccgtccctgccacagagtcagtcacactggataattaaacagaacacctcgattccacaaccaaaaagattcaagagggaggctgggccacacttgtgaaaactaagaattccgctttgtaaagttctttggggttacattagcatttggatcccctacggacacagaactggaatttttcaaggcacaggaagttaaaattcttgtccaaaaaggaattggtaactgttgatttcaactctagatcatctttggctccattcccagggctgtgagaaacgcctgcaacatcctctcatcaggtttctgtttctcctaaaagccttgtctagccataaatgcaacgatcaatgggattttctccttcccgctgcctgcttcctgagagaatgtggttgctctcagactttgcatgacaagttcctaaacgaagcccaggaaactagtgtctggacaggcctgagctgggcgcagcggccccagcctgctcagaggggcggggccctaccctaccatggcagaacagtttcaccacgaagtagggtcaggcgagagaagccctcccattccgcttgctatctcagaaaattagcccctttttgggtaacaaataagatctggcctcagtgactcccaactgaccccaacacctcctttctcttatccgaagggcctctttcccagtcactgaagcccacggcccagggttacccctaagcccagtgccctggcccttctggggccgtcgttccctgctggcctcacccaagcctcgtgtgaaacctgcaaaacgggcctcttcgctcatggccaccgccgctgagaaccttcccacccatccccaaaagcacggccatctcggctggggaggctgcgggccgctcaggggacagagaggagagatcctgaaggcacaacccctaccttttgcccccaaagtgcttctcttcgcctccggctggatcagcactggcagcaaacgtacccagcggcaacacgagcagcacgagcgagcgtcgagacctccgggtataacctcctcactgaagaaggttctggaagaccagttggctgggcatgcgcagtacacgcaccttgggcccggctgaggtcgctgcgtgtgaggcccctggagccaggcagccctttacagaccctatccaacttccagacctgccgagccagctcccagctccttccctcatgcgtgtgcgcttactgggtgctaggcactgtgtttagcaccatgctcagacggggagcgtcgcaggccttccttgcctagtggtggaaggaaatgttaaccatagggttgcagggaaacgtagcgttgctgcggacacgggctcagcaaggcctctgcaagtgtgcggtgagagcccctctggggttcaggaaagtcttcccagggaaatgatgctggcctgggtaactatggtgagtaactactatgcaggagggcaggaatgaggagcatgcacagtcgctccaggcagaagaatggcatgagcaaaaacagtgccatgggaaggagcattgtcccctttgaaaactgagagaagggccgggtgcagtggctcacgcctgcaattgcagcactttgggagggcgggcagatcacttgaggtcaggagttcgagaccggcctgggcaacgtggtgaaacccggtctctactaaaaatacagaaattagcctggcatggtggtggatgcctgtaatcccagctacttgggaggctgaggcaggagaatcgcttgagcctgggagacgaaagttgccgtgagctgagattgcaccattgcactctagcctgggcaaaaaaaaaaaacggtctcaaaaagaaagaaaagaaaagaaaagaagaggggaggggaaggagaaggagaaaagaaaagaaaactgagagaagacaaagtgatgggagcagagagctgtgtaagaagaggctagaaaggtgggtagcaccaacagtgctgggccttagttcttatcctaagaaatttccatcctcctttctttgctggaaagaacagccactagccctgtgaggctttgcagttgacaatccgtccttggcattaattttaacaccctgtgaggtctaataattttcttaaatgagggagatgaagctcacaaaaattaagtattttgcacacagtcattaagtggtaaagcaggaacgtgaacctatttgcactctatgcattgccacagtcagtaccaaaattaagcatgagcaaatggataagctgtatcaatggtcaccacatgttttattcaaaaagaattctgtaattccatttaagtattaataatctgtatagaagtcagtcaaaaaatgtgcaccatgtgacatgaaatgctaatatccattttcctccaattctacagcatgcattgtcaatgggaagagaggtaaattgctcccaagggggaaaatattggttcttggagagctaaaaaattttagatattgcaatgactagtggcctaccaaggttcaaccctacccaacaaaatcttatttcttagcatttgatttctctcttcaggaagaaattaaatttagttttcagttcattttattttttctcagagcaaggtgaaatgtgggggggtgtgtgtgtgtgtgtgggtgcacatgcgcgcacacacgcatgcagtgctgagtccataatgaaaaaaaacgttgagaaacattgttttacaataaggaaatctccaatctttagctagtcaaccaaaataaagatgacgtttcttaacttcccctacaactaggtgtagccatgtgattaaggcctgcctccatgggaggtgatagaaaatgatgggtgcaacttctaggatgtctaaaaaggagggacatgccctttttctgccttctcatcatcctatacctggaaattggacatggtggcaagccacctttggccatgtgcatgagggcagcaatctagagatggtgacaacacaagaaaggagaagcctggaagacctcatgggaaagagccactatccaagtgctaatccacctacatctctcagggagaaataagc

SEQ ID NO: 316690 - DNA, 4001 bp, Homo sapiens
ttgttttaaaatttagttttctatgtttgctgttttgtacacaaatattccatttgccaactaaattttttatgtacagattaatcacatagtgtatatgtcacattttgatatagttcaggcctggcacggaggctcacacctgtaattccagagctttcagaggctgaggcaggaggatcccttgagcccaggagtttgagaccaccttaggcggacaatgttgagactctgtctctacaaagaataaaattagccaggcatggttgtgtgtcctagctacttaggaggctaaggcaggatgatcccttgagcctaggagttcaaggatgcagtgagaattgagccactccacttcactacactccagcctgggtgataatgttagccccagtctccataaatgtataaaatatagttctctctgttctaaggcagaggtggtaggtaaagggttaaatacagcctatttacttgagattttatctttccctaaagagattcttatgaacatttaaattttcctcattttgaataagaacatcaattcctcatgttgcaaattgcagtcttcctcaggaaacatgtactcactatctacctcacacactaaaaaagattttccaccttcactcaactttccatgtactaatagagtaacctagattttaaaatgagtcgcatcccacattgaaaaatgtaggaacatggattttaagaaggcaagctttctactctaagagacttttctttcaagtttacatgtttaaattgtgtgatagtaaatttcaatgctgacaatttaagttgttttggaggtatttgggctataaatattcatgcatgcctgttgattttcaaatcagaaatgaatctgaagactatgagaatttaaaaatggcactttaaagcctgccatatgagtcatttttattttttagagtaccgacccaatagaacctaaatggttttacaaccttctgaagtctatgggtaatattgtttctcatttggtttcatactacaatttcttctaaagaacatggatgcacttggctgcacacatataaaatgtattaattatgtttctatccttttataaccaattttttacaaactgagctgagcagtaacaattccatcagaaaaacacatgtcgtcaatcttctttgtgtgtgtgctttattttagagtcaaatggttatcttattaaagttgtgagaaaccaaatcttgaaatcccctctttttaataacaattattttacacataactaaagatttaatttaaaattatacaatccaggtacacattagaggacgactgaagtgcaatcaattacttctaaaactaatctctaatactatgacttggcagatcaaatgtttaactttttaaaatgtttcttaataggaatagatatatttctattacatatatatattcctattatatatatagtatgccttccttaatctcttttgcaatgataccttgattttaacccaaacatttacattaaaaaagtaattttcctttttataaagccacgaagtgagttacaagtatttcccttaacaaaagtttataaaatatttaccttgaagcagtctaaaaagaaaacatgtaattgtggatcagatgaaagttaaactccacttgaaacaagagaggattatcataaacataccttgtccttgggttactccataaaattcagctgctatccttgccgcttccttgcggttgcctttcactatgtagaaatgactgaggatggcaaggctgattttcacaaaaagcttaaaacagaacagcgaaagtattgtaaagtagacattggataattgttgagcaaacggccgattttcttctaacaccgacattgctgcagaagaatctgcggcggtctttagttggatccaagtctcaaatgtgcctggctctcgtccgggatgctcctgaacagctggtcctgaggaaagaaaatatcagctggtagtgatgcctacagctcaaaatatttatacactccataaaagttcttcgcaaactcctattggtctgaaaatattccatggaagcaattgcatcacgtgtcacaagtctcctgactttccattctcaatataaaatgacactccacctctgtgctccaaatttcaaaatccagatattgaaatatatatgcatatcctttccattttatatatttagttatcaagaacaatttgaagacagtgtatggggttcccattgttaatgtaaatgatattcatatcgagtaaagttgtctatcatttaaggctttaaaatggcactgtactatttgtagaccatgagctaaatcagtacacagtccatggcttgtattttaatgactactcatcaaattaaccaattatgttatttttactgatttaaaaaaacatttttcttacaagtcattacactggaacatcacagattaataacttaacacggttccttcatccaatggacactttttaagaacttggtatgtgtcaaaccctttgctagattttgaagtgacaaagacaagtagaatggtccctgccacaaggaacttagagtctagtggaggaaatggaaaagaaatcaggtaaatataaagaaggtaaaaacaggtattaagggagcacaaagaggaagcatgtaaacctgggagggaggtgtcagaaaagacatatccaaaagaattatcaagtaaacatacgcatttcatcaagactgtccaaaaccaaggaaaacaatatacattttaggcctataatctttgttaacccaaatatgttttattcattaatgaaatgcatctgtatataggtatccttaggcaacttatattttaaaagagaaatagaataaattattaagaaaatgacatacagcagcaatattttggcatttaagccaaaaatgatatgccaaaatacaaaatatcatttcttacagggagcttagttacatatttctatgactgggtttggggcctgttgattgtggtacttgcttcctaattcatttgagaagttccaaaataacaaaaaacaaacataagaaaatagaagtggccattcttggaataaggagcatacccatgactggtcatactagtaagtgttgtgtgcttctctccctcggtgtatccattttatgctgagtatcttaactgactggacagatttacctgacacattccaacacaggagaaatggctgtaaaataaatatgtcaaataaagcaggctgcttctttccccaatgaatgaatggctctcagaaaataataataataataattagatctatatattagaaagaaattaccaagcttcttatgaaaatggcccctggtatcattttcagaggcagaatactggctaggcagacattaattagacccagtgtgccatttcatatgtgctttgggagtcagtgaaaattaacttcaaatagaagattaacaaaatgttcctctctttcactactggtaagactgtgtcagttgagtcaatacatgctgattcttctatggtgagtcttccctctggcatgatgatgcctgactccacactagagaggtatgcccgtggacagctgggccatcacagtgctctgagtcactgcagacttcctcttcagtgcttcgggatcagaaataaaacctgccttagtcacgtctaagtgcccatctaaggtttcagtcctttctctttaccagtaagtgctatcataaataattgtcttcgcatgagctaatcaggagcctggattctttggggttaagaaacattttcatttcactaaggctggaatcatcggtgcattaagtttaaatccttctagttttactaatacaaaaaactacagtataatatttaggattttatgtcaagatatcaggttttgtttttatgaattacttgattcccatttgtatgttctgttggtatactctccctcagcaaatttcaccct

SEQ ID NO: 316691 - DNA, 4001 bp, Homo sapiens
attttgttggttgtttagtcagaatgttcagtgttcagttgtagtattagttaagtaatctattttctacctcttcatggaattaattcatcatttcaagtctatcaggaatcaatcaataatatttattgatattcattggtaagaaccagggaaggtaacactaaatttttttggcaatatatgatatgttgacaattttattttggttaaatttctttccatttgttcataggagaagaggcaatgaatccctttgtggagggaaaggttcaatatagttaagagcatgagatgggcttcacaatggaagatcaggcttccggtccattcctcgcctcttataacctgcacaactttagccaagtttcttagtcttataccttttctgtcaaatggcagcaatggtatctgccttatgaatttgttgtattaaatttgttgataatacctggagagagcttagcacattatctagatcataataagtactcaagggtattagctatttttattattctgctaatgtagtggtgatgtggtaaatagtaaaatattcaggaattttaaaaagctttaaaagtatcttaaaaaattagttcttaatggctttatatatgttcataattaggtgaattaacttttatatcctttgccaaaataatacttttggaatataggtattcaactatccagcattaatttacttacaagatgtttcaagcttcatttactattaaatcattatttaatacaacataaataaccaatcaattagctaagctttttattcagttataggacatatgctataaaaaggtgtctattaacattttctaagggagtccatttcattcacttacaaattatattattattattttacaaattatattatgattattattcactaagcaggatagcttgtattaatatgattagcttgaagttggactaaaatcttagaatagcaccgttattaatgttgtttttagtataaaattaatgaacatgtatcaagtaactggcataatcccagagaaaaatcagaaacaagaaaaaagttattgttactaattagcaaaatatatttaaatatgctcttttgtgtattctttagtcatgacttgcaaacatatgcgaagaatttactctgataaaagaacaactcagtctctggataacttgtaccattcctagaatagggatcaaaactattagaaggggaagactaatgtagtaactagttactgacaagcaaagtgtggctagttgcaagcattaccccaaaacatttaactttcaagtttgcctgtcaaaaatcagcccatttaatatacatctaatccttgacaattggtttggcctttctggagtaataccaactattttctagtgttttaatagagttttttttattattgttttaggtaaatgtatgactgtcaggaagattaaaattggttgaataaatggcccactagtttgcaaagcagaaacttcttactctcctgactggagtatatacagtgtcattatgacaactagaccttgcattgagtgctgatcaacatagaagcattttgaggaacatcaaatcagctttgttacatttaaaaaataaaacctgcaggcccaggataaatagaaaccaaaagaaataaaacaaaacaaagaaacaaaatcagattctggcatatagtaatattttaaaactatttttgagtccctcatacaaataactttttttctaagtaaaactattcatttttaaaacttatattacttatattgtgttcaagtaacattggaaatcaaatttcccaaatgaagaaaaaaaatctctcttttcttacttctggcctctagaaatgaaaaatattactgctctgaggagttcactctttactcaccgttctcagcatatacttttgatttttctgtctgctccatttgtgatttcagttaagcaagagtcctcagggtaacccaattttcatcaataacagtattcattttgtgccctttatataaaatacagcagttgaggttgtaaaacatggaagcaatttaaatgtttgtgttgctatgttttgcctcataaagcacataatctgaaaaccaaaaatgttgacagaaccaggtatgggcatttatggactgatgagaagctaacccagagtgatttcatgagtgaaaagcaaaaagtatcattaggaaaccattttctcacagttaaagggacacttcctatcaaatatgtgtagttaagcagcagcccctgaccaggctagttgacactccaatgactcacccgggaacgtcttcttagcttttctttttacctttgtctttattcaacttcaaatcaaaacgcagctggaataaatttttttttatgggaaaggtgtcttcccttgtcggtgtttctttcttagtaacagaagctgtttctaacagaaataatagccaataaacatgacaaaataaaacaccaaaaaatatctgctcaagaataaatgattactgaaaacaaacaacttactaaaacataaagtctgattattttttatatgaacacttttggaaaattgttagaatttattatattgaataataaatggaagaatgtgcattattgtgcataaagggcatcatctcttgacagaattcagtgattgcatgtatctgtacctaatagagcttgttagactcaccattttataagcatctcaccattaatcatcagtatgattacgtatattttgcatatatttggaaacttgtaaactcagcactataagttcaaactagtcttatacggaggcaaactaattccaagtgatgtaagtaaggaatctggctagaggtcctcagttatcacagtaaagatttcaggaataggataaatttcatgatatatgaatttctccattaaagagctcttctttagggttaaattatgtattattctgttctcacactgctgataaagacatattcaagactgggtaatttagaaagaggtttaattgactcacagtttcacatagctgggaagaccacgcaatcatggtggaaggtgaaagaggagcaaagttacatctaacatggaggcaggcaagagagtttgtgtaggggaacttcccttcataaaactatcagatctcttgagactgtttcactctcatgagaacagcatgggaaagacccgcctccatgattcaattaactctcacagggtccctcccacagaacatgggaattatggaagctataattaaagatgagatttgggtggggacacagtcaaatcatttcattctgcccctagcccctgccaaatctcatgtcttcacattgttcaaagccaatcatgtcttcccaaaagtgccccaagtcttaacccatttcagcattaactcaaaattttgtagtccaaagacttacctgagacaaggcaagtcccttctgtctatgagtgtgtaaaatcaaaagcaagttagttacttcctagatacaacggagtacaggtattaggtaaatacactcatttccaaatgagagaaattggcacaaataaaagggctatggggcccatgcaagtctaaaatccaatagggcagtcattaagctttaaagttccaaaatgatctcctttgactccatgtctcacatccaggtcatgctgatgcaagaggtgggctcccatggccttgggcagctccaaaccctgtggctttgcagggtatagcccccctcctggatgctttcatgggttggcattgagtgtctggagcttttccaggtgcatggtgcaagctattgatggagctaacattctggggtctggagaacagtggccctcttctcacagccctcttctcactctttgtgggggctccaaccccacatttccctcctgcactgccctagcagaggttctccatgagggccctgcccctgtagcactcttctgcctgaacatccaggtgtttcca

SEQ ID NO: 316692 - DNA, 4001 bp, Homo sapiens
acattaaacaagggcagttggctttgctaaattaaaataaaatgatctcgagtagaaaacgtaaaaaatgaatcaagataagtagaaatggtagcaaacaataataaataagttttctaatattaacaaagcaaaataaaattgaccaaatgcgtttgacactactagattttttttaatttttcattttttaaacaaacatttgcaaagagcttaagaattataagtggctgtgtttaaaaaaaaaaaaactggtctgcaattggcagttgagtttctcctggagccaccaccgcagcagcggctgataaagtgcgtgcgcggagtttcctaaaagacgccaacgttctcgcgatcggatgcacatactgggtatgtttatacaatatataaaccttaaagtttcttgttttctaacaattccatagtcaaaagttatccactttggaagcactaattttgcgtttcattgtgcattttggaaaacaacttcggaagactaaatctcccacacttgagtgcgcaacacacaaggatggatgcccagggcgtaaaataaattaaacccaaaccagtgacagagaagatgcgacgttttagcagcgtattggcagcagggaactagaataatgatgccatatacgggtacctacaattataccgtatctatctaaagggggagcagaaggtgggcggaaaggacacaattttaacagaaagttttcatcaaacaatatggaccgtaggaagtttggaacagcggcggcatttgcaaaccatcaaatgtagctgccatctgaagccaagtcgttgctaaacaacgaccatcgcagagcaaaaattaaagggtgcggggatctttaaccgcggggcttcccgcgcactgggaaagggcagttttgtttctgtctcagttttcaggcttctgtcaccttcctaacttgcctcatccgagtcactgtaatgggaatggggggaaaattccccgtcgcttctgtgggaccgaggcgaagttttgctgttttcctcctgcactggctgcaagatgctcccggggagagaaggagacaaattcttttgcgccatcatcgctgtcagggcgctgtcctcgaaagtcgagaagtgcagagcgtccagctgcaccgagtaccctcccgcagaagctggggctgagaagcgagtccggcaactcccgggcggggtcggccgctggctccctccggaagcctgctgagccccagctgcggtcgcgttgcccgcgcccccttcataggaggccgcggtgcgaaggtggtggtggtcgcttttgcaggaggctggaggcggcggtggctgttcccctccgctgggcgtttgtagcagctcggacaaggcgttgatgtagatttgggccatctgcagggtctcatatttggacagcttcttgtcgttgttgaacgacgggataacattgcgcagctggtcgaaggcgtggttcagcccatgcatcctgcgccgctccctggcgttggctgctagccgtctctgcttctgcaccccattcacctgtttgctggaaggggcccgttggcggctgcagcccagctcgtctaccaccaccccgcctttcagcttgcacagctgttcccgcactttcaccggcccggggctcttgctgctgctggcaccgccgctgctcctccttaccagctccccccggccgtccacctcgtcccggggcgcagcggcctctgaggcacccagctccggggaatgtagcaaatactgggcggcgcgtgccgtgcagatgccctgcaaagtgggagccagccaggcgcgtgggtcggtgctgtccaggagggacagctcaggcgggtagacgggatgctctctcgcctgcaaagttgcaggtggctgcggcggcggcggcggttgcgggagatgatgcggctggggctggcgatggtggtctcccaactccttcacttcagcccactcttctgcatgcagcaggcgggacattgcactgcaaaggctcggaggctcaggatcggaggcagcactgggacaccagctcaaccaaaaaaaaggccctttccgggtctcttctgcaacgtcttatttttttttccctcctcgaccctcccccacccactcggagatcacacaccaggtcgcgtgcaactatgcttctccggttgctgaaggcgctgcgcccctttaaaaagcggcacgcgccactcagtctccccccgctcctctcccaaccccctcctcgcgccggtcgcgtgtcttctcagccaatggagggcgcgggcaggcgcgtgcgagcagccaatcaaagagtttttacaccccgagaaaagttcttgtgtgcagaggactcccaagcctgctcaggtttttttttttttttccttcttttaaattcgtcagattcatatgttaattgcagggctgtaattcgactccggtgtgtgtcaccaccccggcggctggggtgcgggagcggtgcggagccggctctcggctggtgcccaagctgactcgggtcagatgtgcacgaccgcgggcggctctgggcgattctggacccgccaggcgcccagaagccactcaaagcagagagaaggccgcctaccctgtgctgcccccaagctaggatcacagctcccacttctgatgcccaagcatttacgatttctcatgtataataggatgtttgtatttatgtatgcaggtatttataaatctctcatgcatgttcatagatatataactgctacatgacgtccatcatttaagattgctgttggaataaagggggaaaacccactcgtctcagagtatgtttcttacttttgctccatcttttcattttttacttcagatctcttagttcgacttcgtcatatgatctttttcttaatggaaaatagagctgcggtgtagtgatagcacaccaaattccagatcccccaattctctctgtcccctttccccagcaccctgcggccaattaggattgtaatctgcctaaatctctccgttgagtgtaatttagggccagaatattttacggtattatgcagagtttcaacacacacagtaggactcctcattaaatgcccagccaggggagggtgcccaaagtaaaatgaaaggcgcctgcattccctgcaatccttaacactttcaaggcacagaagtcccaagttacctacccttttgcctcgatcgccctctctttactgcgggctcgtggcttcctcagtttaacctcctcccgcccctccgtttagttagggtgggcttcccctttccagcccccacccccaccccactccgccccatacaatcagggaggtccttggcaagggggggaggccaattcccaggtgaacgccccctccggtcctattagcctcggcctagtctattcacagcaaagagccaatcagaagctcattggccctgggcgcgccccagcttgcgcccagcgcgccctggctctggctccgggcgctctcctgcaccgcccctggggcgcgggagtgcgatgcaacctgttgatgctactgttgcttttactttcccagtggctgtaatcccgaaaggagtctcatcctctaggagagatgttaaaaaagagcccaagagatagctccctggaatatgtctttgcaatgtccagaggcagttgaatgttgttttcgcaaacatttgccggggcttgatctaacctgtcatctagaactccttgggcagtagattttctgggactggactggacatatcctataaagatacagaatggcagaatagggtgctaaaatgatgtttaagacattattcttcacctgtttcttcttcaacctcgtctgtttgctggtgtctaggaatagtcttgggcgtatcttacgtgccagaaacttcagagctttattcttgtgtgaatgtttgggctctgctgaaataaatgttaaagacacacaaaagcaacaacaaaaaacaaacctaat

SEQ ID NO: 316693 - DNA, 4001 bp, Homo sapiens
ttttttaacccttaatttaaaaagtcaattataggaagtacatttgtctgacaggtgagtcacctctgttctattataaattataatcatatttgagcatttcccttcgttttactgacaatagcaaaataaatgagattctatttttttttttttttttttgggggacggagttttgctcttgttgcccaggctggagtgcaatggcccgatctcgactcacagcaacctccgcctcccgggctcaagcgattctcctgcctcagcctcccgagtagctgggattacaggcatgcaccaccacgcccagccaattttgtatttttagtagagacgggtttcgccatgttggtcaggctggtctcgaactcctgacctcaggtgatccgcctgcctcggcctcccaaagtgttgggattacaggcatgagccactgcgcccggccctattcaattctatttagtcactaagtatgaaaagtattcaggttttgctaagccagggtcaaacactccccacatcctagtttagagtgcttagattttccctctttttcatgcaatttaatgaatgttaaattagcatgaaaattaaatgttatttttaaactccctaaaactttaaaatgttgctaagttatttttccaaatgtataaaatgacctcattttaataaaaataaactatctcaatgtaggtatatgatacgtatttgtagtgagaatagaaaacagtccagaagaagcagttattactttttgaggtggatcggagtgggaggttcttgctgcgggcactgaacaaactactccgttgcaatgatttttgctcttcacaagtcagcaagggttttcgatgatgctattcttcacagaaatgtgacctacatgatttaaaggctgatacaagtaaatattggtggatgaggagcccctgtccttgttgatgcatctctcaaggttgattttgagttagaggtttgctctgtccatacagacttgtttttctccctgcttagaaccagcatgaaaagaacgcaagaagaaactttggtcttattcagatcacattttaaaaacctgagctagcatgataagagcagttaaaacatattctttctaaaggcacagggtcccagacaccaaaataaccatccattccctaaccaactgatgtctctctgctgtacgtggtaaattaaaactacatgttttacaacgtaaaataaagggtgccccgaataacaactaggttctttaaagttagtgttttgggggaagcatgggggcttctttgtagcactcctttgaaaactatttccgagaaagctccaatacaaacacctttttcttcctaaggaatcaaccttagggaatcaaccttaaggaatcaatctgctgggctaaatcttcaacaccttcccttttcatcacctttgaggcagataaccaaaatttctttaaactgcttatttcacaacgggatgacaaaggagtgtgtgtgtgtgtgaatgcgtgtgtgtgcgtgcccgtgtatgcccgcgtgtacaaaggtgtgtgagaatgcgtgtatgtacgtgcccgtgtgcgcccgcgtgtgcagtttacctttttacaaaatccagcatttaaaatagatttttaaattcccctttaacaaatgattgaaaatggtgtaatcattttatcttttgttgttttttttttttagttcagtaacagcccagaactgtagttttgagccatgtcatcaaatctaaacacgactagggaagtggagcggggagaaacaggagagagaaacagaaaggaaaagcgggtgggcggtgaagcagaaggctgggacagtcagagggattcgccgtctcactcttaccaattcctccctcggcacacatcacagcatgttggtcacgagtcgcaaggtacaagaaaagagctaagcacaaattcgaagagtgaaagcgggttgtgcttccacgccagccatttgccttccgggaaaaaaaaaaaatcacttagacatctcccaaactcagctgcgggagccagcgccggagcctgtgctgagctcgcaacctacttctccctccgctcctcctcccgtctccgccaggctgcagagcagcccgagctgcagtgcaccgccaatcgcccaccgccccgccctccgtgacgtagcagcggcagggcctggcaactgaccggctcccagctccagctgtttgaccgagctgcccttctgcccagcgcagatgccccagtgacccagagcccttacaatctcacctctgactttcacctcccaagtacaggttgctcgcggttgacggtttggttcattgttttgctgcaattctaacaattcactgttttagctaaacgtggaacactggacaattattttttggagggtaaaagagatcaaatctaaaaatgtcgcgccactgcattccagcctgggcgacagagtgagaccctaccacaaaataaataaataatatgtaatgttactgtttttatgactagaaaagaaatgaggaaaaatattacaattctgatttggtcgttttcctcacaccttgcccttccgttcccttactcaggataatgtggctttgtccatacacctgccaaggtccgtttgcttaaaattcacaactttttttaaaacttctaaataagtttcaacaacctgtctggtttctcaaaatgtctaatttggaaagaggaaaagccatttagtgaaggccgaaccaataactcagaacaaaacctaataatcttggctgcctgttttatcccattgaaacaaatataaaaagtggggccaaactctccacagctctcctatattgtgcctctctcttccattctctcaagtgtttctcagatgtgcaacaagagtgaagaaaactaaatgagcatgcaaatgtttgactattagtaaagagctcaccagtacagacacagggagctggttggtcggcttgaaaattctctcagaccaagagaagccaaacaagtttctgcacccactgagaacgtgcttctgccagacgaggagaaacaagttctgggtgtggcttcctatgatgctccattagggaagcctccatctgcaggtaaggacaaatctctagaacttagtcaaacttaatccccagaattaacccagcctagtagaatacactgtcatttacatggcctctgaaattcctggccctagtagcactttttgcagtcatatgactgtctctaacatcctttaagatgaaacacatttcctatctgagagtcaaccttatagaggagacttaaaactgtagctgggcccccctgagctctcccaatcaaacactggtgttgttacctcagcagagggccttcctgggaacgtacataccaggacaattcaggcatgtagcctgtttggattgcttaaatcagtggttctaactagctacacatcagagtgaaccggggagcttgatgccaaggccccacccaggccaattaaaccagaatctctgggggtggcgctatggcaatgtctttttttcaagctcctctagaaattctaatgtgcacaagggttgagaatcactgactaagatttgaattattgtcttagaagaaaatctattatatttaagtctaaagagcatagtagtagaataatggaaaacattatgtaatacaacttagccttatacatattctttatatattggtttattttaatataaatataaaaacgtgaagatacacctcaaaattgtttactcagggaaggatagtgaggggagattactagctttctatttgtgtctgtcatttgaatgaaatttgtatcattttgataatttaaatatttctaatcaaatttttaaaaatcaatactcataaataccatgaaggtcattggaataaccactattaaggtgggtttctatcaatttattaggttttgttgtgtttggtgttttctttttgcaatgct

SEQ ID NO: 316694 - DNA, 4001 bp, Homo sapiens
aaccccctccctgtcttccacctcacgtgaactgggaggtggacagaacttcaacctaggaattccacaaccagcgacagcaaatgaggagccggagtatcacacaacacaggaagctttattcatccgctgctggtccaaagagtgggtcgcagggtcactcactttaatatgctgtcatcttgggccggaaggttagaagaaaagcacatgttaccactcaggcaacctaaaaagaccacttcagcttcccagttattttttttttttttttttttgttttgagacggagtctcgctctgtcacccaatggcgcaatctcagctcactgcaacctctgcatcccaggttaaagcgattctcccacctcagccttctgagtagctgggattacatgcacccgccatcatgcctggctaattttttttagacagaatttcactttgctgctcaggctggagtgcagtggcgtgatctcagctcactgcaacctccgcctcccgggttcaagcaattctcatgcctcagctttctgagtagctgggattacaggtgcctgccaccatgcccggctgattttttgtattttagtagaaatggggtttcaccatcttgcccaggctggtctcgaactccagagctcaggcaatctgcctgtctcagcctcccaaagtgctaggattacaggcatgagccaccgcaccgggccatgcccggctaatttttgtagagacagggttgcaccatgttggtcaggctggtcttgaactcctaacctcaggtgatctgcccgccttggcctcccaaagtgctgggatacaggcatgagccaccacgcctggccagcttccccatttttaaacaatccgcatctacttagctctgcttaaatgtcctcctccattttccttatccctgcacaaacctgggagggacaatctataagagccagtgtcactcgtaccttctgccaattctctggcaatccgtttcagttcatcctgcttcttcttctcttctgctgctatcctcctctcctcttctgcccgaggttttaggtaatctgtttggcggaatgcaggagaataaaattcactggaaatgctgtacaaaaggaactgagtccacaggtcaaggtatcttcagcgacgctgtaaaccagacgcacctgctgttcccgctctttatgttaatgcgagtcaacgcctgaccttcaccctgacgagtccaacccagaggctacagggcccctgctgcccacccgctcacgcactggctcactcgtcctctgcgaacagggactgcctcccatcaagacctcagcactcgaacagccatttagcacccgttttcaccaagaagcagccgttttcgagtcccccgcccgggcctcagaagcctgagctttgggtgagctgattccactatcggggtcacgctcggtggaggacacggtcctgcagcctcgcatgcgtcccaagcccccttccagagctggagttctccaaatagcacaggagctccacaggaaagccgagcagaccccgccccggccccgcccgcggtcactcactgtagcgcgtggctccgtaggccacaccgaggaacagggcggagtagcggccgagctgcgaaagaggttggtcagaggcggcgcgaaacggggctcgcgggacgggggtcgcgggaggagggggggcggggtcgctgggcagaggtcgcaggaggggtgggggtccggtcgccgggcgagggtcacggggcgaggatcatgggggcgggggccgggggtcgcagcccgcggggtcggagctgcggggcgggacacgggggggcccagagcactgggcggcggctgcaaagcctggatcaccttgatgagcggagagacctgcaccggtggcaccatcttgtccctgacctccgcaccggaagcacaacctgcagacggagcaggatgccgcacaagccagcaaagccttggaggcaaaggcggagctgggcgcacgcatgcgccgtcagcggcgagagagcggggggccgcgccccctggcgaccgaagggtgactgcgcgcccccgcgcggcggtgacgtcacgtgaggcgcacgcgcacaaaggctggggagtgcgcggaggatcatcggctgcgcctgcgcagttgctgcgtgaggcgggatctgcgccgagtgggcggggggtttcctttccccgcagggctgggggtccgctgtttccccgcgctgctgccgaggccccgccgtccgcgtcctggccgtgtgtccacaccccagactgcgggccggggcgcactctgtcttcttgcgcggagcgtcggaggcctgaggtcagggcggctcgggcgggtccagccccgcggaccgcgcccacccgagggtggcctgggcagggacctgggggtcctgggagcggagtgtgagccgagtgcaggtggctccccgggcaggtccttctcctacaaggcagtagtgtctgtcgccggccgggccgcgttggattccgcggcccgcgggagcatggcctccaggcccctcttcctgcggctgctctgcccgggagcacggggcgcccttcatcccggagctggagcttcctcaccccaggatgccccatcacttctgtcccgaagaggggctgggatcttcttgggaagaccagcccccaacagaggctgctccctgggtcccccgactccaggcctcaggactccacggctccaagggcctgccccggcccaggcctggggaccactgagccccacactggtctttgctggcctctgtccacctcccggtagctgtgtgtctcccacagctgcccagagatggggcctgcggtgcctatgcagcctccccgctgtgcccgaagtgctgacccgccagccccatggacaccaggcttggagtctaggcaggagcctggcaccccctccacgttctgggtcttcctggcggcagccatgctgcccgtgctgggccaccctcgggccccctttggccccatgcagtagtgacgcaaggcctcctgtgtcccctcctggccctgcactgctacaggcagaagcaactggagaactatggctcgggtctcgctaaggtgcagcatcacaaactccaggactcttgaagcaagcatggggaggacccgtgatcctggcggcctgggctacctgtccgggcctaagtcgcctctgccccctctcctggcttgctctggggtccagggcctgggcctctctggctgagaaactaggaagtcactgggctctgtttcctgagctgggtataccaaggccagtcctatagggcaggggtccccaacccccaggtgcagaccagtaccagcttgtggcccgttaggaaccgggcagcacaggacgaggtgagggagcatgattgcccgagctccacccactttcagatcagcctgggcatcagattcccataggagcgtgaaccctactgtgagctgcgcacttggatctggattgcgctctggtgagaatctaatgcctgatgaactgaggtggaatagtttcatcccgaaaccttcctccccaacacggaaaaactgtcctccgtgaaacctgtcccaggcgccaaaaaggttaggtacttgctgtagggccacctgatcttttctccagcttctgtgaggttggctggcagtccctgaagactcctgcctgaggcctctgcctgaaccctgtcctcagggggccagaagcaaactccagccctccccgtgtctactgctcgctgaggaagccgcaggtgcacactggatccacaaggcacagaaccatcttggccctcggcaagcccccgcttccgccagggcagacggcctcaggtgacaatgggttttcccttcactggagtttaaaataatccagactcctcagcaactcctgcttccagaatcaaaaataagtgtctctggggcccaaggtagggggtgagggggacataccagcagcttc

SEQ ID NO: 316695 - DNA, 4001 bp, Homo sapiens
gggaatacaaagattaaacaagcagcagtccttgttttcccagagctcttaatccaaatgtgtcactgaactagttacttgaccttgggcaaattactaaaccatatgggccacagtttcctcaactatcagatggcactccaccttcaccaacctccaggagtgttgtaagtttccataaagtaatctttgtaaaagtactttggaaaatacacaagccaatcaagaacaatactgcagccctgtaatcccctcacatgccacaggttttgcagtgctctcagactttttctcttccccttatttcccacaatataggacccatcaattgctattatttaaaagaacaccaccaactattaccattctactttcactatctctatgactaatttcactcagaagtgtaaaaaaaatgaatttttacagtgtgcattttaaaagtataatgtattcaactgtgtatgtaaaactataatgccctatataagtattttttgggtattacaaatgacagcatgtaccgaattcctatgtagtacacaggccagttttgaatcttgcttcgtcttctccccacagcagtttcatttaatatttcctaaatactgcaatcagaaaatttcagggaccctatttttacagggagcccctaaggagaaaaaatggcctgtctccatccctgaaatccaattctcctaacttatatatttttctaaaaccacttcaccacctgtctcacattaaaagatggaggtggggaggaagagtgggaatcagcgatgatggcaagatagatttctgaaaaacatgttattccaccctctgcaggattcaagtacaggtttatgggagaggacaaacaaaccttgggatatttacagtcttggctttgacgcgagcaaaatcaaataatatttacagagtgcctgccacatggcaggcaggatgttgagggctcctcggagacgatgaagagtctgggccctcggaaagcttacttgcttctaccccggagcatctgttgctcagtgttgacaaccatggccattcaagagctggccccaggtggagcaaagaaaacagcttccacctggctgaaaagtcagctcagctggccgaagtgagggtttcgggcaaaagggaaacacaaaaacgaaacctcagacgcgagccggtgggactccgctgcaggaggcagaattgcagaagctgtaatgcagggaacccactcggcacccgaccccgatgaaggctccccgcgcttcgagagccaagggactacggatcaaaggatcctgcagccggggaaaagcaaactcgcttcgctgggagctcagatagggggttgcaaaacggtgggcgccggaggcaggggcggcgggctggggatctgctgagtggaaatcgaactggtggggagggaggtgggcagggcgagtgagctcagtgactgggacctaatggtcacactgcggtgcaaagcacgcctcggggctcccgcggagaacacccattcgagggtactggagcctggaaagggtctgcgagtacactgggggcagcgcggggggaagggtcccctaggggccgggcgcgacagtcggactgccgccggggaagaggtaggatgcggtctcttccaggataaacacacacgctcacacacacactcgcttcccgaccccgggctagccccgagcctcggcggccccttaccttcggcgcgcgagcggatctccgacacggtcctccgcatggtgggcatcgcggcggcggctgcaggtgggtcctcagcccggactctgcacctgtcacggcgtggtacacgcgggagacccggctgcgccgcgcagagcgctcagctgcagcctgggccgcgccgccgcccacctagggcagagctgccgccgggcgcggcccccgcacgccgacaggaggaggagaaaggcagcggtggcggcgaaggtggcggcgcccgcagagctgggcgagctcttgctgcagccgcggaggggcggctcggcgaggggcggagctcgggcgccggcgccgggggaggggcctgcggggctcgcgctccccctcccgcggccgctcagcaaggaaggcgggtgaggggcggggagagccagggggagcctccttcgccccgccccgccccgcttcggaccgtatcacgactcaaaggggggatcaactcttagcctccttagtcctccagcgttttcgctccgccctgtggagttggttgacccggttcctcctccaggccactcggactctctcacatcttgctcagaaaggaaagactgctctggctgctgcattctcacgaatcccctcccgctacccctggcttttgatcgcagtggagccgcccgtcgtccggaaagagctgttgggtctgagccggcaggcgaaggcgaaagggtctgggactacaaggtttagctcccagccagagcaggaaaggaacgactgactgttcgccatctgggtgtaattctaacctctctgcacgcccagcccgactcgtggcctgagccgcacttgtcctcctgcctcgcccactagcaacaggctgccaggtcgggaggcccctggtgcccatggtgctcttgtccatggggcttgggtgcatctgggccccgcctgcaagtgggcccggtgcatctccctagttcaggctctgcagcctgacaaggcactgaaatagcaattaagccaactaagtattggcccaggtggttcacaaaagactttttttttttcttttagttaaatctgcataaagttggatgcagtcgttttatctgcaaaggggagaggagtctttgtataaaatccataaatatgttaaattttaatttgccgatgtccttcagactatcatagcctcattaccttttattttgtataccgagatctatgctaaaaagttgtcaaaacaaatacttcaccttcaagttaagatgtaaggttttgtgctgtttctggcgagctgctgaactggcaggaaaggaataaaccagaaacaataaatcagaagcaatttgcttcttccctcatttcatgctcttcctccagcaaccagcgaaagagatcctcacatagaggccttttatttgagatcttttcacatcctgaagggagagagctggagaggtttgacctgagagagaagtgattatttccaagcctcaggaaaaaatgaaataaaatctgctaatagcgtcctatctccatttgtggtatttcttctgcttcctgcaggtagcacttgctaatcagagccctgccctacattaatactcaggcagtcaatgcatatttatgaagagcccactctagttggctctgattcagaggctggaattagaacaaagaaaatgtattctcagtgttcatggaacatctcagggtaaagcaggactcaacaataaatgaatctatctgtttcagtgatagtcatgatttaaagtatggtcttctaaacgtaaaaaatgaacacagctttatctggactgtcatcactgggcatttttatttcttccaaggcccagggtctccttgtataaagcaggcttgctctggcttaatgaacatgagtctgaaacaaaattaaagggctaacatagcaaggaaaatagtaaaaataataatcagctttaaaagttagcgaacagaaactggaggaaatgcagtgcttttctgattaacattttaggtgtaattctatatgaagccataaccagttcttattaaaaatcagtgcgcagcagcatgacgatagttcatttatgagcaatcacctttgtaattcctaattagtcctcagatggggttgaggttcaattctgcttatttacaagtaataactgaaggaactccagaagttacctctgttttgtatagagcaatccattttttacatgtgtgtcccattaactcatcagcaaagttgaaaacgtcattgatacaggaaacaagtcacttat

SEQ ID NO: 316696 - DNA, 4001 bp, Homo sapiens
atgtagattataccttaatattcttgactataaaaaacaagagtgtgacaaaaattagtaaaaatcataaaattggatttaaaaaaacatgtctagagctctggtggcaactccttaacagagtacttaaagtatttaaaatacattttaaaacctattaatttttaaatatcttttgtaaacctaaaaatgtataaagtcagaacttgatccaaatctattatatctatcaataataatttcagtacatctctgatttgaaaatagaatcttctttaaattacttagtggatgttggtgtaatttaaaagtgaaaattatttcttgaagaaataattgacattttaaccaataataaatgtagattatagtactcagacctcaaaatgacatatgtttaaaaatcccaggtgcaatacttacaattttattttgtgataaattagtagtagtttctacttactcctcaatttttatatttccagttttattacatccatataaaagatggcaaataccctggaggggcaggattcagaatatgcttgtagtcagtcccccaattttacctgtaattgttttgttaagctcctgtagcatgagggcatatgttctgacagttcctgacctatggtccggggtctcctgtggctgggtgggtatatctctctaattctaggatttcacattataaactccactttctcacagatataagccatttgagccaattatcaacttcatcagtaacaaaggcaatatttgatttcccccttcccttattctttgtcatatttcttaatactgcttaacaactcaaacattgaagagggttatttattgctcaatcctcacccctatacccaatacatgtccctgaactcttatgctgaaaagtgtctttacattctattatataataaatgtgccacatttcaaagtacactgaattccattcaatagtaataatatacaaagtacattcacatgaatattatggtgtgtttttataccattcttagtattacagttttaaggaaagaattttaactcaagttaatgaaaaaacaaaaatgttaaacaaaaacgttaaagccacagctagaaagtttaagagacttgcccaaggtcacaccaatagtaagtcattaagctggacttaaattcacatcatctattgccaactctacttcaagtatcaaaccataccacaggcagtattattgacaaaatgaaataaaactccagtccgtttcttgaggttctcaacggataaagcatatgaccagctgatcagattaaaaagagaataactttagtttcaccagcaaatctaattttgctttcctagttccgagaaaaagaaaactctgttggcatttcccttgtttccttgttctttctctctacttaattcaacagcttctttccagaacacaagatggtggcagtggtggaaaaaagacagtaagcataatcatgacttgagagcaatgacccaaacagagtacttaaaagatctaaaatttgttttacctgcctgaatacttttcatgggctttaggcagatttaactgtaaaatgaatgctttttagcctgtattactaaagcatgtaagttagggatgtaataaatacactcctaactaactgcaatgagatcttgcaattaattacattggcaagtatttgtgtacagtgacactaatatctttcaagggcttttttatgtacagagttacatgggatgtcacactttggaaacataactgattaaaacataactttagcaaacccctctaaagaaatatcatctcaaaatttatatcatacgtatcaatggtaaaatatcttagaaatagctatatactagaagatatatacataccaaaacaaagaataggctgaatttctactcatcagatgcaagcaaaaccagcaagcaagtagtcccccaccctcttcctgatgtgtgcatcctctgcagcccttgttggccagaagggaaattgcagacctagcaaagtgtgtctcctaccacccgcagaagctccccaaggcctcctgcggcctatgttcacagtaaacataacttctgcatggagtttacaagatagcaagggctaaaaattctaggtaactctaaaacaatcctcagttctgctgcagcacttggtcacgactacatttctcctagagtgacattgtctttacataatgcggtcaaggacgcacacccatcagaaccacttttgggcacttgatcaaatcagaatttccagaattggggttcaggaaaggattatcaagtaactaagcactttggtaattcttaagtccactcaagtttgagaatcaccatagtggcttttttatactgacagtatttccagtatcatagtagatgattacagtcacaattttttttatttctcaagttttgctaatgtgaaaaaagaaaataaatattttaggattttttctttgaggaaaataaattgaaatagctcaaatgttatttattaaggaaccaaatacatgtgacttattaaattcactaaaatcattaacttgcccaaaatctaccttaattcaccaaagtgatttttgttagatgagggccaaatcatctatttacggacaaagaacacaatatttaacattatgtatctaaaacttagattgcaattctgaagtgaatattgtatataaatacaaatatgatgtttatccaaaactataaaaaataatatcaatggtgattcaggggggtgtttataatacagtatgtgattaaataaaagcaatttttaaagagtatttaaattcatactaactttaacaaagattacttttttactattattaattcccacattccaggtgtcatattaggaaaattcacagttcagaatttaggcactaacctgtttacaaaagccaaagttaaaaaaattaatgttcaattatttttgtccctgggtaacattttgtacaagattgaataccaaactcttttctgaactgaaataatgaagcattggaaattcctggtggggttgctttgattaatatttgacacttagaagtatgcaatataataatatctaggcataattttaataaaaaatgtgaacctctaaaaaatgattttagaatatgaagaaccagggagaaatattccaatcatttatattttcttctctcctattaaaatgcatagaatagtatcatcaaaaaccgaagctctacatcatataaatgtcttaaagatagagctatgtcaagaatatataaaaataaacgttttacatttattcttaaattttagtaattcattttatttaatgaatctcactgcttaattatttacctttaaatatagtgtagagaaatagcaatccaaatattaaatgtttccctagattttttaatctgagtttgtaaaaataagatactattattttaacatttcaccacttgaacttgaagatattcctttatgttaatgtactttataattgtaatcaaagttgaaaatcagcaacagacacttaaaaatatatataattaaagatacagtttattctttggaacttcttactaattccagttatatttcacagaataatcttctttacccatctatgactctaatcttcattaccttaacattttttagttctcacacatcactggaattttcagaccaggtattttaaaattcaacaagataacttaccataatcattcataagtattataatgttgataaaaaacctcaatattaattctctaatcacttaaacttttgtttatatgtttatgtaatagttatttaatgattattataaagaacaatttttcagactttaagagataaaagattataaagcccaattcctgcccttaaaaaaacttgcatattataaaaaggaaatggacttctataaattactttaacacaaagtagtttattctaatatctcattaagacctgt

SEQ ID NO: 316697 - DNA, 4001 bp, Homo sapiens
atgaaaccatgagcaactcacactctggatctcagtgctctcttctctaaatgaggcagttggaccaattgacccccaatgtgccatattaagatagttgttggagagagagggagctcttcattaaaaaaaaaaaaacacacacacacacacacacacacacacaaaccactggatttataaaagctagaagattactcatatcaagaatatgggcatgggataatgtcaaaagacaattcgtttttagaaaagtttcattatgttggccagaaaaggaagtaactgaagcaagtgataaatactgcatggagaaggacccaaggagttgggaggggcggggcggggggggagcggaatgcatgggaggaacaagaataattggaatgctataaatattgattcacattactcttgcattattcacaatagcaagtgcctcaaagtattgcttagtatcaagtgaaataaaaggcattttctgcctaaactgtttaatctagaagtttgaaacaaactgtaccccattctctaacaaaattgttaaactgaaattacaaaagaggtaacctgctcaaagtttgaaagacatggttggtttatttatagatgctagcaaagtctgctctgctgaagaccatcagagccacagttttcaagaatgtcaatatgcaatagttaaaatattaataatattaagttatgggctctaagtcctttcttgtcacttttcattgacacaaatatacttcttatttaactgaaagcaatccctaaagcttatttatgtaaaaatgcactagccaacagaaatagctacaaccaaaattacattacctaaaaaattctagaaaggtatgagaaatttatttctattcagcaaattaagaaactttcactcagaatatactttcttgttgcatttctcaccacgaacactccagtaatattaatacctaagtgaagttttttaatttaaaaaacatttttatatcactgagtaatttgcaaatgcatttgaaatgcttcaaaaagaactaaataaaactgccttaacgtccatttgaaaatataaatctacttctgcattcaaccaagttgaccgttttcctttgaccaagttagtaaagccagtggagtagggaggtggtgttggtagagtttctctgcaaagccacctgccaagaagcagggctaccaattcaccaggctgggatttgtcaggccgggcaggtaaatgcgtgacgctacacatgagcggtttttctgtgcttaccgactgttgaaaataattacgtataattttaaacgcgcattgctttaaaacaggttgcaaagtgattttagaaactacaggaccctgacccgggtgctggggaaagttccagctcctcagaagttgcagacactgagggtagcccgctggccagaactcccagcgcgctccctcctcgtggcgtccagatgcccctcagagaagtcagggacagaagaaccctctgggctgcctggcggcaggataaaaaggagaagccctgtctcagggacgccctggcctcagtgcccgagtgcagttgtctaacgatggcccgtggtctccgcagagccccgtagcccggcctcggcgtcaagcccctccgaatgcgcgactacccacctgggggcgctgggccgcagggggcggggtccgggctcccaagccccttgcctggcgctgctggcagcattgtggcggttgaagccgaggggcctgcgcactgctgcccgccgagcgctacctggactctcccggccagagactccccgcgattttctcttcctttggccctcggctctccccagcccgcttgccacccgcggaggctgcggccaggtctcaggaaacgcagccccggggctcatgcccgcaaggccagggctccgctctgctgggcgcccagaggaagtgaaactgctcaggggcctgctcttacatcccttctcaaaaggccgctttggtttcttataacacttctgcgcctgtttccttcctcaccttttcatcctaggatatatttagaccgctgttattgtagctctccttgtccctttctaggtcttccatactgccatactgcccccacttccaggcagacgtagggaaaccagaagtgaacatttgctggaaagaaagaataattagatagatagatgagtaggtacacagatgatagatacatacatatagaaatgaagatacagataatactgtaacttttaaaatatttcattttacacagactttctaggctaggttcataaattgaaaagtgatttaaaattccatataaaatgtatttcttactcctgctccaactcaaaaatagacccagtaaaaaattatttatggctctaaataccctctccaaacaagagtttgtttgcttgtttttaagatggagatatatcaaaggagttgtcccagaaccttaaagtgaatgtctctctctcaagcatgtctaaactagtcatttgccttttgaagttgaatatattttttgaatatcaatttggtaataatacatagtttaaatgttcctctcctcttcctataaaaggaaggctttctttgaaactttctctcggatgaagtgctttttagtaataatataaatatcaagtatcaaaaaaagttaattttttcacataaatgaacttattagaactttataacataatgtagaaaacttggagaagtatgcgaaatgtccaaaaaacttgaaaacaattatagattgtattgtatttatctggtttccagtagtttctttaacatcattattaattttatgttgattttctgaactttatataatggaacaaaagatttcatctaacttatgaaatattatattgaaaaaaatggttgtcttctatatatgcctgttaacagagagacttcagtgtaataggcaaaaacaaatttggattgcagggtttgggtgttgttcagtgtttcagaaactcaattcttaggaaagtatgtcttaaacccattggagaaaagaatattctaactgatgcatctgctggtatacgtattcctgacaagagctactttagccaacatgaacactccagatgatgctccccaattaagtatccagatcttcaaaggcacccatttatgcacacgaaaacttgttaataaagacagtgttcagataggaacttgtatctgtcacatatacaggacagccttcttgtatgaagagccctggattggaagtcagaaggttgcagctgccatcctgactctgctccacaatatctgggtgtttggagcaattcttaatatttctgagccttgcgtatctcatctaatttattcattattaatgaataaattaaaattactgtattcgagtttctgccagatataaaatgttataacactgtctcctaataaaactatagaaaataagatttataatatgaaaattaagtatattttcagaagctcatttccactacttatgtcaaatgatgctagtaaatagaaaaaagaaagtaaaaactgctgaaaattgtgggctgttttttttttaaaaaaaataagattatgtgttagaaaatctttaaaatctcccattaaaattattctagcttcacttttcttttgaataagaaaatagccattgactaccccattgactgacttatttattcttttgttttactgtttgcagtcaacaactactctttttttaagtattctatatcctatgttctatgtaagagtttcacaatattcatgtcatttggttctcaaaacaaggaaggtttaaccatattttacaaatgaagaatctgggcgttgaaaactgtaagtggcagagctggaattcaatcctagatctgatttcatagcctgccctcttaattataactgcccccctccccaccgcttccttttaaggtcacataaggcccttgctaaagattacatgaacataatagga

SEQ ID NO: 316698 - DNA, 4001 bp, Homo sapiens
cgccatttaattgtcattagatcaaacatgatccaagagatcctcgaaattaggattgggttgagtatatacttggtcactattcatttctgggtctaagaaatccttttaatattagtattaaaaatgaagtatatggccgggcgcagttgctcacgcctgtaatcccagcactttgagaggccgaggcgagcggatcatgaagtcaggagatggagaccatcctggctaatacggtgaaactccgtctctactaaaaatacaaaaaaattagccgggcgcggtggcgggcgcctgtactcccagctattcgggaggctgaggcagaagaacggcgagaacccgggaggtggagcttgcagtgagccgggattgagccactgcactccagcctgggcgacagagcaggactcggtctcaaaaaaaaaaaagtgtatgaccttgaaactgatcaagagcaactttccaagtgagataaatgacgtgaaaaatcatatattaaagtgaccacattttacttaactcaaaaattatcttggatttgtgccattttaattttcactgggtaactttatatggaaaaatcacctgcaatatgaggataaacttacctattttccagaagcctaatgagatttttatcaatgattacaatacttgcgtgtctgtctgggatataatatgaacaagacaggctgatggctttggaaaatgtgccatgtttctactcaatgaagcatgaaaagtgatttgacagagtgcttcaagaatgcactttgcacttgttttcctctcctgccttcaggaagataagtgagacaaaaaaaaaaaaaaaaaaaaaaagactaaagttagtattcttcctgaatccatttttgaagaatccagtataatttttagaaaatatttcctctagagaagacattgtaggaggcataaaaggggtccgcatgtgtgagcaattaaaggttagaagttttaagattctctcattccttcattcccaccaggaagtcagtggtccatcctacctcagtctttctcccctgtcctttaagctgattcctggccaaattcagaacgggcagaagcagtaaatctggccctctggacaagagattgagttggtttacaaaagtttcacaagtatctaaatctaggccgttactgaatcaactggataatcagactacctgtgtctgactctgaagtgcagatcaagttgatatcgttgacaactggccaaatcttaggactgggccaaggaaatggctggatgtgtgtgtgtgtgtgtgtgtgtgtgtgtgtgtgtgtgtgtgtgtgtgttggggttggagggcggggtccgatagtaattatgggtggggccaaagtcctacctcgtaaacaaatgctacacgaaacatgtaaaaacgtttatctatgtatgtagtgaagctttaaatacatcccaagacccatgcttatcccaatacccacgtccctccaacgacactgttaccccatgccactgctatacagaattctggtgtctaccatgccagaatccctgcccaaaacagggaggaggtaaatggctgaaggcccagctccaggcactgtagaaaatgaggaaagtctagcggcaaaaagaaagggcagtcccctcttcctctagtactcctagccacatgctggaccaattcaccccaggacctccaggccctagattctcattctttccctggcccgaagaggacagaaaaatcaaacacacgggctcccacgtcttcaggaaagacttagcttagcagtcagcggaagcacctcactactaacctcgctcctttctcctctcctacagggggctggagttcccggcttcccaccggccagacgcgattctggctgggacagcaacaccaaaaacgccagggctagggagcccagttccccgtccgcagtttgcgcatgtgcgaagaggggcttctggaggagccgggggcttagttgctaagagacacagctggagagagaagttccgcttaacgccgggctgcgaaaggcggggacgtcacgctattggtagggagtagagagaaagggctggtttaaaggcctttttttctgtccattggatgaactggatgtcaataactcaggctgggtgggcggggctgagagaggtcggtgagagcggccttagcaaccgccagtgagctgtgaagacttgggttgggcggggctgcgggaggtgacgccgggaggtcccggctgagagcgccggctgccggctggggacctggtgagtgtgaagctgtaaccttctgctggggccggggccgaagtttttccgccagagcaaggaaggctgcccctggcagcaactgcactccttccttactcctgttgagattcattttatagtaggaaataggtactttaatatagtttatcatcaattattctggttctgctaactattccagttatataatttatctttcacccatatgtgtgtgtattacaggcatctaactaccatacaagttcagaccaatggaagaaaagagcagcaaaaattgaactgaatgaatcccaaaagcaagaaattaaagacgcctttaatttatttgatattgatgggtctggaaccatcgatgtaaaagaaggttctgaaattatttctaattctaaatcattttaaaaaccatattatttgtggcaatctttaaggctttctttaaaagtagtcttctgaaagcttaatataaagtctcttcagtgcatatgcctgccctgcattagcaaaacgatatcttgttaagcattttaattgtgttttataaatgagtaggcaaaagcccagggtgtaacagtgatgtacatgatggcacagtaggactgaaacacaggcctgctgacctaattttctgtttatgctcagtccataatagaaaagagagaagctcttaatagggagttaaaaagcttagaaagaaatcatggcatattataattccttttcttcctatttcagattgcagtgtgggccttaggatttgaaccaaagaaagaagaaatttaaaaaatggtagctgaagttgataaagaaggaattggcaccattagttttgaagatttttttttgccattatgagtataaaaatgatatagttatgattttatttttcaaagaaatactagcaataacctgctacattttagggctggagcaatcagaagttttatagagaagcaattagaactaggtttttaaggatgggagataggaagagcaagattaaatatgttttcagggtagtaatgagaagactatgatgtggagaagaggtttttgtcaggaaataatgaggctatattgcaggatagagagaatggggccagaatttggaagcctttaattcagcaacatatattgaatgcctatttttgccaggcactattctaaggagcattgaaagatacaaccttccattttgaagcttacatttttggtaacggatctgaattatgaggtttaataagagatgcattctggaccaccctgtgccttctccaccttagcaagctctacctttaagcaccttgagggcaggtgtgagtacataattgttaaaagaccaataaataaaatcagaacacagctacttggcacattgctgctttagaccccaaagatctaattaagtccagcttgataaaataaataaatgaaagactggatagttgcttcttttttaaaagagtaaaaaagatgaaaaagaagaaatattgaagactttcaaattatttgatgatgatgatactggaagtataatactaaccggtatcaagaggtttgctaagaaaccaggggaaaatttaacatgatgaacttcaggtagattttgcttatttttataattataatttatatgtaattataacttatgtgataatttaggattataattctaactttagttgcacttatgcatttaaaataaaatttggttttg

SEQ ID NO: 316699 - DNA, 4001 bp, Homo sapiens
acagggagactctgtctctacaaaaaataaaaaattagctaggcatggtggtgcatgcctgcaggcccaactacttggaaggctgaggcaggaggataacttgagtccaggaatttgaggctgtggtgagtcatgatcatgccactgtactccagactggctgcgtgacagaacaagaccctgtttcaaaaaaaaaaaaaaaaaaaaaaaaaaaaaaaagaagatttatgctaaaataccaaatatgataatggccataacatccaatctaacaggtgaagattattttacaaaaaaatacagaggatgaaagcagcagggaactgtcactgctggtgtatagttaggagaagaggatgggaccaatgggagaggaattggtgaaaacaacacatcatgataaaacgttcatatagtataaatgactttattctgcattccagaaaattgtattaaagtcatctgcttagatttgtatttctgaaacatcaatctagcaagtgatgtgaaggatggcttggagggagatgaagctggagttcaggagcccaatttggaggttatttcaattattcaagcaagagaagatgagaacccaaatgagggtaatagagatggaagatatgggacagattcaagagatatttgggagttaaaagcagtaagatgtggtgaccagttggatatggaagtacatagcataaacccctagaaaattgactgggcaaacatttgtaccattaactaaaatgaggtggcctaaaaatatgatgaggaattggggtagagagaattttaggtctgaaagaaattctgaaaggcagtgtagtgtaacaaaaatacaccagttctggagtccgagactttgattcaaatagccactccctaatttttagctattaagcaaattacttgccttctctaaccccttagatcctcatttataatattgtctactttgcaaattcttatgaggattaaatatgttggtaggtatgctaaattcttagaataagctagatgcacattaaactgttgtcattgctttttttccccctttcgagacagtctcgctctgtcgccccagctggagtgcagtggcatgatgtcagctcactgcagcctccgcctcccgagttcaagcgattctcctgccttaacctcccgagtacctgggattacaggcgcccgccaccacaccgggctaatttttgtactttttgtagagaagaggtttaaccatgtaggctaggctggtctcgaactgctgaccttaggtgatccgcccgcctcggcctcccaaagtgctgggataacaggcgtgagccactgcccccggcccggttttcattgcttttaccatgatctgcctggtgcggtacagctcacagtaagaaacaagtgcctggtgctccgcaaaagggtccgggtagagatggagattgaggattagaggccctcaggcagccacggctagggaggaggagaagggccctggggggaatccgggatgagacagtgtcacattttcagagcatcctcaggacccggcagaagccagtaccgtgggggcttgtgccgcttttccccggtcccctcggaccgtcacagacgaaagggagctgcccaaaggcggggtgctgagaggtcggcacccagcccggctccttcgcctccgcaccagctcctggcgaccgagactttcgtcagtggaaggaaggaatcctctccgggtgctgggcttgcccagcgcggcgcccgccctatcccttgggtttacctgcagataatccattcggtttaaaatcagatccatgatgactacgcggaggggctaagcagcgccggacaagaacaggagggacagaggcttcgggcccgcaggcctccgacccagtcagaaggctgcccgcgcccctcaaaagccagccccagctaccgcgcctaggtcctgggctgcacaggcggggcgacagggcagtggcgtcctgcgtgacgtcagtacgctgctgcgaggggctcctggaagaagatgaaggcccgcccctttcccgaagcaccgcccactgacagcgtgttccaatcagaggcggagaggaacaaaagaggcgaggtccgggagacccatacagggcggtttccacagagaccccagacgcagtcttggctccaccctcaccgcggcccagggctaatactggacttctttccttatcgctgtagaaaaaactagataagcctgctagattctgaccgatttcactctgacattggaaagggtcctacaaagaattaggttccaccgttataggtgctagcttacagcagcggttcttagacttttggccttaggacttatttacaagactcttaaaaaccgttgaggagcacaaagaccatttgctttttgtgggttttctctcatttttaatgttttttttatttcaatagttttgggtgtacaggcgggttttggttacatggatgagctcttgagtggcgaattccgagattttagtgtacccgtcacccaccagtgtacactgtacccaatatgtagtattttatccctcaccccgctcccaatctcctccctacctggagttcccagaatccattatatcgctctgtatgtctttgcatcctcataactgaacatgcagtatttggttttctattcctaagttacttcacttagaataatggcctccagttccatccaagttgctgccaaaagatattatttcgttcctttttatggctgagtagtattcaatggtgtatatatactacattttctttatccactcgttagtcaatgggcacttaggttggccccatatctttgcaattgcgacttatgctgctataaacatgcgtgtatatgtgtctttttcctttgggtagatacccagtagtgggattgctggattgaatggtagctccacctttatttatttatttaaggaaactttatactgttttccatagtggtggtattaatttacatcccccaagcagtgcaaaagtgttcccttttcaccatatcgacaccaacgtatattttctaaattttattttttatgtttatttttttttttttgagacagagtcttgctcttgtcccccagtctggagtgcaatggcactatctcggctcactgcaacctccggctcccgggttcaagtgattctcctgcctcagcctcccgagtagctgggattacaggtgcccgccaccacgcctggctgatttttgtatttttagtagaaacagggttttgccatgttggccaggctggtctcgaactcctgacctcgtgatccgcctgcctcatggccattattgcaggagtaaggtggtatctcactgtggttttaatttgcatttccctggtgatttagtgatgttgagcatcttttcatgtttgttggctatttgtatatcttcttttgaaaaatgtcctttgcccactttttgatgggattgtttttttctagctgatttgtttgagttccttgtagattctaggtacaagtcctttatcagatgcacagtttgaaaatattttcttttactctatgggctgtttactgattatttcttttgctgtgcagaagctttttagtttatttaggtcccatttatttatttttgtttttgttgcatttggctaatgtccaaaagagtttttccaatgttatcttctaaaatttttgtggtttcaggtcttagatttaagtctttgattcatcttgagttgatttttgtataaggtgagagatgggaatccagtttcattcttctacctgtggctaaactagttttcccagcaccatttattgaatagggcgcccttttcccaatttatgtttttgtatgctttgttgaagatcagttgactgtaagtacttggctttatttctgggttctctattctgttccattggtctatgtgtctttatttatttatttatttattttacctgtaccatgctgt

SEQ ID NO: 316700 - DNA, 4001 bp, Homo sapiens
gtacaggttgatagccttgcctaaagggcttatattacctagtcctttctctttgaacttatttcagttctctctttagccaaacttttttttttttatacccaatatgctcttccatttcaaacctccacacttggtccaaggtccacatggtgaagggcaagttactcctataggcaacagccactgaaggatttatggaaagggtgtgaaatgatcagattcgtattttggaaggactgctgtggagaacatacctgggcaggagcatggggtgccattaggaggctgctagggttatctagtgggggcgctggtgaaatagcagggctggagaaaatagcagggatggagagataggtggattggagaagtgtttcagagatgagataggtaggacctgatcaccaacgtggctaatttcaaagaaatgttatttgcccagtgttttgcagctatgaattcaaacctaggccttcttgttgcaggtccaagggaagatctcatggcattgtctcatggtactcaaagccctgcgggcctctctaaatccccactgtggcaccaggagcctgtgcctcgcagaccgctgaccccaggaagtaatggacaatgaggcgcagctgctgctgcctctctgggtttgtgctgaggccaccttctcggggccgttacaagccagtgcctgagcatgcatgcttactaaggcagactcatttctgggagacatagacctcctccccaacggatgactggctagagaagctccttattaccttgctgaagttctcttagactgcacagctgtctgggatgcttccactcaacctggtttccttcttttcctccctcgcgggtggacttgcatcgaggtctgatggctctcacagccttacctagttctctcctcattctctctcacaacagcatttcccctaataaaatccatgcatatttaattctatcttggagtctgcttcttggaggagcagactaacacaattatgtaagaactggctccagggatcagcttataatcactgacttcctctgagtttgtccacattttttaggcgatggggaagcttggctttaacagtgcctgacctactttgatgcaatgaatttttgcttttttacttcttacacaaaagataaacatggaatgtttatcatttcaacatggaatgacagtttctaaagtataactttagaaagatatactttatcctccttgaatcctaagcatggtgcacaaaagctattttacaacactgtcattagtgatattgggtgtatggccctgtaaagcctccagtcaaaggttttgctaggaatctttgccaaccgaagaagcacttccagaacaaatgccgaagcacagagcagcctttctatgcactctgaaaacctcctcttagctggccttcctgtctttctgggaccagattttggggtcaaagccttaacatttgataaactgtaatctcaaactaaaacagatttctttgagaaaatgagagcaaacacggcctgaaatggtaaaacaaggcacctctcaatatatccaatgtgaaaaccatacatgttggcttccttagtccaaaagttagaatcaaaatgttgatttttgattagcagagacacaaacagcatattcaggaagccattgttttcaagagccaggaagaaaactcttcacttaggataccgtaagaatccttttttcttgggctactttataaaacatacataccacagagtttcaggctctttaaaaacccatctttacactgatctaactgctcagattaattttgaaacaggcaacgtgcagaaaaaaacaacatctaaaaattaaacctcccctctttccgttctaaagtttcatttcaaaagtattaggaaatcttactttaagcagcgagctgatggcgttctccagaactcggtttgagcaacaaacttgagacaacctttgtctggaagcaagtcaagcgcttaataatgcatgctgggatttgtagtttccctgctttcagagtttagtggctccatccatacactttataaatgtatgtgctgccatctagtggaattcaggtagaactatgaattccaagtggaaggtgaaaagtggaaaagcaccttagagcttacttaggatgcggaaatcatttccttcacttcagtctctccacttctctgttttgtttatgcctactatatgcggtgccagggtagacgagattggctgagctggaaactgcgtgtggaagatagcagagcaacaaaatagagggaacccaggtcactgaaaattctggagccttcctgtcacttggcctggattgttttaagggagagaaataaaaaaaaaaatcctttttgtttgagatacagttgtgatttttattttttcatgctcagaatattctaacactaatgcacatttagtggcagaatgccaggagccttttactacactgggaatggggttggggagaacgtgaaacttggatgacagggtggaggcttaaaagggaacatgttaacagcgaaaaaccccagtttggctgaagagaacagagatataaggtcaaaaagaaaggactagatctcatgagccctctaggttaggatagcaacatgtgctttatctgtagtgccagtgagcagagtgattgtgtaggctacttgtacatgtactgtataaattggtttcctcagcacccatccaactcactttccccttttttcacttgtcaaagctggaaaacaaaagtctctacttcatagccttgtttgctgctaggggtggccaagcagcatagatgttgccaatgaaatgcaggtgggaatttctgaggagggcctccttcttaaatagaaaagtaagcccttctgaaaggcttttagcttttgctcctccctttctttttgcctggaatgaagataggatgccgtgggacagagcagccatttagtgagttcatctgaggccagaggcacacattaacgacagggaccagcaagagaaggagcctgcggccctgatgacagcctcaaggcaacaactcctctggacttcttatgtgaggacaataaactttagtgtttttcacgttttttgttacatggagctaagtgatttctaacagtcacaggggataagaacaaagactgtggcgtcagtaagactagagcaagtcccatatctctctctcactagctaagtgagtaaatcacttaaatctctgaacctcttatgtttctcatctgtaaaatgaaggtaaaatagcacctacctcagggatgtggtgaggaggaacgactaagcctgtgaatccatcagcacaatgtttgccacacaggtgcttaatacatgttagtgattcttatgatgaagacattgttggagaaatttaattataatggatggtaaaagttgcgctttttaatgttcttttaaaaactggacttagtttctgcatgtgtctatatgaggtctatggtaaaattgtccctccttgttcattgtttcagcaacttctaatgctggctctaacaatctgtaatcacatctagctttgttcctgctttactaataatgccctttgacttttgaggcttttggaacagactttatgagagttctctaatcaaagccaactccaatgcttcttgatgtagctttcttcagcatccctctgtaatcttcagcaacaatgcttacttgataacagcctaagtcacatggtattgcaaatacttgcttacccattagtattctcagcagactaaatttcttcaagggtggggactatgttttacacctttacattgtgattagctcgtattaaaagagtattagttacttgttttcttatctacaatatgagttccacattggtagtgcctttcagtgcctaaaacagtaattggcagatagtagatgctcattaaatatttgctgagtgaatggcagtttcttaataagt

SEQ ID NO: 316701 - DNA, 4001 bp, Homo sapiens
cgtgccacggacggggacgaggggatggcggggacgacgacgtgggcggtgggagcagagtgcctgcgactcccggggcaggaaggaggggcgggatggttccccgcgcccgaaatccacggcgtggcggacgcggaggagccccgagtctcacaaccaaggggtgggaaggaaaagggacagagcgagacagagcgcccccgagaaacacaggcgcacaaaaaaagacagaaggaaaaacggaactgagagccagccagcatggactgcgacagcgtgagagtgcatcaaagaggtggcgaagaaagcactagaaggcaaaggagaagtggagagaagaagaaacaaatggaggaagaaggagaaagggaaaaagcagacggaaaaagtgaagtagtacgagggcgtcccagcggggcggcccgagaagctccagcttcttcccgagcggccgccgctatcccccgggggggcgtctggccccactccggaccacgcccgagcgatcctggtcgccgactgccacagccgtgcttcccggcgcgggatccaagccgcggagccacctgttaggcgcgcgccgtcggaagcccaggcgcggcggcgctggagaatcctctcgaagtttccgggtgcgcggggaggccccaggtgcgccccgacatcccgacacggcccagcacgggtaagtgtcggcggccccccgcttctccttcctgggtcccctcccgctgcccccggccgtggcgggaaggaaagttgtgcggagagttggtacctgcgctgagctccaggctggcgctgtcgctacccgtgccgccggtgccggcggccgccgccgcgcctgggccatacctgacgacagcggcgaacgaagacgacgaggaggcggcgggggacgcgggcggcggctgcgccggagtcctcaagtggccctgggatgtggcgggcgtgcaggacggcgacgacgacgaagcggcggcggcggcccggccgggcccgggggggtaggagctctgcgcctggaactgctgcggcggcggctcgctgctgctgatggagacggcggcgtgcggcgcgaagggcggcgggggcggcgggggcgcccgcacgtgcggcagctccaccagggtgggtcgctcgtagcgcttggccagcgccggtctcttgctggggaacgtcttgaggacgctgtaggggctgcgctgcttgtagattttggggacgctgggcccctcctctgccggctgcatctcttcctccatccggcgcctcggggccggtccctcggagcacgtcccctccccgccgggcgccgggctccgagggtgcctccgccgcctgcccgccgggtctgccctggtgcgcgcgtgtgggagggtgtgtgtctgtgccgtggccgccgccgccgccgcctgtcgctgaggctggcatcgccgagcccccgcgcggggggctgccgcccgagctcctgattgacaggctgcctcgccaatgcctggagggagaaaggaggtaaagagcaagtgtttagggtaatatctgctaatgataatgggggcggggcggggcctggcgccgcagccgcccgcggggtctgcctggcggctccgcgcctccgacggggagcgggggaagggggaaagcgaggacctggaggacgcccgggaactggtgaagaaggtggggatccgggatctggctacggcgagactttagagacccagatgtggactcgaggcttctgcggctgcgggcggggtccggcttccgaaacgagctcgtggcgccccctgcatgaccccaaactctcggggttgcacagaggaggggctagtcgttggggcggggtcgtcagagtacgtgtgtattacagcaagttcttctaccaatcgggaattgctctccgatccttctgaaaagaacctcttgaagatcttggcccgggtggtcgcgcggtgtttacggggctttggggtcctgctttccccgagcatcgcggcctctgagctcatgcggaacataaaagctcgcaaggcgtagaactttttcacgttttcatttgtttcccgtaggggccccgagaacgtgcatgacaccatgatttcccccccattataaagatgagaaaaccgaggctctgagaggttgaagggaattgcccaaagtcagacactcgggagtgtgcggctgtgttgcactgacgcatccaggttatttgaagtcaactcctcacttcccatagccagtagcctctgtgcaattgagtggggaaatgtcctgatacctccctttgaggtgatgattactttcaacagtgtcatttttaatatatgtatatgtacttgcaagcccagggaaacacgagaactcactccttgcattgttttactcactgcaactggcgccatccggcgagggtctggagggtgcccaatttcagtagccgtttgaatgagagatctcagtcgttgggaggaagatcctccatgggatgcagatgtcctggtctctcccagccactttttggggcagagggtccattgctccctatcccaaatcacccctcttctaggccaaccagcataccctgccccaggtttgcttttcagccttcctttttcgttctccaggtcagagttctggatgctccttgatgtaggaccctcatctctgcactctgaagtttgtttccttttcagagccttccttttattcttaggaaggtgacccattttcttctgggggttcacatcttttggcctctctttccctggtctccttccctttggaagctttttctctctgccttgctggttcagcttctgtattattcccccctagattgtctccctctctcctgcagcttcctcagatggtgctgtgtcccccccccaatccatttattagagatgaaataaataatgccataaatataagtatttgggagtccaggaactgtcagggctgattagggcatagaggacattttctttctcattatgcaaaagcatttcatggggaaataaaagaggtttcattgtaactcatgcatgtcatatttcaaggaattcaagatattaatcatatttaacattatttgcaatgtttctccctggcttctgaaaactgctaaatgaggacacgtggatcactaggaaaaggagacaagcatgagagggacagttaagaaataatgaaatgctggtgaaagagaaagagaatgagatgccagggagatgtttcttaggcacgtaagtgagaaatgggggagctacttctgagacgtgagacagctgaaattgaatgatatactggaggaaataaatgataacaaacctccccacactttcctttctataaagcagttctgaattttgcattgaaatgttttcctcccactttactcccagataatttgccaataagtcctggcttttgaaaagaaattggggtggtggcagtgtggggagttaagaggagagaaatcttttagttcttctgaagaagtaatttcctgtacctgggggcttcctcttctatgtagttttaaatgtatatcctcctcaccacttaaacaccttaagagactgggaacaatacttctattgtatattttctattgaaaaggacatgctgtcctttacatcaaaaagtgattatttctataaaactgaaataatcaaattagtcatttagcttttaaaagtggggggaagggggaggggaaggtgcccagaggaaaaatatttaaaagttttaaatgatcagctttcagattttcatgtgggcagtcacctatgtctgcgtcctgagttcatagaaaagtgaagtacttaagaatcacccttttaaaaataaaatgagcatttactctaagtgtggagttgaaggcaattttaaaattatagctgaccactaacccctgcctgagattgtatttaactgagtattgtacatagatgtaatgtatttaagtgttcataaaattactggtagca

SEQ ID NO: 316702 - DNA, 4001 bp, Homo sapiens
gtaatctcagcactttgggaggccgaggcaggtggatcacgaggtcaggggatcgagaccatcctggctaacacagtgaaaacccgtctctactaaaaaaaaatacaaaatacaaaaaaaattagccgggcatggtggcaggcgcctgtagtcccagctactcaggaggctgaggcaggagaatggcgtgaacgcgggaggcggagcttgcagtgggccgagattgcgccactgcactccagcctgggcgacagagcatgactccgtctcaaaaaaaaaaaaaaaaaaaaaaaagaaaagaaatataccatgctctgaaatagaagctacagcttttcacattagctctctaaaggaggtatactcaagccccttttctttatcccactactaaaaaagcacatgagcagtacgtctatttcaaacacacacaaggaaatacgtaaagctcttttcagaaggaaatcatttccaataaaactcaaaatttctattaacatttaaattataaaccaaacattggcaacccacatatatatatacacacacacacacatatgtttgctatggacaaatgaagactgtgaggtcatactttcaaatacaactttggaattagtcacaaaaaatcaacatatattctcagaaattgtaccatttcctttggtctacaatccacgctataggaggtttaatataatattaaataatgtaccatttaccctaaaagtaggttctagaaaactgactattaggattgaataacaaggctttaatggctcaattttcttatgattatacaaacatataaatcttgaaaaggtaacgccatttagtaaaatccataaaaataacagttttgccacagtgcagagaaaagttcattcagtttgattccccatgccctcgacaagcagctttctgattagagctggaagacacaggctgggtgcagtggcgaccccgtagtcccagctactggggaggctgaggtggaaggatcacttgagcccaggagtttccgaacagtctgggcaacataccaagaccctgtctctttttttaaacttggaagacataaagtctatacattctacactgaatcatgaatatactacggagagtttgtagaaagtaaactttaaaatcccacactccaacatcatatatgtccataagcaggatttgcaattcacttcatactggaggtaagcaccccagctggggtcctcttgccgcagtggtcaggccgtcagagctgaggcctttcactgcaacaagggaagtagtcttcggtccgaaacaggacgggggcttcgtagccggcttgctgtggcctcgagggagcagacttgctaaagagcgagggcacgttcatcgtgtgcaggagcttcttgaacgccctggggaaggtgcccagctcggcctcggccttggtgacctgctcctccatcctggccacgcggccccccaccatcctcacgaaggcctccagccggtcgatcctgctgtagatgcgccgcatctcggcggccttcgcgtggatgcgcggcacgccctcgctgacgacgtgggacgagtcgccgcgaagcatgtccagcatgcccacgaactcgtccactctggtaagcaggtcctctaggctcgcgtccagggcctcgacctcgggccgcgccccggccccgggcagcaggcaggcggcgtagcccgcagcggcgcggcgaagcagcggcaggtcgcggcccggcgcgccgtcctccgcgccctcgtcctcccacggccccgaggcgctgctgtggctctgggaaacagtgccactgtccccgctccaggcggcgccctgcggctcggcctcttccgcgagcccctccggcagcgctccgccatccgaaaagctaccctccatggcccgcgaccacccgactgcgcagcgctcgcttccggcctccgcgcgctcacgctcacgcacccgcacacgcacgcacgcgcgctcacgcctttgcttccggcggcctgcgagggcgtctgttcacgcgcatccacctttgtttccggcctcccagcgcgctcacgctcacgcatgcgcgctcacgctcacgcatgcgcgctgctgttttctcacgcccgaactcacattcaaccttttttttcttttttaagcgaaggtatagcaggaatacaatacagtgcatacattttaagtgtgcacattgatgactttgtacacatccatacaaccatgcatcttctatccagaccaacaggtaggacatgtccagcacccatgaacgtctccctcctgtccttcatttctttttgctgtttatagtaaaataaatgagataagcaagacgaaacacaaaagggatggaccttgacgactttggatgatttttaaagtcctcagcttcgcctgattgcaaatggcgtaaaactaagaaatagtaatagtttccaagcaaatatcaaatccagggtactgccagaaaaaaacaaaggtgaagttgagatgtgacggttaaatcctttaaaatctcaaaaaaaaaagcaaagacggtgcctgagaataccattcagttagactaacagctccttaaagagattaatggtgtggctcacagagtccatcagtcaaaccacaaggcctccagaaggcttaaggcttgttcgtcagtattagcagaagcccaagatagagatggacttatctcaaagggatttgtaggtagcacttttgtttaacggagtgaaccccgatgagattcacaggagacctataaagttttttaaagataattatattgacacaaacattgcagattggactgaaaggaacaggcctttggatcccctctccccaaacttgtacaagcaggaatcagactgagaaaaagactcattggcaaacacatgccacatttcacaaaaaaggaagtataactcagggcatgaaaccaggagcccagatggtggaactgggagtcatggagtcctagaccttgagactggatggcagagttactgtgggctggcaacttgtttgtacttccaatttccccctttttgaacaggagtggcagtggctaatctagtcgtagtggagcagaacaggtctgtagtgattatcctgtgccagccccacaactgtatattccaggcatgggggcagagaacttgtctccttagtttcaaaagtctacagatcaagaagaattgtactctaggagctgaatttaaggaactaagctcagaaagcctcatctacatctgatcttattgagaagacaaaattctggacttaaagctgatgtgacaataggatagtaatacctaaaactacatgagatttaaaaaaatgtaacttttggggaccttggatagaggggagtgtggttagcacgttaaaatggcatgaagaattggtagtcagggggcaaactgtgattgctagccagccttcaagatgactcccagtgatttcttactcctggtattctcactcttgtgtattccctcttgtcgagtatgtactggacttagtgacttcatttgctcataataaactgaaaaacacagaagtgatgatgtatgatttggacattagttcatgaaaggtagtgtggcatctctttccttccaacctgcgaaaggaagataaatcttggggtcctacaattactaagctaaaagaaaagtcaagttggaaactgcttagggcaaacctgcctcacattctattcacagtcacttctccgctcactgagataaatgcgtatctgattgccacctttggagaggctaatcagagactcaaaatgtctgggcgcggtggcttacgcctgtaatcccagcactttgggaggctgaggtgggtggatcatttgagatcacgagtacaagaccagcctggccaacatggtgaaaccctcttttaaaaatacaaaaattagccggttgtggtcgtacacacctgtaatcccagctacttgggagactgaggc

SEQ ID NO: 316703 - DNA, 4001 bp, Homo sapiens
tggttgaacgaactctccttttgaaattcatctttattactttccaaaattatttttttattgaaaatggcttgcttagggtagtgataagatatgcttagggtagtgagtaatacaagttacaaattcaaaatctaatttgtgaaatgtcagtattttttttctattaaataaaagacccatctgggatttagtggaatgagtgagtgtaacactactcaagctacatttcaattagttactaaaacaattcaaagacagaatatggcatttgagtgaagagccatgtgcttttaaaacctacaacacaatctaaaccaataattgaaattcatgtgtaataaagagctagaaaactttatagtatagtaaatcttttataaagaccactcaccacatattcattcttctgaaaaactaaggatcctccttctcccacctctccaagtttcggctaagatcattattctgagcaatggttcacgaaacaatgatatgtacacttgaataattcacgatttctttctctttcaaatattttatacaaaaatcttcaggttttttcccttgtgctaatttactgttgtgtatagcatttcaaaaaatacaagcggaatctcagtctactgttttcaaaccacatcaacgtctaacgctcggagaactgaatccactcttcgattttttttatcttaaccatagaacttaaaagggccatttatcaacaaaaagtatttcttttaaagtgtttattttgtagtatcattttgcaactaaaaactcaaaggccaatgaagcatgcagcacacagggcaagtattttctacaaggcaattatgccagaaatacaaaactaaattctaagttcttcttttaaaatggagtaaactttttttgtaagtagacttctacctgccgtcataacctgttccagatcatgaaggaccgaccacaaaacctcgttaagtgaaagttaacctgcttttatatcaccttttaaactactatcaaagagacatactgggagggcatgaatagcaccttgtccaacagagaagattctaaataacaaagataaatgggctccaagtttacctgctcctcagtgcaacctactaactgaatttagagcaaaggatcacctccaacacgcacacatgcacacaaatacattgtttttcaacagatgactgagctgcagcaaagcccagcttgacaccaggggctgcagggtcctatgccctgcagcgcgggtggaggcttagatgaaaaggccaacgcatgacacccgtctgagccacagctggcagaacggagcttcaaccctgttcgatctgaccctctaatgagtcactggcccaatcgtaacaccaacccacttcctagcccgtctactacctattttctcgcgtcaaaaagcacagaaaatgatttaaactaggcatgagagaactgtgcaccggccggggcagccagcggcaagaaaagccagcttaagagagaaagcccgagccactctttaggagcccccgctggcccggcagcagaggaagaatggggtataagagtcagtccggagggcgaggacccggagaagccgccgccacaccccaaccctccctcacctgcctgtccgagcctccccgggcgcccgtaccttcggccagcgactcttccagggtgacctggtggcggccgaccgcgaacacccggacccccacggacgagccgccggagccgcagccggccccggccccggccccgccagccccgccacccgccgctccgccgccgctgccgccctccgacttgggcatccgagagaacttcttcatggtcccgccggcgagctggagggcgcagggagcgtgcaagggcaagtccccggcccggcgcgcagccgggcgtccgcgaggggtcgccgcccctggcccgtccgagcgtgctgcggcccgccaagcctcacattccgcgctccccaagcgcacagcctgggccccgccgcccgctccgcggctccgctgcagctgcccggctcccgcagagggcggtggggagggcggggacggggcggggcgcgagggggcgggtccgaatccaggggcgacgccgccgcctccgccagtgccccgggcgtcccgccgcctcactaagcgcctggagcgcgagccggggtagaggaagagagcgaaagaggctgggcggccggcccctccagggagtgggctagacgtctcaggccacaaacccgcaggaccgcagcccgtcgcgccgccgccgccccggccgaacccgcgccgcccgccactcgtggccgttggcggggggggggggggggcgctgctgccaaccgctcactgaggccgggcgacccgcgcaggcgcgctgcccgcgccgccggaagtgacggttccggctcttgtcacgtggagggggaccaagggaggtgattgtgggggttggggactagggcaaagtcgggggtcccgggtccggggttgcgccgggagggtactggccaggcccgacttcaagcagggaggtggcccgggactggctcccgcgctggtcacgcaccggggtccgtcatctcgaccgggagtcgctgtgccactctaggggcttaaaaatgccgccaacaactttacccctgctgaggaacttctcgcttcgtttcttagccagttttccaggccttctcccttgagagtctccttccgctcgcccaccctgagcgtaggaggtgggagcaggacggaactggagtggattccagtaactggacttctaaaccggctcggtgtcgtcgcgctctgtagcggacgcttgtgctgggaagcgttttgcagtttataaattacttaggagtactttaaacatctcacgcctgctgtaccacagccatgtgggggtattcagaacaggtattaaggtcgttttgcagaccattcatcactcttggctaaaagaacttaacggagtcgcccaaggtcacacagctggctcgtggtaattggggaccattctttgattcataattttgtgcttttggccaccctgaaaaagtaaggtcagatcgttgaaaaacgggcagatttaaggctgtttggaagcaaaagcgaccactgcgttcccctcaaatcaaagagatttgcaccccctaccaaaaaaaaaaaaaaaaaaaaaagccctgttgtatcaatttcataaactgcaggagtctcccgactgcagggtgaagcaacaaaataaatatgggtgtaaaacattcaggagtggtagggaatggcaaactgtagagcctgtgtaaagagagcagccaattctcagctccagcctacttttccacaaaagaagataggcacacacactgtgcccagaggttccagtttcttaagagaaccaaaaacctggaactgttttctaatgtggcatttccctaatttttaaaatatagatcaaataaattgtatctgcaggactccagtatgcaccttctatgaaagtagatgaatgtggttctatccccacccctatttctttattctttttaatgagataacgggtagaaacattagaaaatgtgcttagacaaaaactttgaacttaaaatccttgttctttcttccctgctatttgaagagaagctatttctgccaacactaaaatagtgctctggatttaggcatttctgctacataacccactaaactaaaattcttcatccagagacctgacgtttaaagtagattccagcttagtggaagtgagattatatgtcagatgattgatgtggtgtggcagttggggatttccatttagaaacaagctgaccactttcgttgctgtggggcttcattgtggagtctcattcctaaatttgaattgttttttaagcagaataatggaaagattaagtcatttcatgcaattcaaaactggagtcagacaaacatacaaagtttgggcctgatataacttcacctgatcacaacaagcct

SEQ ID NO: 316704 - DNA, 4001 bp, Homo sapiens
caatggctaggatactgtggataacacagagcaggtttctttttccttactggtggcgctctcctcacagatcatgctcatggttttaagaagaaagtaaaatctggttcagttcagtctctagctaaagacttctgtattaggaagcataattcacatctattgtaaatgtcatcatgcctgtaagctctagaatatatttacacagacaatgcagggctttccttgatgaatgccttagttttccctttttccaggagtcttgcatatcaaaactttgggagatttctttctagtgattctgacagtattgactgaggcatggcctcattttcttgaagattcttggctattgttcaactgttcactgaagacaggctttgcagttacatttccccttatcatgaatgtagtgaacaaaaaagcctggtgaatcctcaaagcataaaaacagagttagtgtccaggaagctttccctcaagctgttaacacaagggagggaggctgttagcataagttattcccttcaccacaggggctaggagaaaccttgttaagccatgaatttcagtccgaagtgatctgtgctgaaaaatgggatgagcagattttcttgggcagattccaagaggtgtttacatccagggttgctccctccccttgtctcccagctcctcccaggatggatggtacaacccctgtttacccagatgcgttttaataatcgaaacacccaagcacctgttttttttttttttttttttttttttgccactaaggaactatcaagtaaagtgtcaaatatagtacagtaacacaaagggcgcgaattaggagcgggtgcaatatctggagaagcgactggggaaggagaaaaggagaggggaaggcgtcttattcaagtatgatttctctcgggtcctggcattggcataaaatggcatctgcctcttagtaaacatggctaaagcccagtccaaaggaatttccgctggccgatttaggaatcaacagaataaggtaccctagaggtgctccagtcactcagggcaggaggcctcacaggcatggggtgtcgccccttccctttttccacgaagctcctccagcctacccctccactgctccgcgccttcattctatttccccctctcactttggatttgaaaactgggcttacaggagatgcagctggcgacacgcggggtgtgactggacggaggaatccagagggcagctgaggagggcggagaaaggtccctaggcagcgccaccaagcaaggggcagacaaggaagctgtggggggtcccgggagaaagctggggcgggaccgcgggaagggagtctcacctcgcgcactcacctgctgctgccgcccgaaagctgcgaaccgtgttgccttcgcgcaggagccgagggcgccagggctgcgagcctccctccagggagcccggtgtccgggccgcctggaccgtgctgtacctgtcatagagccgcagcatgtgttcagagaccttgtcttgcggctgcagctcggagtccgggccaccacctgccgtgcggtcacctggcacagctttgcggagctccgggaaaggtggcttcggtctctctccctgcgccaggctcacgcagaagcagcccagccacagaaagagcagcctgctcgccccagccatggctaggtacccgcgcggcgcgtcggctcccggcgtcgctgcgggacactccgaaggcgcaaggagccggcggcggagccgagggttgaactccaaaccagctggggcgagggcgcacggagcccgggacgcggccgggtgcagcgagatagcggccagccccacttgctgcgctgacccagcgcagcctgacaggtgggctcttccccagcagctgcgcggacctcacccgcgcagggcgctgcgggcgccgtctccactccaacgctgagaaagagctgtaggtcgcggcgtgtgtggcccgggtgttttcaagatctgtctgtaccttccctcctcgctttatttttgggaacacccggccaaactggccgcgcgagggactaggactagctctgttttgggcgccaggtcggagccggggctgtgcgcagcggtccggagggcgctcgattgccttttccagggattggagcagctgcggcgcggctggtccgagttttttagtgtacgtgtgtgtgtgtgtgcgcgcgcgcgcgcgcgtgtgtgcgtgtgtgtgtgtgtatgagagagagagacttagttctttcgctctctagctgatctgtagagtcctcagccaatctctcccactccctcgtcctcgccctcttagcttgcaccaggctgggatagaagcaagggagggggggagtaaccagagaactggcagcgggagggagagaagaggaagtaggggtggggatggctggggagaggaagggaaaaggagattcaggactaaagaaatggtaggagggacggtttttttgttttgttttgttttgtttttgtttgtttttttttttaattctccaagaacagtggctgtgtggtggctagcaagagggcagaggaaaacagaacttcttcctggcttttcggtcttatgattccaaacaaagtcacaacgtgaacaccattctcgcttactttcccgagcctcttctgacggacactgcgggcccctgcacctgcagcccgtcatcatagcttcctgtctttctgagagcatacccatcataacgcccctctctcccgcatcatcttctctcgaggtgagaaatatgtgcgagtcaatatcatgttaaaaacaaataagaaaacaagcaaacacaccacaaccccacctacagcttcccccaaaggtttccttcctacaggtccccaaaaggtttcccagcaggatggtgcagtggtggctaaaaacaagggtgtgtggaagatcccggagtccggaacagaatgtaagagtcgctagctttgtcttcctaattctctcttgtcatggctgtacaatggagattaaactatgagcagcctggcgcagtggctcaggcctgtaatcccagcactttggaaggccaaagcgggtggatcacgaagtcaggagttcgagaccagccttgccaacatggtgaaacctcatctctactaaaaatacaaaaattagctgggcgtggtggtgcgcacatgtaatcccagctactgggaaggctgcggcaagagaatggcttgaatccaggagatggaggttgcagtgagccgagattgtgccactgcactccagactgggtgacagagcaaactttgtctcaaaacaaaaaacaaacaaacaaacaaaaaacaactgtgagctaacatttttctccacacttatgctctagacatgccttgttatttatatttcaagtatattaccaaataattttcacagcaaaacccattttacagatgaggaaactgaggcaaaaggatacatagtaagtgacagaactgagatccaaattcagggagtctgatttctggcctcaggccagataaccacactattaatagtgaaattagcatttaaactgaagtttcagtgtgcaatccatgtaaatgtttagtgcagttcttgaccatatgcagtaaaatcttcagtcaatgtctattgcatttatccctcttcccctctgtagggcaatggagttgatcgaaaagaagataggctcctggagtcacaccatgtctccagatctgagtttcttctttgatggtgaataacaacacattccttttagagttttgtttggatgacattagaaagcagtgctaaagtgactggcgcactcactagcctttaataggggctcaatccctttctatcctaaatttatcccaaatccagactacattctccccactcagtcacttcttaacccactgcggtttggattttgcccttagccaccccgggaactgttctgcagataataacacatatttcaagagtagt

SEQ ID NO: 316705 - DNA, 4001 bp, Homo sapiens
aagttttgtagctctaggccatattttgctaaacacaaaggtacattatgcatgactaaagaaaacagtgaaaatcagagcaattaatttcccagctatgtttcccataaaaagacatcactactatgatctgcttataacacaaacttttttgcattgcacaatgatctaagtgtgtaataacttacatatttcactaagatgtaacatccttcaaaacatccttataatgaaagttttccaaaaacattattgatcaccggcatgtctcatgttttaaaattactgacgaatcctttactattttctttacagctagaaataattcttcttgatcactagagtgtaaaggggtataaagtacaaagactgaatattttcttaaatactaacatcccagttgacacaggacatttcccataacttgcccaaaacaataattaggagagttgtcactggaatcctaaaaatatatgtaagaaaacagagattcgttggcatcaatttagcacagcaagagatttccattaagtgctttttcaaattatttgcaaacactttttagctgaaccctctcatttccagtggagccttttatgtttctttgcagaactcaagaaccttttctcaggtggctctgctttgctgcaggtaagtttggtattaacacattttctttatctgttggaggtagtgaaacggctctcttcctccgttgtctttcactggcacctttgtggccgctcgtagtcactgacctcaccttgctggaaaggtggctaagaaaagagcagtttctaataactcaagggaactgcagcgtttccattcagaacaaacagcaggacccagctggaggggtgcagctctaaagaagtaagacccgcaccacagcggacaacttccagaggctcttctccaacaccgccaaacacaggcggaaacacggagcctggacagaaagagggacgagcagagagatgggcgcagagagcaagagacaggggagccaggaagaccgggagcgaaagcctcttgagagagagagagagaccaaaagattgtgcgaaagtgacagagggaagaggatgaagggacagaggagggacacactgggagagccagagcaggcggtggggagagggagacagacgcacggaaggaaagagagaccggggggagaggcaaaggatagcaataaggagaggaagggagaaaggaagaaaagggagagaatgaaagacccagaacttgagagagaggcatagagagagagaagcaggagagagaggagaagagacaggcaactgaagcagagacggagcccagtccaaggcgccgggaccagcccgctgcgcactttcccccacggcaaggctgggtctcgggaggcgtccggggcaggtgggtgcctgcgggtcccgcctgggctggccctgggcccccgccccgccgggctccctcccatttcccggattccgcgactgccctcagctcgccctcccgccccatccctccgctcgcaggtccgactccctgccttggggcgtccctacagcccgaagcacgtgtcccgcccgccgccgccgctgccccgactcctcgcctgcgcaggcacgaggcctcggggtcccggcagagccgcccgcgcacaaagccgaggcggccaccgcctgaccccctccccgccgccgccaccgccccacggccgcgcagcccgccctcgctctcgccctctccctcgcgcgctccgtcctgcctagggcgaccgccgcccagctccgcacccagccgctacccgtcccgcgccgcccctcgctctgcccggctctcgccggctcggccgcctcccgcgcgctcgggaactcggccacccgcaggggacggggccccgccgcgcgcgccttacccgcggctgcgctcccggctcccgcgtcctcagcgccgcggtctccgcactgcccggcgtcccgcgaggccccgccgactccgcgccccgcgcccggctgcgccgtcaacttctggccgccgcggccgctccgccgccgccgccgccgccaccgcgggactttttttttttttttttttttttttccctctcgctcctcggctgcctctggaatttttttttttcacttgccctctccagctcccactagtgattggagactgagagccaagtacttagcggagggattacacttctcaacgcacttggagcggccccagcgccgccgcctgtgtgcggagtgcggagccgacttggggagcggcggggtgcgggccggaggcagcccgggtacaggggtgcgcttcccaagccccgtccgctgctcagagcatccccaagatttccctcatgggtcctgtcctggttgtttaagaaggtttccagaaaacctcctggtttgaagaacaaagattcgtggaattattgtaccttgagagctggaaagggctcgcagagatgatataatgtcgtggatttcaacttttcggggccatagacacttttcagaaattgataaaacgttgacacaccttgtaaaaaatgaacacattaaaattaagcctgcagtttgaggtgggggttttaagaatcttgaaatatatacagttgagcgtccaagggaaatgaaatatttcccttctacatattttttgaaaccgttaaacgaaaacaaccaccaaaaaattaaaaataaaaaaataaaacccaaaagagaaaacccattccatttgtatttgatgacagtttacagttagtcgtgtttcttttggaaaagtatgtaacgtcttatactttgtggtctccttgctaagtctttaagtgttgaaacactttctaagtgggtaaatataaagtaagctagttcacagtcagaaatttggggagaatagttaacctctttaaaatcagccattttgccaactctatttcccagggagatatctcgtgacttccaaatactcttttcctttcaatacctttcagcttcccactctccagcattacttattttctccttctgtaaaatttttttcctccaaaatattgacaaacagtctctggtcaccaccaagtgtgtgatctaagtcatttttttttttaacagtttttcaccctgaagtaactttcttccaattttcttcatatctatttctatattcaattcttagcctactattttctttcaactactcccttttcttaaattgtttctattaaatcttttttaaacattaaatgtaatctttttgcacttatcaataaaaaattcatttgtgtatcaatttattttatgcagcttgcacttaaagcaggcggtgcccccagtgtttattgagtgtatgaagatgtggtcatgttttttctataaaagcaatgttagagtctccacaaaggtctttttgccccatgatatatctgcattgtgatttctaatgccaaactggaagaagaaaggtatctgaaagaaaatttccaaaacaagtgaaattagtcattgacatcatctgaccttccttattcaaccactgttccagtccccagtaccagtactcatcctcttgccccaagaattccaagataaaatccattcattttactctcatcccaattcttctctgataccctcactcccaccccttcccttttccacctcctttctttcaaaacaataaagcatatgactacctaaattaccttctacctggtcctcaatccaatttttcatcatctccatcctcatattaactaagtgttttgtggggagaagggggcttgaagacacggaaattataacttctacaccattaaaataaaagacaaagcaaggaattatgagctattatgtaattaactaaaaataataaattatcgaaaatgaaatgtgagtttagaaatatgagttttaaatattgaaaataagataccaaattataattcattacagagcttatgattgtatacatagaaaagcttagagaatttactggaa

SEQ ID NO: 316706 - DNA, 4001 bp, Homo sapiens
attttcattttgtataatatacctgcatataaaatattatttataaatatgataaccaatgtcaggatggactacagagccaaaaataatactgacaaggcatttcaagttttaaaacactcaaccagtcttcaaacaaaatacatcctaatgtagacattatcaaccagtgtcacaattttgtatttcttcttgatttaaaggaaaactttctttagtttcttcttattgtagttctttatttgcttgccttgttttctgcccaaatttcaacaaggtacttcagaaacaagacaccagaaggaataaaaacaaaaccaataaaaaggggtaagaaagcaattatcatgctagtatttatgcaaaatataaagcaaaaaataaaagatactgaataaaaatctgaaattacaatcttgatcatgagatattactcaaaggcaaaagcaaataaaaattgattgatgaacttagccagttagattctataactgggaaatgcccattctagatcaatcatggttgtattttcaaaataaagatattgtcaaaaatctaaatcaaacccactaataaaatggaaatggtaggcagaattggaagaagtacaaagattcacatgataaaacaagcattaaatgaatgttaaaatacagtttaagctatcaattagattagccttaaggtatttctgaagtaataaaattaattttgaaacattttgcatcatttgaaaagttatatacgcattcaacaaaagtgatactgcacagctattggtctcattttaaaattcttactttacatttaaacatattctacctgttgttttagatctggcttatcctattttagaatgggctgatttctgtatttcagccctaacacaaaatctgtgccagagtattagcttttcctcatatctctaatggtgtccagtttcagctctacagcagcatcaatctcatttttgtttttaacttaaatatgtagtacagaaaaccctttggacctataatcaccatctataacctaacttaacagttctaaatatcatgctaatgctgatagttctacattctgaaaagcaatcaaggaaattttcattatgtcagtagataactctcctctagttaaggccacagttctagtgaaacaacataattgactttctagtccatgtgtagtacatataaacatacaagtatatatatttcatgagctagaaccagaaaatacatagaaaacaattctttctgtctccttcagtgccaatgcttttaatgataatccagaatatgaaaaaccataatgaagatgaacatgctacagcaccgtgaacatacacagaaacatatttaaagtgctacctgtgatgacaggagaaaaagaactattaatgcataggaggagatgttaattttagtttgagattgagtagggagtcgcagtttttaagaatccaatagcaagtgacctggacaagcagagaacttctcctcagtgcttgcctttggcaccgtggattaggaagactgttctcacttctcaccaccccaggttctctctaatcccaaaggtactatttcacttcagtgcactggcaaatggaggttggcttcttttataaaaagaccccatgttaccccaattcccagcttccacattttgacactgactactgcaccttcatacgttcatctgaatgtttcccttataatccatgtctagaccactcactacgataaacttaactgacactaatgttttaataccgacataaaagtaaataggactttaccaactggaagacctcgagtttgacagaatgaagagacagaaacttactgataggacacaatatgaaattggtgcttgagagctgttcctaccacacgcaggaaacgtcttgtgaatgtacccggcattctcaacagcagtacacaaaacggctctgccaccaacaacattcttacccagcaggcagccctcctcattagctttgacatgccacacagccctttgcttactgatgcagtgcagccaacagggagagagtttacgagtaacagcgagactgaactggctaattacttaccttctcacttatggcaggcttgcttgtttaactttttgtttcctctcttgtcatagctcagagccaaatggttatgaatcagcagaagtctgaacctgacagttagaaagaatacattttcagaaaaaattggaaattaacattccctccactgcagtctttctttccttgccctctgtgtgcatgttactctcccgttttctctctatgcaaggcagctacgtagtggtctataaatattgaccctgacacttgctcagtgctttacttgctcatggcacaggtctgtgttactgaacaccgtggtaatactccggcaaagttctcagctgctcagacaaagctgtggattggctcactacccagcaaccctgtgcttgcctggaaataccattctgctgccagctttacagatgctatgggcctttcctgaggcccaaatcaggcacagaagggcaattattaagtttgtctgaagaaatacagctttcctcaggtaggtggagaaaagtggggctaggtggagtcaaagacaagaaaggaaatactgcctttgtttcggccaaacaacacaatctcaaaccctttataaaagtcatatctaaatgtcagtcaatcaagctttataaaacttaattatgacacattatgaatccaaatgacacaggaaagcagttttgtaatttttttaatattgcttctcaatgagaaaggctgcagtgactaagtaattggtcacaaaaaaatatgtcaacgtaagttcatttagagaatgacagaaatgtataggaaagtataacattaatcagatacatcatatatttagtgaaagatgctaaaatataacctaaaattataactcaacacaatatttacagtttaaatataaacttctatatttataacaacttaaaaatttaatttttagattaaggatagattccaagccatgacactacagtacatggtttgcaggtgacataaacaagatacatagtatctccatataccacctataaggtccacagtataaatgagtagaaaataaatcagcccatattttttacttcttgtcaaagataatcatttgtttgctttactaaaattttctcttgattaaatcaaaggtaaaggaaacttttgggagactctggtcacttactcatcttacagataagaaaatcaacccccaggctggttactttgcccagggtcacatggcaactttgtgacagagccaaaactagaaaccttgcctgattacttacagtaatgtgttccttctgttagaatggtggttctcaaaatcatctttaggctcatcttcatatgaaagcttactaaaatcttaccagtaaatgcaaatattacagccagaaaaataaccagcatagaagaaaaataactttctacagtgtaactgaccaaaaaaaaaaaaagttacacataagaattaactttcaaactatttgaaatccacctctccttgcttaatgcaaaaattaatattcatctaatgaattaacttattgtcgacacaggtatataggtgctgaacaggcaaagataaaacatagttcctactcttaaagaccttccaggtctaattccagaaaaacaaaatagaagttaaatgtaaaacaacgtagcaagaagactagaggaggaaaccatgggagaagggaaaatgagcatctgagccaagaggtaattcctcactccagacttctggatcctaaagaatgggcagaaggtagtgaggcaaagggaagaataacacaatcaagacaaaggcaggaaagagcacaacacatacttagaacttcaaatagatctttcttgctggagcttagagtgtaagacagaaagtagttaaaaacaaaacaaaaccaactagaaggaa

SEQ ID NO: 316707 - DNA, 4001 bp, Homo sapiens
gatgttcacagtcctatctcaatgtacatttctagcttggttgcctcctatttttgcataaattaattattaataatgatactaacaacagcaaactttcaggtaatattatgtgccagacactattctaagtgcttatgtatacttactcatttaatagtcaaattgatagtaaatataattattatccctattttacagttgtgaaaattgagacaacaataagataattcatttgagttcatacaactagtgagtggcagagctaagattaaaaaccaggcattctgggtccagaatttgtactcttagccactatgatagtatgatataagataaattaagtacaggcacatcacacacacacacacacacacacacacacacacacacacacaagtgccctgcaaagggagctttttaaaaaggttccctacacctatatgacctagaggaagacaaagaatgtctctggatgtcaacttcctcactggaagaaataagacattaagacattattttataccacattatgttaagggacattctaaggttagcattttatgattcaaagattctgtctgtagcatatggcctctttgctttttattggcataactcaatactaaagccaagtattcgtgtatttcaaagaaaatgctaaaagagaataaaaaatgactctcaggcaatgaagaggcagtagtagctagaatagaggaatgagaattttacctcacatatatcatgcttcgagcttcctggaacattcttaagacacagtttccctgaagtttttctattctccctacaacaatttttagagactaaactagcaaactaggttgatgaaatacctatcattccttcatatcaacacacaaaaattaaacttatgtatacggtataagtaaaaatacatttatatatacagaaattaaaaactttttccgtagggccaagccacagaacatagtatcttaatagtgtcacagaatactttgagattatgaaaatctgaatgctgtaaatcccaatcaaaattacacactcttctgataaacagtacagccaagttagttctataatatgcatccacaagtacataaagctgaactttaaatacatttcaatctcatacatattccctttatcatttggcttaattttataaagccattatttccttatttccaactctataactccctctttgcaatcactgccacggccagttatattcagttcattagcttttttctcatttgaaaatagctcaaccactcttaaaattactgtttaattcaaaaattttaaataagctttaacattttctatattttagtcaacttcataaaataataattcttctgaacaaaattatcacaaagcaagcccctgttcttaaaggtgaataaacatttgacatagtcacaaactataattatttccattgcaaaattacagatttactcaatgcatccatataaaaatgatgatgaacttcaaagaaaactagctaacctataaaaatctaacagtattcaagctaaaataatcagaaaaaagtttgttagaatagctgttttcttaaattcttcacatataaactgtcacagtatattgagaatgaatttcctaaagttccaagtttaattgtatttaattctcaattgttagagaaaatagaaatgttaagtctctttaaaattattctaacagagtacttagaaagccttgccataatagagaaagtagtaaaattacagggcagttggagaatgggggatggaactttatagacattgaacttctggcctgaactttcccttctgcgataaaagccacgaaatcagactctaactcagccccatcagcactgtagtggagggcactgatcttcttaccccttgtgtgcatagagagaagaatgagcaagaaaatgtgaagctgccagtttagttcttccagccaacccattgcagcagcagagcagtcaatgtgccctgcctgtttaagcctcctgtttcttgcctttccgtctttcactgagacgcctctgctgccactcttgtcagatcttctcgcaagcctgccagcaaccctgagacaggaccgtgaaagacaagcctgttacaaactggttctgtcaccacagagacttcaactgatcacctcgtggggaggacaacaaagggcggtgaggaccctgagccggattgttttcttaagaaaggagcctgacccagctgcccacacaagggctagcacacgccggggcttcactctgcgctggcaatacccatgtcccccaaatctctcgggcagctatgaagggaatccatagcaaacctcatttaaaacgctgctgtcataaaatagtttgtttcttttaccaacatttttatctctgctaagaattttaactgagaaatgtaaaaagaaaacaagaaataatgtttttacttagtgaaatgccaaaaatagtgcaacagatcaaagtattgtgttacagtagtttactcacactacgtcaccagataaataatgaagtgaatacccttgaatcaagtgcacagatatgaaaagggtcacatataaaagaaatctctaatgaatactgcaagttaagatacttcagttatgactatagttttaagagctgttaacctaactgactattatataaataaaaccattgcaagtttttccactttttagattttaactgtaattgtttctcaatgtaaattatgaccatttttgtgacgtttcatttgccatgatattgaatgagataaagaaattttttcaaaattgtttttgttttactctaagaactgttaataataaaagaacaccaagaaagataaatgaattgtcagtatatgtagaaactacaatgctaccatagacaaatacaaaaagacgtcattattaaatcccatcagtttgtctgataaaggatttatgagtagagtagcaaatgtattacaatgtttatatctaagatatcatcatcatatgtttacttgatattttaaaaaatcttttcttggaaaaagaatctctgctttcttctcactttcaaaagacatccctcatttgcccctactcctgaccccatcctgcacctcccagcactattcctctaggtaccattcaaatctaccctctagcttaggaaacccaacaatgttttttttgttttgataattttacacatactacaatcaatcaacaccctcaatttatactttcctaagtactttcatgaaatttaagcaaaatacagaattttaaccatgtaggaaaccttaaactactctaagtttactaaactacacattctgcatttcacagaagccatgcatcttactcgtcagaaacatggaggttggtggtaattaaaaagaactgtctttgagtaatatttatccatatcccttttagttaggaaaagagattggtatatagtaaaatgagtaaggatgatcaggagcagagggttatgtgggaaaaacagacaaaaatcaagcaatagaatctgctttttaaaccttctatgttgggctcagagccacattcacaacatggttccactgccaatttggaatccagccttgagctctggggcaagaagtgaatagctgaaatgtgggacagctcccactgctcacatttccccaatatgggcttctataaatggctgaaagttaaagacagaatctctgctctctccccagaatcctaattcagttcaaaagaactcatatcagcaaccatttctgattttgaactatgtgcaagctgatttggttcctcaagaaggttataacaccacagaataagtatataagaaataattaagaaaaaatgtaagacattttaagatgaagtggccccaacagaataaacatggaaattccaagcagacgatggaacagactgggcccagattgcagggagagctggatgctgaaagacgaattgaacttata

SEQ ID NO: 316708 - DNA, 4001 bp, Homo sapiens
tttatattcatttgttttccaggtaattgacatagaattataaacctcagcagacatagaattataaacctcagcaggaatagtaattatgatagtaataaaaattctttggacatcataattacactctttaaatttaaaacaatagctagcctttcccttaggttttactctgcttttgaatttagagaaactcaatcaaaatgtttatataaattaaaaacctttgaaaaatctctaaaacacaacttgtttataagtatttttaataaaagcaacaatataagaacaaaattaacttgacaagcaagtaaccatgatttaaaaatatgcaacatcaaactgaagccactgtcacaaaatagcataatctcagccgatagaatgattaaaaattaaaaatgactttgtattttaaaatatttaatgtgtcaattcagctccacattgttagaaaagaaactgaaccgtggtctctttgacaataatgtcagagtcaactagaacttggcagatttccaagccaggagctatggttttattcagcagtttctatgaatgctctgcttcacagagttccgaagctaatcaaagtagatgttcaacttgcctccacaccaaaaattactctgcagctttgcaaagcactcccaagacagcctagtgtataaaactattttatagatgcatatatgtaaagggaagtgacaatgaagtcagacaaaccagaaaccaaatcaccgtgtttgtgctattctttttccccaaagaaaaaacctggaaaacatttagaacctctctgctcctaatccttaccataccctctaataggaaaactgttaaaggtaaccttagctattactgactttaaaatattcaaatatattgctagttcaaatatttaaatatttgaggtataaaatatagtatatatatttcaagctaaacactattatcaactattatcatcaccaatgagtttaaaggtctatctctggtgaaacaatatggaataatgatcaccaggaataaaatgaataagaatgcaatgtaaacattagaaagccatcatagttttaagagaacaaactgtaaaccaaagaaaactgtttaaaatctgcagtgccacccatgtgcttttacacttatctgttgtgcgtcacagaaaaattttctaagatagctaccaaaaatgatatgaattactaaaatatacttgccctcacttctccaaatgtacactttatcatgccaaaacaatttatatccttcctggtaaaaaataaatatcttagcaactatatttttgaaacattcatttgatctaacatctaaatcattacatttatactttaaagaatcattttgcattttttaaaactcatacttgcaagaaagaaacctagacctttataacctatgaatttagaagtgtatagttgatacattaatagtaaaagaattcacaacatcaaaaactataaaaaatttaaccacaagacctttatacaaccacaacacttgattttaaccttgacagtgttgaaaatgtgtaggggcaaacacgcactcacacataacacaaaagttaaaataatacatataagaacatcattaatttaaaagtaagctaaattatacactaccagaagagttcggctacatggtattttcttgccatgtaatttttttagacaaaatttttgatccccttgaattagtctatttcaccatctatgccaaaaaaggctaagttctaacagcttttattgtgccagaattggctttactcatcttgcttacattttttggagggaaaaaaaaaacagtctctgtgagatataaagcttctcccactactcacttttgatttctgtacgcttgatatatggttgccaggctccctaggatgagagacatgaggaggaggcacagaattgctaggggtttccactaaaaagcccagcaccgtaggcagcactaatcctgcacctgtgatatgttattcagcagttaagaaatgcagcccagactgtggttgcctaatacagctcagctgtttttctcagtagtccctttgattataagctggcaagagacattattccggtcaagcaatgagctatgttcaggacccatggcatatgacagtggaaaggtaaaaaagaaaagaaacctaggagtcaaaaacaaaacaaaacaaaacaaaacaaaaaaaaaagaaaagaaaaaaagaaagaaaagaaaaaggaaaaagaatgaaaaaaatgtcactgaccacagtgtgttatgtaacatttccagatggttaaaagctacctctgcgtctatgcaaggcagaaaaatatctagaattcatcatttaaatatctagaaatctatctttataatatcctttgacattcagaatgctatttcaatatgcaatgtcttaagtttatcttaagagaatctcaatttcacaaaccaatcaactacacaaacatttagaaatctttcattaaagaggtttacctttactaaatgtcaaattccttttaaaatttggaaaatttcaaaatgtttggaaaactgaagaccaaatgaataccattatttctatctttttattaaatctaccatatcatttgacttgattcattaaaaatttgatataaaatttatatttgagacacagctatcctattcatcatatatggttaaaacagaatgaaatatttattagagtcaagttaaagcctctaactagtccatattgatttaagagatatttgtcatacacaaatattaagaaatatttaccatacacaaatatttcaaagtgctgtaagcactttgggctcaaagagttgaagaagaaatggccactatgttcatgaaccttaaaatctatttggagagtgtggcataaaagttgtcaattttgttgttgttcttttgtcataaaaggtctgctgattgttcactcacaccaaaggttcactctatttccttttatactatagataaacataaaatcatgttcctccaagctagtatctgtgccactttaaacaaatgacctgaaatcttatccaaaaaacagatacctttgcctaacagcagatggttaaaaacaaaccaaaaaattcctttacaaaaagagctgaaatgaagaaaatatatcaattcaaaatgtaaatataatttttataaaatgtaactataatttaaatatatatattaaagaacatgttaaacattttaagttattttttattgctgtttatatactaattccctactagccaaaaagtatattaaaaattttgttagaaaaaaatatgcataggatatgtattaaaatcaatagggtcaacaaaaattcctgtgtacatgagaacattctctctcaacagaatttgacaaaccttatagttttcccttgtattcaaacacctgggttagaatactgcatttcaatttccgagtaacaccctgaggccgaatgaaagaagaatggtattcaagaagtgtgctgtaagatgttttactagtattcccctaattctaccattagtctatatccaaagtaaaataagacagttgaattggaacctggatatatgtaagtctagagttcatagagttttgataatttatgataaatcttttttcttgaaattatacttaataggctgaaatactgaaccaccatctactttgctttgatttgtaggaagaagactgccaaaggacaatcttgttgaattctgggcagaaacactaaggagagatctgaattgaaactatgttattataataattgtgttatcttcaatctgggcatggcacacacaggaacattctggcctgatgctgctcaagctctccctctttggataaataaatggcttcagttttcaaaacattctcctaaagcacttttatattcttattttttaaattgtataacacccagtatacctcagtggtcccagtctttaaaagccttgttaatt

SEQ ID NO: 316709 - DNA, 4001 bp, Homo sapiens
aaataacaacaaaaataataaaggcaatagaaattatttctaaaaggtagcagtgcatattcctgaagacaaaagtaaaaaaaactatacttcctaaatagatgaacactcccaagtgaattgaattctctgtggtgcaaaacctccaatatcccgaaaaaccacgttttacatagtgggcccagtatgagtccttataaaggaagatgtaccaggatattcaagagtttccccagaagacatagtggaactgtgtgcagttcacctgaaagctttagaagaaactgtggatgttgtaaacatgcatttctcaaagatacaaagctcctcagaacaactaaacatactatgagaaaaccctcgaccgggcgcggtggctcatgcctactgggcgaatcacgaggtcaggagatcgagaccatcctggccaacacggtgaaaccttgtgtctactaaaaatacaaaaattagcagggcgtggtggcacgcgcttgtaatcccagctacttgggaggctgagacaggagagtcgcttgaacccgggaggcggaggttgcagtgagccgagatcacgccattgcattccagcctggcgacagggcgagactctgtctcaaaaaaaaaaaaaaaaaaaaaaaaggaaaccctcatttcatcaaaactccaatccaatggacccaaccagatttaacaagcagacaaaaacaacccctacaaaccagttaattttccaacatgctttctgcttccagaattctagactgtactgtggttttccatccatctcactgactgctctttcctggtgtctttggctaattctttgccaatccagctaagtttacttgttcctgctaatgtccctttcactctgacatttggtacaaaatcccttcccctttccagcctctctttctggacagggaaccttgttgctgtcctttcccttctctacattactctcctgaatctgctctctttcctgtcctttctccacttcagtatctgctgtcacctctcctgcatcttttctccactgaatgactcggttctctctaccccaccttcctgtcccttcttaccttagaatggtgacatggcctaagttacctaaatcaggcaatcactgctagaaacaatactaaagtcctgtctcaggtttgcctccttatctttgcgctcccacccccacgatgtccagcaaagcatattacacataacttgattcaattaccatttagtcatttctccaaaggataaaggcccttaccgcccagaaaccttcaagaaagaaggcaaacataacttcgatacaaagtaaaatcatcagatatgagaatgaatacaaaactggctactgttagcgccactgtttccaaaccagttcctgtaagaacaatgccttagtcttgctcatcagaccggggtaatcactgtgccgaaaccatgactggcacgtagtaggtacttaaacactagtcggtaaaacgaaccaaaggacacgctaaggaatgaacactctgtgctttgcacagtccgtggcacacagctgcagctccaagaggaagccactgcaaaagaagcgcgcccttgggtcctccccttccctcgcagacccccaaacccggcgcgctcctaaccttggtgtccacgtcggccaggcagtctctgcggaactggtcgaagagcccctggctcttgaggtggttcacgatcatggccacgagctgcgggtccccggcgcccgcacccgcgccgcccgccccgcccgcgccggggccagccccggggcccggcggcggcggcggtggctgcggctgcggctgcggcgggggaggcggcggcgccggaggaggcggctgcggctgtgggttggtggccatggtggcctgtgccggggagggcaagggccctgaccggcggacgatcctgggaggcggcggctgcactggtcccgccgcctgagggaagccaacgggatgttgttacggaaccagcggatccagagcaaccccggaagtgaaagggaactgggggaaaggaggaaaagacggtgacaacattgacgaaagtccggcgacggaggccgcgaagagccagtttcgaccgtcgccgggcgcaagcgccctcgcgaggccgagctgcgccggaagtggcggcgactgtggcgacggagacgacaagactgtgctggtcgcgggttgtggggtttaggtcaccggcaggggtctggagtccctggaggttagggcttcgacccgcgcgacacctggggccctaggtctgagcgggggcagtgcgtttctggccccgcttcatccgcgacggcattttaggcctgcctctcttgctccagtttcccggagcagtgcatagagatccatagacatttgtaatgcgaaccctacgtggatctgctcattctaacttcgcccaaccctcttcgttcttagcctgtgatcctgcactattcttgtcccagcaggtagctccaagttccttctgtctctcttctgcctgcacataccatttccccgtgggggtcccttgtttctggcagtgtgcctgtggattagatccgatccctccagcccgttcttcctatctgtgaagacaaatcgacaggcttttatttttaggagatttgctattgattactatgattatagcaggtaaaacatctatagcacatattatgtaccaagcgtggcgttaagtgcttttacatgtattaacgcatttaatctttggacaaacactaagagctaggtctgattactgtccccagtttgcaaatcagggaaccaaggctcagataaattaagtatgttgagtaagattacacagctagcaaatcacctgcttttggactgcatcatctttgaaattattattagtacgtggtcaaagcaacataaatattagaaaatttcataattactaaatagtgtgtgtaactttattgaaaaatgcatattgttgctttttaaagttcctacatctgtggctgaatatatcttattagtaggaaaagaagggttgagcatcaattctattcctatttgtaatttttatagctgtgtgccctgagaaaccttgttcatataaacaagtactgtgcctaggaatggaagagttttgttgtagcaatatcattcaattcttgacctcaaaaaattagatttgattatctatgagctgacttcaattaggccctccttctattttatggaaagcaaagagctgaaaaccacctggcttgccaaaggatttgtttacttaatccttattttttcactctttcagattctgggaaatataccagataggttttaccaagataccaaatgactatgaattagacctgattttttcaatgaggtgtacctttcacctgatatactgaaagtttggagaatatctaaacatttttcattttcataaatagttttggataagatttatttttgttatcaggtggttaaattatgtttttgtcaaaatttgcaactgcagatttagctcattcaagttcaaaatctttgtcactgggcacagtgtctcacgcctgtaatcctagcactttgggaggctgaggcgggaggatcggttgagtccagagttcaagaccagcctgggcaacatggcaagaccccacctctacaaaaaaataaaagaaattaggcggtgtagtggcgtgcacctgtagtcctacctacttgggaggattaggtgggaggatcacccgagcccaagaagtcaagtctgcagtgagccatgatggggccagtacactccaggttgagcaacagagtgagacccttctcaaaaacaagaaaaaaaaaggtttgttaagaatgttaaatgtttaccttataacctaattaacagagcccattttcattgtcaaactagacaaatcagatttactttaaatcagaaacaatttgacttcattgtttcaattcagagtatcctgtgtgttttgaggagtttgatga

SEQ ID NO: 316710 - DNA, 4001 bp, Homo sapiens
cacaggtggttctctgctgtttcttatttgcctgaaatgtgcgacaataaaaatgatcagcacaagaaagacatcacaaacataagaaaaggggggccacagaaggaacaaaaatcagtaagaaatgcagcactggcaagaaagacccaaacttcagaaatcctccagatttaggggatctgaaatttgaattctggaaggactggactcaaggaattccaacctgagatcacattctgggttctgagtattcagactaaacatctgctgggtggcaatgggctgttacccagttcacctctaccccaccctcacttctagagggatacctctccaccctccttcacactcacacacacctctcacctctagaccacacacacatccctcacctctagaccacacacacatccctcacctatagaccacacacacacacctgtcacctctagactacacacacacacccctcacctctagaacaaacacacacacatctcacctctagaacacacacacaactcacctctagaacacacacacacacacatcccttacctctagaacacacacacctctcacttctagaacacacacacccatcatctctagaacacacacatctcacctctagaacacacacccctcaactccagaacacacacacacccctcacctctagaacacacatacacacctcatctctagaacacacactctcctcagctctagaatacacatacaccccctcacctctagaacacacacacccctcacctctagaccacacacacatccctcacctctagaccacacacacatccctcacctatagaccacacacacacacctgtcacctctagactacacacacacacccctcacctctagaacacagatacacacacacctctagaacacatgcacgcacccctcacctctagaacacacacacacacatctcacctccagaacacacacacccctcacttctagaacacacacacccctcacctctagaatacacacacccctcacctctagagcgcacgcacacacacccccttcacctctagaacacacatgcacacacccctcacctctagaacacacatacagacacctcacctctggaacacacacaccccttacctctagaacacacacacacatctcacctttagaacacacacacacacccctcacctctagagcacacacacacacacacacccccacctctagagcacacacacacacatccacctctagagcacacacacacctcccacctctagagcgcgcgcacacacacacccccctcacctctagaacacacgcacacacccctcacctctacagtgtgtgtgtgcgcgcacacacacacactcatctctagaccccgcacagcgcacccctcacctgcagacacacttcacagccccctcctcactcgcccccatcgttcaggaccatcgctgtctccacactcacctctcccctcaaggcctctctcattgccccctcaccccgaactttagcgccagttttcccctccccaggccctccccaccgttgcctctttccggctccccttccacccggccgactgcctcaccgctgctcgggactcagcagtgcgcggtactcggcgcagcggcccaggaagatgtcccgcaagtgtgcgctggtgccctccccgcgccaccgcgcgcgcgccccgcccgccgccagcagcaacagtagaagcagaagctgcagcagcagctggagcagccgcgatgccgcgcacccctgggccgccatcggggaactttggtccctccagtcccgtgcttcctccactccccttctctccttctaccaaggcggttccgcaaactgatgcagggcgggactctcgctcggatatctcgctgtttgccgtttcccgttccagacaatttcaagactgagcgtggggcggggcgcggcggctcatgcctgtaatcccagcactttgagaggcctagacgggcggatcgcttgagtataggagttcgagacaaacctgagtaacatacaggtgagaaacctcctctctacaaaaaaatacaaaacttagctggtcctggtggtgcgcatctgtagtctcagctacctgcgaggtgagatgtgaggaggcttgaccccaggggatcgaggctgcagcgagcagtgattgcaccactgcactccagccctgggcgacagagtgagactctgtctaaaaaaaaaattaataaataaataaaattaaaaaagagtgagcttggaacatcacccaggacaggaccagtgcactgtggcccaggctaatcttgaccgctgtccacggggagggagccccaaagaagccgcaaggttgaaggagaggtgaggagaggtcagtcatcatcagaagaaatacttttctggctccaaaggacgacaactttgacagatgccctctttcacaccaaccaataagtggtgtttgtttgttttcaggaaataataaccacaacaacgtgccaagcactttgcaagtataatattaattactttccgcaacacccttcctagctaagtttgtaatttctctcgctttagcaatggataaactcagggaagttaagcatgttcggccctccagatttgcggattcatcatccaaattcagctaaccacggatgagaaacatttgaggaaaaaaagaatgcttgcatctgtacggaacatgtacggacttttttttccttgtcatcattccctaaataatccaatgtaacaactacttatgtaacaattacatagtacttgatattacaaggaatctggagatgacgtgaattatagaagaggatgtgcaaatactgtatactacaccatttaatataagggccttgagcatctgtggattttggtatccaggaggttcctggaaccaattctccatggatacctaccgccgactgtaacttgtcagaggtcacaatatcccttcctgatagatgcaaaatcctggagatgttcagtttaagagagccaggattggccgggcgcggtggctcacacctgtaatcccagcactttgggaggccgaggcgggtggatcacgaggtcaagagatcgagaccatccttgctaacacggtgaaaccccgtctctactaaaaatacaaaagattagccaggcgcggtggcgggcgcctgttgtcccagctactcgggaggctgaggcgggaaaacggcgtgaacccaggaggcagagctcgcagtgagccgagatcgggccactgcactccagtctgggcaacagagtgagactccgtctcaaaaaaaaaaaaaaaaagagccagtattaatagaataccacgtggaggcccaagtcctcaattcttacaataatgacagcaatgaactttgagtgcctggcaagcacttgataaacacaagggaggacagaacaggtgttctctactgttttatttgaatctctttttttctgtaaccaaaacccgcattctcctgttcagttcctccttaagttaaatccactttccagaggaaagcatttttaattctttcaagttttgttcctgtgtttacttccatatttctaaataacatgtgtgaacccgcaaattttgagacaggtctcaattaatttagaaagtttattttagcaaggttgaggacacgtgtccatgacacaacctcaggaagtcctgacgacatgtacccaaggtggtcagggcacagcttggttttatacattttagggagacatgagatatcaatcaatatatgtaagaagtacattggttctgtccagagaggcggggacaactcgaagcacggagggggcttccaggtctcaggtaggtgagagacaaatggttgccttcttttgagtttctgataagcctttccaaagaaggccatcagaatatgcatatatctcagtgagcagctgaatgactttgaatagaatgggaggca

SEQ ID NO: 316711 - DNA, 4001 bp, Homo sapiens
aaagcatgctcattcgcatcgccaaccctttactaaatgctttttcccttgtctctgttccctctttcctctctactattgcaaactctacccaagcctcaaggcacgcattcgtgtcctccattcagcctttccccactattccagcccccgctgttgagctctttctcccttttctgattccgtgaatttttccacaggttaccctgctgggcttgcatatccaaattcagtgcaagttctagggcaggaatcatgttttattttaggaatctcatgagccctttccccacctccattgctacatacctcagcaccttgctgactacgacagattctcagggaatactttgactgttggatagtttagacacggtggaggaagagaatgtcagctacttgcaagcaatgctggcaaaagcatcagtactatttctagggttaagtctcaaccccattgctcttcttcatgaatgtacacattcactctaccactaaattgttactgactccttcctcttcagcgtttgttaaataagtttattttctctaaccttggtcctaagtctgatccacctccaagcaagttcactgtacctttttagccacctctcttactccaaggacacagtcaaatgaaagttttcatttaggctccccctctctttcctcaataagaggaattcccattctttttcatttgtggtgtccccttcccaggcttgaaggtaggagtgatatcgtggtgacacttcagctgtggagactctcctcctaccacataaatgctccaaacccagatgtgtctacagcccagctaagattagaaaatgttactggtttcccttcccttctctgccccgcaaaatgaccatgatgcagagagcaagctttgaagagttgggattttttcctacttagaagccttctcactaccttccctcggtggaggggaaggggaagcctgcttccagccacatctgaagttccagctctgctttgtgagttctgactcctaaggaggcaggagagaccctctggagggctctaggcatcctgctactcctcctcccgctggcactcttccctaacgccaggtgatcacaccttcagtcaaagagttcccgttcttctgcctcctgcaggatatgcttcttggtctatactaccacgtgagcttctttagtgggtttccctgctcgcccctgcccccaccccccgaccctcacttgcgagcacagcgcctcaccccggtggacagcccgccggcgccgccaggccctctgctgtgcgcacaagtcagcagctggcggcctgctcgcagcactggcagcgaggacctcggaatcgcttccgccctcgggccttctcacgcgtctagggactgcctccagcaggtgcagccccaggtgcccaattgccagatctttaacctcgcgctctcccagccttcaaagttctccaacccgcgcctgccagccccagcgcgccctcttgtccagatgccagctcggttcagggttcgccctccccgcgactccagccccagactttcctcctggtttccagtgcccagcacggccacttacccagggcaagggccaggagcagtggcagggagctggcgccgctgcaccgggcggcccggtccatcaaccccgctctgccgggccgggcagcccctagacaagtctccctccttcttcgcccccttcccgggcctcgggcgcctgagagggtgcctggaaactaatcccggaggcagaaggaaacgaaactacttcccaggctggcaccctggctacaaggcagggaaacacccagggcgggaggccggccggctccgtgaatgtcgccgggaggagggagcctcctatttatcccccctcctcctgcacacaccccgccaaagaggcgcaggacttggtcctgggagcctccacgctgctcccacccaaattgccccacacccatacccacacccagggacatattcgggctgccctcggaccagctcaccactccccctgctgggtctcacctgactgactgttcatttccctaccccctagggcgtaaacaaggtagggagggagatgtaaagaatccgcgtggaggggtgtcgggggttccggtcgggcctgcaggctgacctaaactcctggaagccaccgaggaagagtcagagacccaaacgtgttctggaattctaacttcctttatttcagaggattgctagtgtcatggagaaaccagactcaccattcattgtggttgacttcaggcatttgataatgcaggcaatttcaaaagagtcattgttgccttttaaagtcttgaagccatagcgaaacctcgtctctacaaaaaatacaaaagtaaattaatagccgggtatggtggtgtgcacctgcagtcccatccattccctgaggctgaggtggggaggatcgcttaagcttgggagatggagccttcaatgagcctagatcgagccacttcactccagccaaggcgcaagagtgagacactgtttcaaaacaacgacaacaacaacaacaacatcagcaacaaaaaaaaaaaaaaaaaaaaagaaaagaaatgaaaaaagtcttcaagctagtgtcttagtttctgggtgcattgtcttctaataattcataaaattggggctcaccaggacctactttagaaatttcatttgtatttctgtttatgaatttactcatgtattcagtatattttcatttacttgcattaagcaatttctggaacagaaagacatcctcacagcttttagagaaagcaagcagcatccaattttaccttatgtggttatatattgcctccaagataaccaaaagatacagctgcttttgtactggtctgtgttcctcatataagatttatgtggataattatgcccctcagtacagaaattttatttctatagcatccaaaagtcatgtaagccttattttacatatgaaatgtagtttgggtgtctgcctcttcctcctcatcctactgtttaagttaagtaaattgttgtgcacttgtctcccacgaataacatttcatttcaaaactaaattattttactgccccaggcaactgatatatccggtggaataaaaatcagctcttaattttcagaatcccattctagtcccacatgacagctcataaaacattggtagagagggcaggcatgaagtttaaagaaacccaaagttgtaagatggaaggttactgcaccccagctaaaaagagcagaaacactggaagccaatggattttgacatcatctccctccctctcaacacttccaccctgcatttttcttttctgatattctctccatctctcagcaccagtgccctaagttaaagtatctcttactccaagatggcatttagcctagccaacagctgtcctgttagccccaacagaatgctacaattttgttttcctttttcgtagatactaataaaaaaaaaaaaaagcgagacctaaacaaaaagtactaaatgtttgttgagcattggaaaattccaggacttggtgtaagtattcatcatttatgccattcaagtggtaaattaactttttcaggccactagaatatgaagtagtataatttaatatactaaataggacagataaattaataaccttccttgagggctttatttaccaccataaataaaataagtactcccaagaaaatccaaattttctgacactggatatccaatctcttcaatgttaagagacttttcctgtctttttttgtttgtttcttttttttcccctcactttctttctctctgttcttcctcctcttcttccctctccttctccttcttctttttctcccccagcccccaaccacctctctctctcaagtcatttgcttatggggcatggtaaagctggaatacaaccattacatttggaagagtggaaggtaagaattgattttcctgagtcctcaaaca

SEQ ID NO: 316712 - DNA, 4001 bp, Homo sapiens
cattggagcccgtgaggaagttcgcgctccggcttctcagcagtcacgtcatgccacactgtgcatttctctgccgcacccgtccccagggtgcactcaggcgccatgcaaacgctggccatcccagctctagagctgcctgcgatgaggtcatgggtggggccccggagaccccactccaaatagggtgggggcttccccgaccagcctggggatggtccgagaggaccgggaaggagacagtaatattgtgtgtccgacccactgctccctttcttaatgttctataggctggtgtagacagaagtggaggggaaagggagaatagaagaagatttgggaaagagaaggataaggaattggcagtcgcgggtcactcgctgcattaactatgggtggagagaggcaactaatggtgtctcctgatcactctgcaatgagcaaagtgtccttcttaaccttaatccctttcttatcgttgagaccatgaggcagaggaagccacaacagtccactttatgtaactagaatttgacacagacagaaaaaatattccagaaacagagaaagaactggtatagcaagaaggcagagccctctcagcccaagagcagggtcccaggcggccctcaaattgctcacccaggcctaatggctgagaaattcgccttgctaatgtttctgtaccagtgggttttgcagcctgaggtcacctaaatgtcgcaaaccactcaagctctgtcaaatccacagggttttataatctttgcctgtgagcacgcttgtgtgcgtgaaggaatgaatgtggagctgtgataaaatctcagcctgctggaagaatgtgcagatttctgtgacaatctagttttttgcacctggaattgtgcctcagacagatgggaacactgataacagagacattctcagggaaaaagggaacaacacatctcatatttatatgcccctccacctcaatgcacaagatacttctcaagtgaccaatgcacagaaaaacaagaaaatatcttatcctcgctgctccctacctgtgtatgaggcacaatcgagaaggcaaagtcaccctatttagataacattgtcagccgactgtgacttgaattaatgaatgttgagttgaactgtttccttctcccaggatatataatatctgtaacatcctcccgtgtcaattacaagggaaaagacaaatgatttatttaacttttaaaaatatattctgcaaaacaagttaataagaagccatagtaactgcacttaggaggatttttggaaagatattaaaatcttccttgggaaacatttccaagttaatagaagaatcacagctccggaagttgagttgcatataaggggataagaaaacatagataagctgaccttgggaataagttagcctgtcaccacactgacaaatgctaagttcatcagattggagattttgaagactccgcttacattttctgaaacaaatgggattttttatatagtgaaagatatttacagaggttcatgaatcaagcagaatagaaagtaggagaacgctctcctgcggaggttttctaacctctgatttatcatttgttgacatatttttacaagttcccccatttctttacaaggagctttcttaagttctcccaggaaatattttgatgaaggccgaataggagggaaaaagagaaaaactgcagtgaaaatggtagcttaccttgtctggacattgctgatatcaaactttcccccaaaacatgaggctttcttgctttggttgtcccatgaatgtagttaactattaaaaatttaaagcagaaatatgtgtttattattcgaagctactccaaaacaatgcaaaaaataacttgatgaaaaataaagtgctcgtctgagcatgagaatgcgtttgaagcttggagctcatgctgttgtacgaagttttgcaactgtctttctcagtttaaacaacctcccactccttctcccagggacttgccaacttctataatttaaagcaactgcgatccttcccataatactcacatttcaaagagcttaatatatacactagttaagaacaagtaggagtgggtagtgttcttctgcaaaccccagactgaggcaaatgaaaagcaggagtctcaggtatctaaacagttctctttctctcttttatccattgctcttcttaccatgttacttctagttgctttgccttttaaagtgatgcctaaagaccaaatgatatcatttcactggaagcaaaaagagtacataggaaagtttatgccccaacttatggaaaagtgatgctagtgaaattatgtttaaacgtcacttttgctaacagaattatttccatgcaatttgtgcctaatttatctgaatgaaaaatcggaattattatatgcaatttttttcacaaaaggggaactacctaaaatgatgtttgcattggtcttattttaaactttatcttacatacgaatcataaactagagaagatgcttactttgcagtgtctgtggctgaataaatcttctgacatttgatctgtaaccaatgttacaaatgttattatttttactactttccatcaactgccactaaaccacacacacacacacacacacacacacacacacacacacagaggagcatttgtgaattcaaattatagccaacttacagtgtgatcaactgaaaatgatgatttgaaaaatatttgatggtatatctcaaaacagatcttgcttagtacctgatagataataggtgctcaaaaaatactgaataaataaagtattgcatatgttcacaccaaccaacagatttgacaattttggtttgcgtatatgttcccattagagatggttaatatgtcaaagcttgtatagaagtaaacataggacaatacatacctttgccaggcatacattaatgaatagttatgatgtattaaagtttcctaaatgaatagaaaacatcagttaaataaacagaccaattggtagataatagaaatattgacatgggcataatctattaagtatgttcactgtgcaaagttatgcaaacaagtttcaggaaacaaacctcattcattatttcaaaaactatagcttcctttctgctatgttttctgagtcacctgaaataactattatgcaatgggcagaggataatacctctgattttaattatgcaaagaaagaaaggatttaaaactacaaggaaatgttcaagttttaggttttaattgctgtgaatgcagagaaaagatggagtctattttcactctaatttccactgaggagagatttgcaggcaccagcacatgtagtgtcatagacctgaactcagatcctggatttaccacattccagttatgtgaccttggatgtattactttctttgagctttggtttcctcagttgagaaatattaaatgccaataagtaaaagcaatctattcacataattgtatacaacaaatatgaattaagcactttgctgcccatcaggtagttaacaagacctactgaggagtcactgagatttagggatgttcatgatagcagctagcttagcttttcctgacccgtttcaaaactgataatgggcatgggatgctgctctgacacaaacctaaacatagtggcattggcctcattgtgagtgtcaagggaactgatatcaaaggctggaaagatgaagttccatgtttcgcagtagctaaacatttggtgaaactgacacctatgacagtttgtaaggcaatatgtgctaagtaactctgtagctctaagggaaaaggatggggagagaatgttagttatgtgtgttgggtacttttgagtgcatttggcaaagtgtttcaagaatgagatgagctcaggaaagaaatagctaatttataaacagaaataagagggagttgggaaagagtacctacatttgatggcttgtagtagcctccaattttt

SEQ ID NO: 316713 - DNA, 4001 bp, Homo sapiens
ctcaaactttacatgaaccctgctgttatgagctctattttattgtaagggaactgaggcacagaggagttaagtaacccaacccagattcacacagatgccaatctggtttgtgtctccaggaactctgcttcagagtctctacaccttactagtgagcctgctgctcccacgagtgcacaaggcatgtttaggaagggcccagcacacgacaaatgctcagtaaatatttccccaaatttgaataacttactttcacattacaaacttcatccttctatttcgttacgcagtccactgcacagctcagacagtcagtgttcaaccctatttagctattgcccgtgaacacaaaagtgcacttgggctgcataaaaactacagacatgtttatacaagaaggggaacattgtgtcacatttggtttttattgctttcagcacattaggcacatactatctgtttattaggtaaaggtgaaaggttacagatcaccttagaataaaagtatagatgagttgcttgagaaagggctacatagaaaattgctgttataaatgtacagtaacctagagcctttcgactcttggaagcagcttatgtgtgtgctgacaatgactgacatactggaaatgaaacccgtcttaacagtacaggatgtggaagtacacaccaaaattactcaaagagaggaaaggaagtcagatgtcaactagagttaagggcaattattatttattttggaggagctttccagtgagttgggggaacacaacccaggctgagggtgtggggtcttattgaaatcatgaatcagaacaaattgggagatacatagtctgatgataagacagagtgtgaggactcgggacatatgttccttgcagccatagaattcatgatgagggacttgcaaaatggacattcaagttcctgaggacaaaggctgatccaaacaaaacgattccgttcaagtttgttgtatttcttttaactacttcccagtcattacccacaatttgatttgaaatacttataaaagaaatgtaccccagtacaatgcatcatttatgaaattatgcattccatttatagaattactattaatgcaaactcatagttttaccaacacaatttagatatttctgcttccatattgcaatgattgcattatcctcccatggccaagtggagtggtaagcacattcgtttaataataaaatagacagtaaataaatcaacacccttaatgaatgctaaattgaacacagaatttatgccactataaggaaatctccacagaacaatattcactttaatgctttctttttcctctactaaaatcctacagtgtatcaaaatgaagaaagcaccttcaatgtgaattatgtaggaatggacacgatgacaattctgtttttcagagtagggttacagagacacttctgcttgcccccgcgagtgtcggtgtcagcctcacactcctcttgagtatggatctatagctatgaaggagcataattggcaaggaagggcttttcaaaactaacccttcccaagcaaagccgattctgacgactttcgctttccctctcttgttcagcagaagcaacccccagaggagttgtgttattgactaagccccagtcggtaaacacccctgaacatcataaaaaaaaagagagagagagagagagaaacaccaacatgagccaaaagacgcctttctaaggaaaaaaagcctgaagacgtttatcaatggagagagggctgtttacttacattgctcacaagaccttccaacagctggagtctttgaactctagtgtgcgcagatgtggagcttttgctcaaaatccccttccctttggcagcgaggattattcataattctttggggcttcagattgataagtaatttcctgattcgctttcaaaagcgttctcccaggctttgagcggtggcagagagagggagcgggcaaggaccccggcgtgcaatgacgctgtggcctacacagatctcctgattgtttgatcgagcccgaaagaagacgtcgacattacaaacaaaaataaatatccttctttatctgttggctcgctccccaaatcatatttgggaaatagcacagtgagtctggacaatattttttctaaaagtgtgatattagctgaacaccttctcattgttgtgctgggagagatcagggcacctctgactggtcttcaaagaccagcagttgcaatttctttcttatcagctactttacaggatgttcttagagaccaagcagcccagccccttcggttgacagtagaaagaaacgatgcccagggcttacaagacttgaccagcatcacacagctagttagtggaaggacaggaacctaagagccgactgtcaagccagtgctgtgtccactgtagggaggtggaggcagatgcaagggctggagatctgactctcgatcttttaagatacctatcactggacatggcccttaatgtttctgagtcttgattttcacagctgcagaatgaaaatcgtaatagtaacccttgcttggtcatacaatgtggtaatctctctgaaagcattttgtccaggatgaaagcaattgtatcctaagatgaaattttgtcgtcacagccccatttacatgcttctcttctcctttccattctcattttccattcggtgttattttctgactgaaagaaaccattgagtgacttttggatggagaaggaggagtatagtggccaggaaatgagatagaatatggagaaaattttaccttggaaatccaggtcaagattagatgaaagggtatacagcatatacagcatatcttaacatgtgcctcagaaagaacactagatctagaaatagaaaatcaaggcttggccactgcctggaacacttaacagccaagggagccctgtggagtcatttaaacgttccaaaacacagttgactcactgggtatgtgatccctgtcccattgcacttacctcattttgttgtggttagaatcaaatgaggtgtttatcaagatagtgctttgcaatgttttaggctttgaaactataaagtagttgccatggtttgaatatacgtgtttccccacaaattcatacgttggaacctaagatccaatgtgataatattaagaggtggagcatttaggaggtcattaggtcacaatggcagggctctcgtgaatgggattcatgaccttgtacaagggctggaaggagatagctaagccctttttgccctctacccttctgtcatgtgtggacatagcatttgtccctctggaggacttagcaacaaggtgccatcttggaagcagagacagagccctcaccaggccttaaacctgttggcaccttgatcttggatatcccagcctctagaactgtcagaaataaatttctgttgtttataaattacttagtctgtggtattttgttatagcagtactaatgggctgagacagtggtattttccagcgggatgtgcaactaccattgcccatttcatctgtgtcattggctgacaccactaggtgccagggctcctgggttctgccttgactttttttcccccttttccttttaggagtgtatttcatcttttttcccttgttatccacctcttggtacttgtctcccatgcttgctgctattggttttctttcttaggactcaaattgtccttccatttttcatgtaatgttaagaatgaagaacaaagagaaaatattttgttcagtcacacagaaaggcatccacggtatcttgacacaaatgggaatgtctttatttttgaagtagccatgaacaaagatcaaatgaatcaagatcagcgcccccttgaaaatgatcaagtcacaagtccaactcatattttatggttccattcactatcttacccttttattaatttattatttgaatgttatttaagatttgcactctatcatctgta

SEQ ID NO: 316714 - DNA, 4001 bp, Homo sapiens
aatcctggaaaacatgttcatagattgagatccctttgtaaatagcatattattttttccccagtgtaagtagactccaagtatatttttttcttggaaaaataaaatatgttggtggtgggaatgtaaaatggtgcagcgcctgtggaaaacaggatagtgattcctcaaaaaaattaaagagaattaccatatgatatggcaattccactttggggcatatatccaaaagaagtaaaatcagggactcaaacaaatatttgcacatgcatgttcgtagcagcaaggactcaaacagatatttgcatagccatatctgcagcgttattcacaataggcaaaaggtggaagcaacccaagtgtccatggaaaggtgaatggataaacaaaacctggtctacacgtacaatggaatcttcttcagccttaaaaggaaaggagatactgacacatgctacaacatgaggaaccctgaagacagtatattatgtgaaataagccagtcacaaaaggacaaatattgtgtgattcctcttacacaaagttcctagagtagtcacattcatcaagactgaaagtagaatactcactgttggaggaggaagggaagaggggaatgggaatttatggtttcatgggtatagagagtttcagtttgggaagacgaagaagtcctggagagatggtgatgatactgcataacaaaatgaatgtatttaatgctgcagaaccgtacacataagaatggttgaaatggtaaattttatgatatgtatattttaccataattaaaaaaactgaataaaaatgaattggaatgcagggagagcccagtattcttatttctgtgccaggtgttttaaggacatcttttactttatcctcacaccacttgttatgaagtaagtgctattaccttcactttataagtaagaacattgatactctgtgggctcaagtccacacaggcatgaaatggtgcagccagaatttgtactgagttcttttgtcttcaaacacttgagtttgtccctacatcatgtgagggaaactataacatattacttcatgacaaagggctggacttgataattaattcaagttgaaaatgtgctttgcctggaaatcattaagaagagaataggtaaccaggaaaagccaaaacgggacattttcttggcctgcagaggtggagatttcacaacagcaagctctgtgtttctcttgttgcactgggagtggcactgtgattgggacaggatggagacctgagctgctcatgcctcagttccttttatgttgttgttcaccagttctttgcttttgggggctccaattttcctctgcagaactgcttttcctgtttgccatgaattaacctccttctcctcctggcactactcaagtccctgcaaggccacacaattgcactgtgttatggctatctattgacttgcttgtttccccactaaaatgcaaactctaggacagagactagtctacagtagaggctcaatgaagaaaaaaaaattcatcaatatttattattgtcaacagttcattattgataaagttttgactactttatggcacagtgattaaaaaaaaccctgacatttgcaaaacattttatatcctagagagcaatgctaagcccatatcgtcctccccaaaaccatcttgtggtaggttagatggggaaccaaggtcctgagaagtcccgcaacttgtctatggttagaaagctagtgtcagtccagagacttgaagctaggtcttcagttttatggattcttcctacagagccatctgtttaataagctaaaaagctcccgtcacgagaacaggccattgcatctacatttgccaaaattctaaaaaaaagagtaaacaccataccttgctcttagatggtgggctgctgcaggattctaaatccacaagagactgaggatctttcatgagagctcagtgaaaaacttgctttggtaccagacagaataacagatccaaattctcaaagatttccaaatagttgtgctaaaaataattttctcgtttagtcccaaagagccaaaggccctggaagtcattcatcgagtgaggctcaactcggggaccagttaaaattacagttttgtttgggataaactttaagtgcctgctttccttcagtggtaagtttagagcttctccatctctgtgtgttgtggcctctttttcagatttgtttacttaattttttccctcttcatttgttttccactgagtgaatgtttcaggaaaaaaattactcactgactggaaattagttgttaacttagagaaaaaagccattttatatttgagagttttggaggtagagcctttagattctggacctaggatggtgtcttgtggaataatgaacactgtccctattcttggtaaatatggcaggaaaatagcccctcattctatgtgctgtgcaaagaaagagggttatgagaattgcactgattttgttttctttgttctttgctgaatggataaatgattgggtatttttagaaaactaatatgtctttgtgcctgtaaagaactgatcataacatctcaaaaggcagaatgattctccaaagcatatgactagtcgtctatggtgcaatcaatttctttgtttccttctgctatgtatttcttatatttccttggcaacagcaatatataatttatgatgtcatttatggaaattagacgactgaaaaaaatcttgtttttatctttcttttcctctcattcttctcaagcaatgagaactctaattgaaaggaatgtttccagagttagtgaagtggatgttgaccacacacttgaccaacgagattgctgggctccccgttctgaccagcttaattttgcctttgggatccactctccacactggaggaaatggtcctttgaatttgttggctttccaaaatcttaatgccatcataggatggtcaaaacaatgtcttgagcatagaagctagtcataacttattgctaaattagagtcagattttaatcagataaagtctctgtgtctgttttctcactttcaaaataagatggttgtccttgattatttccagggtttctcatagttcttaatattctcgaaccaaatgatggtgtctgatgtcacccatttacaagcttaatttcaggtgatacagccttttaatatgttcatttatttgtttataagtgataacttcttaagtgggctttttccattatgtctgctttggagtagcccagtctctgccagggagctcagaagtggatgaatttgtagaccaataaaagaatagatgcattcttatttttctgccttaaagtgttgatacaatttgtggatattcatattttcttttctgtgtcattcacaacttctctaatttctctttaatgttacttaccacataaaataaggttttttgtatcattaaagtattacagtattttttctgttcttcaataaaaattgaatttcttctttttcttctttattattttcatcccagataatttattgtaatctgtgtctttctgaactcattctttttcccagagagaatgaacctttgaaaatgtctctgagagtgttcagaacctcagatgttgataaagcttgtcagtgtctatttcactcagttattttcacacttagaagcagtggtgaagtgatgggtagaaaaatatgcttaaggaagtattggctcagagtaaaagtcagattccatttttacctgccactcaccccaaggacggggtcttattttgtctttcctaggcagataatcttcctttctcaacttgtgctcttttttaccccatatcctttatttacttttcaactgaattcattccattccattccaatcccatcagtgttcccagagcacctaacagtttgccgctaacctagctctcaaaaagaaggttcagatttgtagcttttgttagttttcttg

SEQ ID NO: 316715 - DNA, 4001 bp, Homo sapiens
cagatgtgctcagaccctgaaatcacaaaatgacaaacattctgacaagagtttcttgtcactttcttatatatcaaacatttctccatcttctttgcttgaactaaattgtttctcatgttacagcaatgtgaggctattttgttttcagaccaaatttttgtaaacgttgaaaagtataggcatgggtggatctaaaacatttacccaggggaaaatcaaagtgtttgatttcaaaatatttatattatatttgtaaaaagtataaagtatattctgtttttaatttcatttgagctcactttgttgacttaccaaaaaaaattacatgattatcaattttgatatagtaaatttaaatgatgacttttaaatacaatactcacaaatgcactttacattgaattaattttaagttaagtcccttcatattgtacttttaaaacccagcatcttaaaatgtatatcatcttcggagagaatggtaaaacccaaagaaggaaaaaaatccaaaagagtgatgtatctggagatgataaaccagagaacctttgccatgttgttgtttgcaatattgagtaacagttaacatttttagacacctatggtgtcatagacctgggagattaaagataatgttatgtatcttggtgaattcacaaccatgtgagaaagaacatttctggattaagaacatagaaagtcgttatttaaattttcttgaaaatagtatgcttttgaaatctaagaaggatgattttctggtgcttgttgtattttttctatcttacatgaaaatcttattcatcgtagcagaattgggaaatacacattttatttataaccatggcagagactttttgggttagaataatttgcagtgtcaaaaaatgttcatgttctagaaattgatctcaggattttgttgggatggatgcttttagatcgttgactacctttttagaacaaagcaatctatgtttaagtgtttcatgctatatacttagactgtatggtgtataaattcccagacttgttgccacagaatatctggttttcaggaacttcagtttgatatatataaatactaaaattatcctaggttgggtaaaatatatgtagacattaaatgcagaaaatatctatctagcaataaaaagtatattttcttattgctgtttatgaatatcacagtgaggagctagttctaatctctttgtttaaatcacactttagacttactcattcttttggtgtgggaccttttgtacaattaagccagtaaatttgctttttacttgtattgaggggaaaagagtacagcagacaatttggagagtgaaaaagacattaaaccagaaatttaaagataggattcatggtcccagatttgccattaaccagcaaagtgaccacagattaattgttttattgcctagatttcagtctgtttgtctattacctgatgaaattgacttaaatgttagctgatattattcagttattctgtatgtgtctgtcccacatcaattctcttagattaaagggtagtgatacactttaaattttgaaaaaaaaaaagtcaacaagaaaacaatgtgtatttcattttcttaaaacagacttatttggctttcacatactcttgaaaaaagaatgaacttgaggactattaactaaatcatacctaaaattttagaacattattgtaatgatgaatttaaaattatacctgaggacaatattaaaagcaggtgatcttgctgacaagaactcaagtctgttgataccctcccagcctcataatatgtctagactgagtttttgttgatctccttaaatctctgcacttaagctagaagtttttagttggtagagacagaccaatctcgaacgcttccaaaagaatacagctgtcttcatccagtttctcacactcttactccaaggagcctgtgtggctccctggttgttaagatatgttacatagcttagcaacgtggtaacattccttagaaaaatctaagttctagaacctctcacccactattcttctcagacctccagttacccacttgacaaaaccatgtggccacaaatggctttcctcaattttggacatataatagagttaaatccaatgcaagagaaagaaaaagaagaaaaataaaacagagagcaatataaatcaaatttataatttttcccacaattctgcttaaagaacaattatgatataaccaaatatagcttaatccaaaaccaacggggagaaggtatacatgcttttaaggagtttctaatagttgtgaatggaatatactgctttggtagtcaggatgtctgtgctgatgacatgttcaatagccatgaaaaaatattgaaatgttaattagaagtcatagagaaacacacacacatgtacatgcggtgcttcacaagacttttcagaatacacatgattttgaatttctgaattacaatctctaagagcaatatagacaatttctgaaaggcaaatactagcttaaaacaatgcaaggatagagcctaatttgtctgttttcttgactggcccaagaattaaaggtttaattgcctttgcctataacccattcttatgccttatgcctccctgttttactgtagtttatggggaattttatgggagatctaattgactttctaaggtaatttttgtattctgagatttttagttttcactttgtatcagttgagaaactttattacacagctaataacagagatcagaaatagtgttctaagtaagatagatgtgtatttcttcctcacatggaagagttcaaccatctagggttggtatggaagctttatgaagcatcattatggaccttggcttcatctatgttttaggtccatctttcttaatattaggcttccatttttgaaattatcccttgttcaagatggttcctgaagttccagtcatccaagatggctgctatatttgcacatatcaaatctgtactccaagcaggaaacaagaggaaggttggggaggtaagggctgacaagggcacatgctagctatctgctctctttgtaagagccttctcatgagtctcagacaataatctatgttgcattgatgatttatagctacaagaaaggatagaaaatgtagtttcttaacagggcacattgacaccccattctaaaacaggggctctaacaagagagggagaaagtataaatcgggttataaaaagcaatctcaaccacagatcctgacattaatacctaactctgggtaggagaagtctacactctgtgtgctgtgctttcccttagagagggtcactagagataaacatgtacttggctatgtaactatgttattttccatttatgaagccccatggggaattttcctgtctcattactaggaaaaaaatgatacaactggcttgtttgcattaattttgtcagaatcaaaaagacagaggttgctctgctgcactgctcagggtagcacaggtatccttgttgccttggatactctattattttagcaaagaaaacagatggaaagtttttttggaatatgtgcatatatttatgaatggtaattagtgatttttaaacttatctggggtcatgataagcaggaaatccacaggtttttcattgcccacagatattttgaaaattgttatggactgagttgtgtcccccaacaaattcgtatcttaatctctaacccccaatgtgactgtatttacagatggggccctcaaggagatgattaagtttaaataagattataagggttggaccctaatcttataggactggtgttcttacatgaaaaggaagaaacaccagagccctctctgtctccttgcatgagctggccatgttaggacaaaggaagaaggggacatctatcaccagaaagtggcccctcagcagacattcaatctgccagtgccttgttcttaaccttaccagcttccata

SEQ ID NO: 316716 - DNA, 4001 bp, Homo sapiens
gaaacctagctactggaaggctggtattcaattatttggaaactggcgtctattccaagaagcaccgtgaatgggcttccgggcaccaagagcgggctgttctaggaggaaaggggccggccctacctgtgctctgcccttgggctgcaaatggattctggccggagcttagccaggttgtatttccggctcagagagggtctgggtgggacgtcaagggaatcattccatgtttaggataatggaacgtgttgagttggtatgcaaggttttgtcttcaatcccagatatccaaaaagctctttgaaacacaggaaagattggccctatttctctttaggtatcattatttatctaaatctccggagccattgaggaccaagatcatacttgctgaataaatgcacggagcaggatcagaggatagacacagaatgggccaagaagagaagtaagccacaccttcccttcctgtctcagcatctgttccatttctgctcagtgacccaggcagcttgctgttagctgactcttcacactttagggaaatacaaataactccagaacttaactttacctttgagcttcaaattgtttcaattatgtaccttgtttcaattatctgcctcctgacagtgtttcacagctgggaccagtaaggtggtctatgatctttaacatctgtcttatccttcctaaaatagtatcaactgaaggattaaatggggaagggggaggggtaggcaacaaatatagactctattatgtttaaaagcagtaaccgctttccatttctttctcattcaactctcaaatgcttctcttcttttctccagatattattcctcataagagcttgcttgattgcaaccaccaaggacatccacaaaccagggcaagaaggaccatccgtaattctttcccataaatagtgacaggaagaaaataaacgccctattcttcaatgatttgaaccacctctggagcacaaactttctctaaattcacagggcaaatatccatcatggggcaggtatctatgctgccatggaaagtaacataaaatgtactaagtcatcacagggagttttaattttgtttttaaggtcaattgccatgctggggtaaaaagcattgatccttgccttttatcaccggaaaaattcttcaccagtactttgtgaaaatctcgcctcatcagggctgccaaggtcaatgcaacctaagtaaccaagctgggagatgcttgcctaattattaaatatttagcaaacagtttgtgactatttaactgtttgcacctggcaccctcttttcactacgtgaggcctcctggcaccctgacctcttcccccacccctacccactgcccaggccgccagcacccctggggggcaaataccgggacccaagggcatttcaaagaaacagcagaggtcacattccatttcctttttattaaaaaacatacttaaaatgggggaggagggcacagatctaaggtaaaatctcttgcagttttttcaagttcgcatgcaccgttgaaagttcattagttagggatttaaaagcaaaaatgtttcacacaaccaattaaacgccaagctttacaaacgccttggtctttggttttgggaatctgtaaaagtccgcctccccccacccgagttttgccccttttagagcccctttgttgaattacgtgacttttcccgaagtcatcaaactttgaattgcgtctctaattttttttttcagggcaaaagcaaatcaagaaattaaacttaaaagtaggcgactcggagagaagtgggggaaagctcgccccaaagccaagttccgcaggactaaagccctctttgcgcgcgcggggcgggggattgtccctacctggggccagacggcggcggcggcggcggcggcggggtcccggcgcccatggcttcgccggcctcgggcagccgcgccgggagacgctagcggctccgcgctgccctgagcccgccgagctcgcagcggccgccccagcgctgtcattgggcccgcgcgtcacgtggcccgggctgcgggtgagccttcccgacacgcgtaaccctttacctgcacgccccgaggatgcggcggggctagggctcgaaaccctggagtacgatgtccgacatccccggggccggggtggcagtcccgggcgcactgaagcagaaaatccacgcgcttgttggcctctgagcacaaacgaccgcgccaaccgcctgccatcacgggaaactccggggtgcttactccaatgttgcgctggagagaagggagcttcctatgatcaagggactggagtacggggatacacaaaacaaatgcacccgctggcaaatagttgtgtactcccaaaccccgagaacttggcatttttcagtttcctccttatttctggcattcgccgcctagacctgctgtgagttccatggccagccctgtatgagctacatggacctagaaacagcgggggcgccaccaccacgataaaaaccagggaagttgcacacactcgcctgcaccctaaaggccccagggggagttcaatgaactcctggttccccgtcccctcctcacccactccccctccatccctttcttttcctgaggtcttagggcattggccacaagactgcatccaatctactgagttccacattcgtagctgttacaatccatatacctaaggcgggtggagaactgactctgcttaaggactggacattcttttcacctgtgctccaaagcaaatgctgagcttgccaaaaaaagtgttaagcaactgcgccacctagcttaccctcttctctcttcttttcaactcatccagcaagagaataaaataggatattggagaggcatctggacagagtattatctaaggatggacatagtgtccttgggttttcaatgtatctactttaatgatgccagccccattcacatgatatttgccaggcttttgagaatttgaacactccattttttgaatccttctaattttgcagtgctgggattgcacgctgtaaagtgttagatttttgcaggaagttatatgtggttttacatcctttgtcacaatgaacggcactcatgtccaacttatagtcgacacttaattgtctacaggatattgatacatttatcaagtaggttatctgtcgaaaaaggggttggtatttgtattgggtttcattttatttatttatttattattatttgagacagggtctggctgttgcacacaggctggagtgtgatgcgatctcagcttactgcaacctcctcctctggggatcaagggatcctcccacctcagcctctggagtgcctggggctacaggctcatgctaccatgctcggctaatttttgtattattattattattattactattattattattatttttgtggagactagggtgggggtgggctctcctaaacttgcccaggctggtcttgaactcctgaggttaagcaatccgctcgcctcggcctcccaaagtgctgggattgcaagctgagccaccgcgcgccccagcctgccttagattttaaagtgcagttcctagactaatagcatcggcataatctgagagaatgtagtaaaaatgcaaattcttgggacccaccccagacgtattgattcagaaatagttggggagggagggtgaagaaatctgtgttttagcaagtggtacctactccagtttgcgaaccgttgctctgaatatgcacaggtagctggcgaagttcccctcatctattaaatagtaagggctggcattctataaagctagaggtgctgcttttatttgtatccctagattaccagttttatgtaatctgtcatgttgatacactgaaactgaaccctccatgtgtccatacaacgtgtaatctgtacttcttgcagatctcttggaatgccaaattgagatctgaggggcccttgtaaaacatat

SEQ ID NO: 316717 - DNA, 4001 bp, Homo sapiens
ggtgggctcaggagacagaaaaccctgctactgtgggactttgggcctcagtcacttggcctgtagatggggataataatattcctactatatagtgttgctgggggtcatatgagcaaacattcataataaacatagaccaggggtgtcttaaccaccccatttggatacagcatattaaaacacaccccccaaaaagaaaaagatggaggtctagtatccaagaaagatataatctagttgccagaacctatgcatacaaacaagagtattaacaatgtcaagtaggacttgtttctggaataagggctacatggtatatttctatcaactgtgacaccaattgaaagatagaaaaccccaagtacaacaacagtcccgtagacagaaaaatcgcttttgctatggaactgtgtacacatgtgtaacattgtacctttcagaatactcttaaactaccccatttctaaagcccaggattttattcccagcctctactcctcctttactttccttttctgctgataattcatagatgagctggataaataggacaggcgagaagaagcacgtgcacctcctcccctccctcaacacctctcctcacccctctccttcctcaacacctctcctctcccctcccctccctcaacacctctcctctcccctctccttcctcaacacctctcctctcccctcccctccctcaacatttctcctctcccctcccctccctcaatacctctcctctaccctcccctccctcaacacctctcctctcccctcccctccctcaatacctctcctctaccctcccctccctcaacacctctcctctcccctcccctccctcaacacctctcctctcccctcccctccctcaacacctctcctctcccctcctctccctcaacacctctgatctcccctcctctccctcaacacctctcctctcccctcccctccctcaatacctctcctctcccctcccctccctcaatacctctcctctcccctcccctccctcaatacctctcctccaccctcccctctcctctcccctcctctcccctcccctcctgaccctccccctccacaattcgctctgaaatcctgacccttttcatgcctgcaatactttgtttatcctggactctttaaaagcaaaccaaccaacaaacaacaacaactagtcaggaggataggtagtaaaaaaaaaaaaaaaaacaagtcaaagaaaaggagaaaagagcttagaactgtttgagaaacaaggaaggcagactggattgtaataatgtaactgaagcaatcataaaacattactcattgaaacatctcaggtcaactttatgatggtgaattcaagaggtgtacaggggaaggcgaaagaaaggaggaaagaaaagagggaggaaaggcgaaggagggcaagaaggcgaggaaaagcaggcaggcacatccagagtgacaccttgcactcccagctcctcggaggctgaccaagattgaccctggggcaccctccatccccgccttctgctgctatagccaagaccacaggagcagcctgcaccgaatgaagtgagtgctgagatttaacagccgtactcgaaaactgccccttccctgcttctgaaggaaatatacatcatttgcggcttttaggctcccctccttccccaggaaaaccacaggatctatactgttcttccaagctgcacaattacaaaggatgttgtggtggttttcctctttcagaatcaggtttccagtttgggtcctccccggcttgcctcccattagggcacaccacatgggtttcctatagacctggtcccatacctgagggtcatgcttccgcgcctctccggagcttggcggggacagcctcttcctggttagaggttctgtcctctctcacctcgccctgagttttccttccccagcaacattccttctctagatcagacggacaggctctaatgtccaaggttgtgtgactgctgacgaaaagggtggggactaatgtactcacacccaacccctgcatgcctgtgtctacaattattcttccttatatgatgtgtcatatcaaatttaattcatttcttttttcatatgtcactcccacttctacatcttgcatttagcaaggacttctcctaagcccaggggcaacaaggaaatgctccgggtctagcatgtgacacacagcaatgaaaaaaatatgctcttttgacgtaagattgggttcaaaatgagcagtctatcagctgtcttccttgcctcccttttggcaacagctagcttaaaggtaagaattcagttgttgggtaccctttattactgagcaaaatcaaaatttgcttcctctttggagcataaaaaagcaacaggcaacaaagggaaaatccttcacaaccacttcttagtttacacaggggaaaaacaaacaccattaggatggctgtgtccacccaatgctgctgccgcctgcttctgcagccctgtgttgggggctgactctgttttgtgtttaaacaaggccaggctatcacgaggtcaggagatcgagaccatcctggctaatacggtgaaaccccgtctccactaaaaataaaaaaaaattagctgggcgtggtggtgggcgcctgtagtcccagctactcgggaggctgaggcaggagaatggcgtgaacctgggaggcggagcttgcagtgagccgagatcgcaccactgcactccagcctgggcgacagagcgagattccgtctcaaaaaaaaaaaaacaaaaacaaaaacaaacaaacaataaaaaaagaaggccatgctaatgccatgtcagtcattggtgaagcctccttgctgggagggtagcaatggaggtaggggaagggcgaagtccagggaagcccaggagttctccagccaggcagagaaattaactgagtattcattaggaagtcaagggcatataggaaaagactcaacccatctggaagctgcctttaaatagtgatagctttgaagaatgacagggacattttaaaaggacacaggaatccacttgtagaagttttactggccaaatgtggaacaactggaatattaaaataattactaatctacagcatttgtagccaattgaataaaacaaggacttatgagtccacactaagatacataaagggaaagggaacactctaccttacaagtaggaaaccagctaacaaacatacgagaaatactggaactagaaaaatcatttgatagccatcataataatagaaaaaccatttgatagccatcataataataattgatgtcagtaagaagtatcaatggatggtaggactagtgggtgaaattttgaggaggacaggatatttagtcttaaagtagctcccccccatatgattaaggacaaaatattatccttacgttggagaaacccggcatacagcgccttaaccaagtaatcaaaggtaatagtgccataatgagactaatcaatggcatgtggctcctgataggatgcactgagaacttagcctcacttctgtgatttcctgacaaaagagcatactctgagttgaaacaacgagggatagtctgcaaagcaactggcctgtactcttaaaataatgtaatgttatgaaaaagcaaagaaagacagaagaatgcttccaaattcaaggagatttaagagacatgacagccgatgcactgcatgtccttcttgctaaaaggtcgttattgacataattggtaaaatctgaataaggtctgtagattaggtaatcgtattaaattgatgtgaattacctgcttttgaacattgtactggggttatataagagaatgctcttggggaagggcagaacaagatggccagatagaagcctccactgatgttcacttcattgccccacaggaacaccaaatttaacaactatcatctacaccaacaagcacctttataagaaccaaaaatcagg

SEQ ID NO: 316718 - DNA, 4001 bp, Homo sapiens
cctttaatgaattctgattgatgggctgggtgtggtggctcacacctgtaattccagcactttgggaggctgaggccggtggatcacttgaggtcaggagttcgagaccagcctggccaacatggtgaaaccctgtctctgctaaaaatacaaaaattagctgggtatggtggtgcagacctgtaatcccagaaacttgggaggctgaggcaagagaatcacttgaacctggggagcggaggttgcagtgagccgagatggggccactgcactctggcctgggccacagagtgaaactctatctcaaaaaaaaaaaaaaaaattctgattgatgaaacacaaattattaatttcacatctgtaattaatattaatgttttaggtccatactcacatgaagaactgtgccttaaaaaatattaaaacctttcttaataatactaggtttaaatttgccaatcttccacatatgctacaaagatgattttagtctatcaagatgtttatagcgtatatttcattttttgtttatttaaacattcaaaaatttagatgtaaacattgtttagcagcattactttttcagtgtcttggatgcaaggcataaactgacttttatgactttaaatatattatctgtataatgttttaaaattttgcttttgaagccaggagctatattggaaataccacctacatttattttttaaatgtactgaagaataacacttttgaaacctgtaatccatatttaagtgaaatgcctctgtaaccaatctttgaagtccaaaagtgtcaatccactaaaatgcagttaccttgttgcagttcagaagtgtggggagctggtggcaggatgcaaatccttcccagactgatgtggcttttcaccacatagtggcgcctgttctctctggcctaaatagggataaggcatttctgggtcctgtggagagcacggccgactctccaggtgagtgtccattcagtgggcctatccgggaagtttggctaggaatatactgggactttaggagccatcgtccgcctcccagcttcctagcactgatgacttgttaattcctgcgcgtccgggttctcccgtggcacaggacaagaactccactctgtcccccaccaccctgcagcgggggtagctggggaggggattggctgttgggcagaggaaagcaacccattaggtccagtttcgctccttttttgtgtgtatatttttactatcaaagttagttgtgatcatcaactcgataaacttgaatcaggaatatgtctgcacaactacctgtaatgcgtctctgtaattaaagtactttcagaatcaattagtgtgaggtggaagttcatgaacccaaacgcccaatataacaccaaatacactaggttggtgtaaagatgccatcttctgttctttaatataccaattggcaaagcagagagaaacaggtgtctgtcctagatcacagccggagacttctcagcagacctccttcctcacagagagcggctttggaatgggagtgggctgggaggaggcaggggaggccaagaagcacaaattcatggctccccagtgtgagtgtgcccgcgcgtttctgcgctgggtgactctaggggcccaagttctgtccggaccggggagcgcggggcggtaaggacgcggcaattcacctcgccagcggctttagtgtcgcggtcccgaaaccgcggcgcctgacagctgagctgtccagcgccagggggcgaccagcccacgaagcgggaactcgaggagggaccgagggacgcgcggcggcggctactctgccgcgctccgcccttacctccaggtagtacaagtccacagtagtgatctgcgagtccaggaaatcttcataggcgttgaattgagtgacaatattgtccaaggccttcagcccctcttcctgatccattgcggtatcctcggccgaagcgtccctagcaacggaagcaggagggcagggtcaggaggctccacccacttcgttcctgccaatcagttgaagccggtgtgagctttggacgttaatcccaccccccggcggtttgttgcagtttctgtcttctgcctcactcctgtgaaaactttctggaattacccacccaagttcaggtcggatacccatccaccgactcaggcttcagtgaactgttgagcaaccagagaggtgcaaactgcaatccaaagttaaaaagtatgacactgcctacatacttagacaaaatattaggaattagctcccaattgcattctaaaacaatgttatgcaagacaaaaataccgagacattttgcaaaaagactgtctcaaaaacaagtatatcaaatggtgttgtgacaacgacaataataaaataatgattttgttaaattatttttaaagttataacaaaggtaaattattgctaatgtttgtgtacaagaagcaatttatgaaattcccaaaggaaagaaactcagtcaaaaaaatgtctttgcagaccttttttggcaccaagttcttgcacttattttactattttagcacagtgaaaaattttgctgtgttgaagctgccctttttaaagaataaaatatctgtgaaatcttattaaataaagtctttcactaaagattttttgttttcttcagaacagtattgtgtttttaaaatatgaatttaaagtaatccaacacaacagctggcaaaatatgttcagaaccaatctttggattttaatattttacaaaccatccttgggaattagcatataatacaatgctaagcctttaattgttgctctgtaagtacgtttctaattcatcttgaagattttcacagatttgctaacaaaattttaatgaaaacatctggtaagatacttcatttcagttagctttcctaatttaaaaagttcatcttaaaaattaggatgtcatgacttgcaaattttaagtgatatagacacaatatttaggatgctactaacttgtttttttgtttgtttaatgaatgtattctgacatgtttttaaagatattttgggccttatttttgaatgcaatttaattattgaatttgggaaaacaaaaaggagataaaaccttggacactggtaacccatcaaaagtaataataggccaggtacagtgactcccagcactttgggaggccgaggtgggtggatcacgaggtcaggagttcaagaccagactggccaacatggtgaaattccgtctctactaaaattacaaaaattagctaggcatgatggtgggcgcctgtaatcccagctactcaggaagctgaggcagaagaatcctcctatatcaagatttcatcacttttaagaaacagtaaagcatctagagaatgtttgggtttattaaactagagcactttaatgaaaaggacctatatgttagtaaaatgtgaggtcatggtttggctatatattgttctattatatcaattgtgattgtgcattttttagagaaacctcattaaatttgccatttggtcaacatctctttgatgaagtaatctctacagcatctaaatttaaacaatcatgaaattattttcagtcaatgagtctagaaatgtcttctaactcaaaacactgaggctgattttcagcaaatcagcttctctattaatatcaagaaaattcataaacttatccttgttcctcacagtaaggctagaattaatagtgcgtataactcaattgtccttttctaaactttcaatttaacttcagaaccactttcagacctgtgcctgagaaatgaaagggtggcaacaaagaaattagtaagtttcggcaagcttctcttttcattgcaaggcttttgttatgatcaagaaatactttattttggataacatgcattcctacttcaagtccaagatttttaaagactgaaacctggaatttagcaccgatcccagaaattccattctttgcaaaaggacaaag

SEQ ID NO: 316719 - DNA, 4001 bp, Homo sapiens
tgccatacgtgccgtaggtgatgcacaaatagctgtaagaattcaaaggtgtcagaaagagaaactgcaattttaaaattattatgtcttaacaaagactttgtcaaggcaaaatcatagtggcatttaaatgttgtgccttaaagcggaactgcaacaaacagaggtgaaagcaagtggagggagcagctgtggttgctgccgtgcatcagtgagaagaggatgagtatggagatccacacatgaccttgtcgggcagacccagggtgtgtgtgaacgagcgatgaactggaagcaggggctgctgggatagaatgaagctacatttgaaggacttcgagggattgtagggaaaagtgagccaaattcggaaatcaaatctggtgtttcaatgggtgttttgttttttgagacagagtttcactcttgttccccaggctggagtgcaatggcacgatcttggctcatggcaacctccacctcctgggttcaagcgattctcctgcctcagcctcccgagtagctgggattacaggcatgcaccaccacacctggctaattttgtattttttgtagagatggggtttctccatgttggtcaggctggttttgaactcccgacctcaggtgatctgcccacctcggcctcccaaaatgctgggattacaggtgtgagccactgtacccagcctcagtgggtgtttttaagatgtgaataaaataaatctctaatctcattataacttgtttagctatgtgtttacaaagcctcctgaagagcggttcactttttgcagagaaagtggcaggtggctagttttgttttatgatgcttcttttagatgtcacttttagtaggtgaggcttgggggccttgccttgggatatgggggcaggttttgttcataatctatgccctgtcccctgattgccagagtgtgtgcagaggttggatcagggggtttctgagtgttccacaaccagctcttatgtctctcccctcctcctgtctattgtgagctctgagggatgggaacggggaatctgtctggggatgagcagggtttggctgagcccctgcaaagccccctacccaagacatgtgaaaggggtgaagtgctctgtttgactcctaggtccatcttccgtaaacagcatctagttttggaattaaaataaactgaagaaaaggttagatctaggctccccaagatttcctccccttgtatttccctcttttcatcccttccccagccttttctttccttttcctaggggtttgcaaaccaattgtaaggctcaggacacattttgtagtgggaacaaagaaagagaataggaacagttgagaaatggaatctaataaaatcctaaagaaagaaacctgtgcccacctctgtggcaccaaaatgcagctcaatagatgtgattaattaaagcaatgaacaaagactaaatacccaccatgtgcaaattaatatgctgctggagatagaaagtggacagtgctgtaattcaaagtggaattgttagctttgtaaccataataactagtatttgtacagtgtttttagcttgaagagtttttcacagatgatagctcatttggtccttgcaaaccccataacgatggatattgttaatgttgtcacttcacatatgaggaatctgatactcagagattttaagtgtgtctaaagtcacagagctattgctgagacgaggaccaaggtcttcaggtgacaaaatccaacttccttctctttaaccacacaggctgatggaagctgaggtaaatatttccaatttatgggaacgtataatcatggagccagttttgtcttttcctacaacttattaattagtggacccacagtagaataaaagcaaaacccttaccttctgccacagttaccaccaaccagcataccagtaaccagtaggagaagcagtgtctgcgagccatggcttctactgagcagtcactgcgttgaacctgatgttgctttaaaggggagctggtgagtcaccagcagcctgattcaggtaatttgcatttgcacagtggaccacagagatcagggcttgcggtgtgagggtaagaaatcagcaaggaaataccagacagtatttgtcaaccagaagcttcttggaatgacagccagatatcaatcatctccccccagagggggattttggacaaccgcaccttcaccatccttctaatctctcaaatcttctcccatgttagtgccttttagttgtgtatatcagtcttcctctgcaagagaaataagctgtccagaaatatgcaacagtgcttctctctgtgcagcttacctacttaaaaagcgaaacaagagggagagggcattacccggaggcttcctgaccccggtggtttgcagtggagagttggggatcattcttaggcccccaaccagggtttatgctgcttctctgctctgcttttgtccaggaggtgagggcagcagaatcagaaagtgatcttccctagtggtcatgatggtcactgtctaaacaaacataaacattgggagagtaacttagtgagtcgtcctttcacggctcctcctgattcaccatattgcatataaaatggacatgacatgtctatgtccagttggtttcctgagagaaagacttcatcagctgctggatatatgagaggggattgtcacaggtgattaagaacatggaccttggagtcaggtaaaattccagtctttgttccttttcttactagctgagtgactgtggtgagtccctgagacttgctgaagcctcaggggcctcacctgtaaaatgggacttgtggtactaccctcagaggaatttgtgaattaaggagatgcttttaaaaaaaattttttttaaatttcaatcttttggggtacgagtggttttgggttacatggatggactctatggtggcgaactctgagattttagtgcactcgtcacccgagcagtgtacactgcacccaatatgtagtcttttatccctcacctccttcccaacctcccccacccctagcctctaaagtccattatatcattctgtatgtctttgtgtcctcatagctcagctcccacgtataagtgagaacatacgatatttggttttccattcctgagttacttaacttggaataatggcctccagctccatccaagttgctgcaaaagacattatttcatttttttatggctgagtagtattccatggtgtatttctaccacattttctttatccactcgttggtcgatggccacttagttggtttcatatcaaggagataattgacatacagctccaaccacagtgcctggcctgtgaaagggagtgtttgtgattgtcattaaattataataatcccaactgataatttattctcttaggaggctgtacttgccaaatcagttaatcactggaaagacctccactttaagcagaacattttcctgggtatcatggaaaaaaaaaaaaaaaaaaaaaaagaacaaactaaacatggtccctgtctttgaaggactgacaatctaacaagagaggctgtgcaaactgaaagtctaaatgaataaggatgcaaacactcacagatagaaaatggaaagttcctcaggcttgatgttagtcctaggcaaacttccagaacagataatcagatggatgatttgtcagcagtttgaaaaggaatcaggaaacatccaggacaaattgagttccttagactacccattcattcaataattctgtattgacttttatttattcagtgtcagacactggtcaaggtgctggggctaaagataagattcctgctctcatggaacttatagtttaggagacattaaaaattaactcaggaataacaataaagcgttttgagtgctaagagaggggaaggactgaaggctatgggagaacgaagcagacaaacacagtctgtaattttacatcaacgggtcagtatcac

SEQ ID NO: 316720 - DNA, 4001 bp, Homo sapiens
aaagacgatcatgaatatggtaacagtttattatgccaaggattataatgtgtctgatttataaaaaaaattacgttcaacaaaaagcctgttgaacaatgaatccaaaagtgagtatcaataatagcaaatagtaatagtaaagataatataatagtaaaaacaagtagttaagtgatacttactgagaacttattttgtgctgtttcactgttctaagcaccttctgtggattaactcatttagtcctcaactgtctcatgcactagataccattaacctcatcgtacagctgaggaaactgaggttaacctccctacgtccctaactaggaagtggaagagaagggatttaaactcaggtttaaatctgggtccacagcagatcctcaaccacttcactatgctgcttctccaacatcaaatatagaacagtaggaacatatgaagtcctgagctatcctatcttctgttttcataactgtctttgttcagacgttcaaagactggctccaacttaagatgttagaaaaggcttaatctgccttgctgaaaggcagttttgcataatagttaggttgcctgggttgactcctgactctactgatttccaaccttaggcaagttacttaacctctctgtgctttgttttctcatctgcaaaaagggcatacagtgcctatatcggggttgttacaaggaatgttattatatgtaaaaatacacagaacggtcctagcacataatatacaaatgctggccattacggttatagtctctacagactcatcttcatttctgttattgtatttctagttaagcacatcactccaccaaagcagttcttcactgcaccttcaaaaagagaattttttcagctgtgcctttactcacacactagttcagcatctccatagccctaacaactaggatttagaacagctgtccccttcagaggctacacttcttctttaccctggtcttcctagaatgcatgacccaatatgaaggatgcctataccgatggccctttaacagttagttaagccctctaagaatgtctcaccctgtccgatttatgacactaccagagtaacttttctaaaactttagttatcacaatggcacttctttcctgattccccttattgctactgtagtggttacagaacttccgaaatcgtagtaaagtatgagaatgcacacactctctcctcctcccctctcagtagtgcttttatgatcaggtccctcttattttcccatttccctggctccagccaagccgaacgctccgctacgcccaaacatctcctacagttttatgtctcagaatcttacttctctgccttcaaaaccaattttcaaagagttgtcttaaaagtcttctttaacaccccctgggacttgttaaatcctccttcagtgtttccatagcactttctacacaccagcgttataatcccaaacaaaaaagtcacagtagaatgcatatttgcttgtgcccctcctccccaggccgagggctcaacaagcagcaggagcaagcaggttgacccccaaatccgcagcgccccacagaatgtcaggtatgtaatcggttcccaatcaatctggctgggcgaatgaaccattggttggcttaatccgtttccccaggaaatgctccaagaggagctgggcagaagatgcagaggagctactttcctggtccaaccccctgcagagcgcgaaacagcggccctgggcaggatccccgcagcaaaccgcagcccctggacacacagcaagcttaatagtcactggatgaatgaaaagcgctgcctcctggtgccctggctgtcacccaaagcgccccgcgtagcccgcacagcctttccggcagtacctgcggcccctctccgccgggcctgcgcttcccgccaccgccgaccattctgcagctgcagcgccagcagaattccccgatccgcggccgcttccgagcgccgccaaccgcttccgggttcaaaagcctccaagccgaatttcagcgccgcccgggctcgccaatttaggggaaaggctccgcccattccccgccccctgagacctggcaccggacgcgttgaggccccgcccactcccgtgctgggcgcgtgcaaggagcgtcttctgtcagcgtagtctgcatctaggctttctggagcatcttccagggtcgctccagagaccccccagactactgaatctgaatccttagagtggtccaaccttcctcttcaggtgtctactagaggcaaggttggatgtatgcggctgttctcaatacagccccttccttgttttttcttcatttatatttacttaaaatattaatccttttctccttctcctccatccctctccctaccctactgtacggttattggcttacactaattcattcccgattgtctccaagaaggaaataaatgtctgtcggtctctgtctctgtaccgtcgtcttcttggtacaatttggactgtttttcctctacaccgctgatatgcaaagtgtagtccctgaaccagcggcctcagcatcctgagggaatttgttaaaacgccaaatctcaggccttacccagacttactgaatcaatatctgcatcgcaacaagatcccctggtaattcctatgcacataaaatttggaaggcacaactctcaactgatgtccttggacctccttcacatccatcctgggaaggtcttattcctcattcctgagatgagttctctatttcctcaatctgggtgttcctttttcttgattatataccctcatgttgtggaacatatccgccaatagttccttgagagaggttgctgccaggtcttttttcccacagagtgtgcatgtctggaaatgtttttattctggctgagcacagttctaggttgaaaataactttcactcggaatattggagggcttgctccgcaatattttagcttccagaattgttaagaaactatgtcgttatatttccttctccttcacaggtcactaaatttcttgatatgtaacctgctttcctttctgttttgttttgtctcaagaagctttaggatcttttctctgtttccagtgttttttgttttgttttgttttgttttgttttttttgagacggagtctcgctctgttgcccaggctggagtgcagtggtgccacctcagctcactgcaagctccacctcccgggttcacaccgttctcctacctcagcctccggagtagctgggactacaggcgcccgccaccacgcccagctaattttttttttttttgtatttttagtagagacggggtttcaccgtgttagccaggatggtctcgatctcctgacctcgtgatccgccctcctcggcctcccaaagtgctgggatgacgggtgtgagccaccgcgtccggcctattcccagtgttctaaaacactattgagtgtcttggttatgggtcttttctcattcctatcgaccagtttttcaatcctgaaacacatgttcttcagttatgggaattcttctggtattatttatttgatcatttcttcccccccaccccccatcgtatctcttcttttttgaaatttgttatttagatcgtggaccttcttggctgatgttttttcttacctgtctgtcctattttctatgtcttcatatttttattctactttctctgtgactttctcaacttaattggacaattacttaatttctttattatacttaataaagattaattacttaatttctgtattatacctttatttctcagtgctctttttattctctgttcttttatagcattacattatttttcatgaatatagctccttttatctctgaagatgtcaattatagcgtttttaaaaatgctttctacgtaactctgcattgactttgattcttttgagtcttttttggttgtttgtttgtttacatttggttcctgttgtttctgctagaggcattc

SEQ ID NO: 316721 - DNA, 4001 bp, Homo sapiens
agttacttaatctccctgccttccatttccttgtacacatgagacaattcccccctcagaggattgttgtaaggatgagatgaagtaattcaatgagcattcatccaacatatatttatctaggagccattctgcttactgctatactggttaaaaatccccttgtccactatatatgtgccatacattgctagcccccaggaattaaaaaagacaatataataaagcgacattatggcaagaaaatactaacttttctacctatgtgtctttttggaaccaataatacaaatctgacttgtttttgtgagctgttacaaatgaatctgcaagactgaatccaagtacaaaatatcaggtcttgatttagaagatatttctgaatagcacgtttcaaggtttttggttttttttttttttttgagacagaatctcactctgttgcccaggctggagtgcagtggcgtgatctcggctcactgcagcctccgcctcccgggttcaagggattctcctgcctcagcctcccgagtagctgggactataggcgcccgccaccacgcccggcttttttttttttttttttttttttttttttttttttgtatttttagtagagacggggtttcaccgtgttagccaggatggtctcgatctcctgacctcgtgatccgcccgccttggcctcccaaggtgctgggattacaggcatgaaccatcgcacccagaccgcacgtttcaagtttaggtgttcaccagtgaactgcgcctggctgatacacacaaggtcacaaatgacacaaagatcagaagtgatggcatataccatacatgactgtgtaactagtataggacctagcatagggtaaatgctcataaatattaatttaaaaaaattaagtttggtttccaactttgccacttccacacagagtgactctgggttaacttgtctggatcttaattttcagtaaactagcaatgtgtctgcttcgcctatctcataggatacttgtgatcaaatgaaattacatgacaatgtatctggcgctaataaaacggtaatttatgagacacagaatgactactgacgccagctagcctacaagcctaatagtagagataagatgttaatacataaccaccaagaaataaacatggagatctagtgaaaacccatgacatgttttctaaaaatgtcatcttccttgtgacgaaaggagctggtcattgctaggcaggtgctgtacctttttcaactcccacgtttcagcagcaggctctgctgagtgacattttgcaaggctgaggcccccgtaggcgcaggcgccgttggggtgcgcatccggggacctgcaggttacaagcagcagatcccaccttcagtcctggctctgacaagccctccaggtaaggcgcctttgcatttagccgagctagagaagagagctggaagccacctctacctttcacggggggaagggactgcccgcgcgctcgcccccattatctcagccctccgaagcgcgccacggactccagccttgtctctcacccccagcctcaccccgcgtccctgacccgcgagtctcccgcccagctccgcgtccccggtccctgcctccaggcgcgtacacggcgcgctaagaggcgcggggagctcttagcgcacctactacttaaccggaccggctacttactggccgccaggtggaagcctgcgatcgagctggccgggcctcccagcaccgccgctctccaggctccctttccaggactcaactttggtcccagccccaatcgcagctccggtaacctttccaggaaccgaaatgctagatacagcggaaggagaaacggagggaggaagacaaacccggagcagggcggcgcggcagtttggacacgccccgagctctcctgggctctcagtccccgtcaggatgggaggcgcgtgccgagggaggaggctgaggacacagcctcctttcgccctgcgctgcccggccttccgcgtgaccccgcctatgacctcggggcgttccgcctacgtctgaccgtcaggtgcgcacgcgcacttacaggcttgttttgccagcttcacgccacccgggatgggagaaagcaggtgtcgcgagagttgggcgcaagacgccttgtagggagtgtaactatggccggcctgcggaacgaaagtgaacaggagccgctcttaggcgacacacctggaagcaggtgagcggatcctggtggagggacccctcagtctcctgcgctgttgggactggttcctttccgggcgtcacccgcactgggacaaaccctcgctgccagaggggttccagcgcggtgggagccggtggctgggttgtgtgagccgaggagattcgctcccaacgtaggagaaagggcgtctggccgcaccgtgcggtgatgagcccgtgggttcgagtgacggggctggagaaacccaggctgctgctttgcctgttgcagcacccaagctgagaggtgacagcgtgctggcagtcctcacagcccttgctcgctctccaggcctcctctgcctgggctcccactttggcggcacttgaggagcccttcagcccaccgctgcactgtgggagcccctttctgggctggccaaggtgggagccggctccctcagcttgcagggaggtgtggtgggagaggcgtgagcgggaaccggggctgcgcgccgcgcttgcgggccagctggagttccgagtgggcgtgggcttggcgggccccgcactgggagcagcaggccggccctgccggccccgggcaatgaggggcttagcacccgggccagcggctgcggagggtgtgctgggtcccccagcagtgccagcccactggcgctgcgctcgatttctcgccgggccttagctgccttcccgcggggcagggctcgggacctgcagcccgccatgcctgagcctcccacccactccgtgggctcctgtgcggcccgagcctccccgatgagcgccgctccctactccacggtgcctagtcccatcgaccacccaagggctgaggagtgcgggtgcacggcgcgggactggcaggcagctccacctgcagccccggtgcgggatccactgggcgaagccagctgggctcctgagtctggtggagacgtggagaacgtttatgtctagctcagggattgtaactacaccaatcggcactctgtatctagctcaaggtttgtaaacacaccaatcagcaccctgtgtctagctcagggtttgtgaatgcaccagtcgacactctgtatctagctactctggtggggccttggagaacctttctgtcaacactctgtatctagttaatctagtggggacgtggagaacctttgtgtctagctcagggattgtaaacgcaccaatcagcgccctgtcaaaacagactactcggctctaccaatcagcaggatgtgggtggggccagataagagaataaaagcaggctgcccaccagtagtggcaacccgctgaggtccctttccacagtgtggaagctttgttttttcgctctttgcgataaatcttgctactgctcactctttgggaccatacggcttttatgagccgtaacactcaccgcgaaggtctgcagtttcactcctgaagccagcgagaccacggggaggaacgaacaactccagacgcgccgccttaagagttgtaacactcaccacgaaggtctgcagcttcgctcttgagccagcgagaccacgaacccaccagaaggaagaaactctgaacacatctgagcatcagaaggaacaaactccagacgtgccaccttaagagctgttaacactcaccgcgagggtccgcagcttcattcttgaagtcagtgagaccaagaacccaccaatcccggacacaaagccaccacattctgtatcttctgcattccatatttggccctttgtagctgatcactttccagatttcacagtt

SEQ ID NO: 316722 - DNA, 4001 bp, Homo sapiens
tttatcttcccagtttttaacactttatgcctatttacatattgataaaaagaaaagcctagaacatttcttgtaaggcctctattttctatccagagctgaaagttcaggtcataaaaacacacacacacacaaaacccactgtatttgagattatcagtctctaccaaaacagggagggagagtaaaactctccctttacaaatggcttgacagagaattttatagaaatccctatcccttttgccatcctcccattaatccctctcgctcccctgccacccctttttttgagacagggtttgctttgtctcccagactggagtatagtggcacgttcacagctcactgaagcctcgacctccccagctcaagcaatcctcctatttcagcttcccaagtagctgggactacaggcgtgagccactgtgcctggccctctctgtcttctctaacttactacaccatccaagaaatgagacagtgaggcttaagacacccaaatcttggtgaaaatataggatgggggttgggggtgtagaagaagtgactgcctatcaagaagtgagaatttcagaagtaactcataggcatggtgactaaggagttaacagtgagtgaacaatcaactccaaagtccaggagagctgtctagatgggctacactgctcttctcccataggagccctgtttcatctcactgcttctccttagcttgtctcttaacaccatctccatttggtgtctgcttcctcctgccctattctcttaagttcccttcctttaccctctgccagaattgtcttttcagagcgagtggcgatgaaaatggagagcatgggttttacaagtaaactctacagaattttgtaacttggtgttttaggatatgtggatgtgtgtaagaaaagggcaaagtgtctcaggtttctgggaggtaacggtggataaagttggcgtttactgaaatggtaacgctgcaaggcaagtaaatttgggtaagaagctgttaagagttcagttttggacatgtttagtttgagacagctgcgtggtctgctcatggttaaacagctgtatagtaaaaatagctttcgttgagcacttactactgccaggcaacatgcaaatcactacgatctcaatcttcactacacccctatgacctgggttactaatggtcccaaatggcagatgaaaaaataaagctccaaaaggcgaaataacttctccggtcgcttcatggtgctgcaggaactcaagcctagctggtttcattccaaatcatgagaaaatatgacgccaagttttctccacacttctttggagactcccacggacgtgctaaagaaggacattttactcctagtccttctcccccacccacccgactgcgccactcaccagctgtgtgatcttggacatatataaactctctggaattcagtcccctccccgcccaaaagcgagcaaatgatctctaagctccttaccaccccaattttgcattcgagatactcaccatggcaaaaaatacacaaagagaaacaccaccacatcgaaaaggatgaaaagccagaggtccaaccagtaggagtgtttgggaagcccatttgccccagactgaggcctcacatcgaagttctgcctccctccctcgctaaagcctcgccgctcccggagaccatctcgaccatcaacacccggtgcgtccacctccatctcgctcctgcagcttcgtaacaaccctagaaaccgaaaatgcttaagttcccggactttggtgttcgccgcaccggaaactgagcggagtccggccgcctgcgcagtgcgccgcgccccgggttccggaatgcactctgaacctactcttcccagcgcgcaggcgcctggctcggctttccgctgcctccgtgaccgctggcatgaagcgcggcctccgccttgacactaagtcaatgggcccgcctacttctgcctcgcggcgtcccaggcagatagctggttattcaggtttcgttggaagaaatacgttctcgtccccctgaaaggcccagtccagtcaggtgatggactcctccctgaaactgcacgaggtcacctctcctatccccgtattccgtttggatccttatgccaacgtgttaggaaggccccctctggtgggttttgtactgtctctagcatttgacacttaatatttaaacaccaccaatgaggtggacgtcctactcacgggactgagtttccaaacgggccagagagcagcacgtgagcattttgcaggtacttcaagggagtgggtttaagaataacctggccgcgcccccctgtaatcccagcactttgagaggccgaggcgggcggatcacctgaggtaaggagttcgagaccagcctggccaacatgctgaaatcccgtctctactaaaaaaaaaaaaaaaaaaaaaaaaatccaaaaattagccgggcgtggtggcaggcgcctgtaatcccagttactcgggaggctgaggcaggagaatcgcttgaacccgggaggcggaggttgcagtgagctgagatcgtgccactattgcactccagcctgggcaacagagcgagactccatctggggggaaatgggggtgggaagaataacccaaaggttatttgactttgagtgtgagcctcagcaagaacagaatgctagcaggaagaaaatgacctatactgcctggattttacctcgtgggtccaatttcaaatattctctttcttgtcacattatgattcctgaattgttcagaaaataacgggcacccagacatataagtggttctcttggtgcatagtaaatggagataagactgtagttgtgtttttacaaagtcattaaatcgtcgtaaaacctctttgaaggggcagtactccatcttatagaattaggaaatgagacacaaaaggagtgaattgtctaaggttactaaaaaaattataaagcctaaaattaactccaaatccagcactcttaaagctgttccatagcttcctaaccttgctccaatttgcctccaaatcaattgccaggttttagagacaaagatagtatacgacctttcaagaaaaatgctttgtagattctgggatgagagggccattacctgagaattaattagattgtgtgctgtaatacagattgtctgatggtagtagacaaaaagaccctgggcttaagtggcattgaatctttacaaaaattaggaaaggcaaataaacaattgcctctaccagagatggaagcattcttctcgctgacaaggtaggatcaattactcctagttattgaagtaggattgataaaaaattattgagattattagtgttgaagaagcatgacataaactgaacaggtcttgaaatggttttaaacttgtctttggcccagagtcacatgctcatcatgaggggatgttgacagtatgatctgttctagagtcaggaacgtctgccagacttggaagagcaactagtgcaaataaggaggggttatttaaactaaattcagttgaaagattctatttccgactttacccttgtaaaagtcccactgattgttgattattccacattacagaaatgagtttagagtgtgttatggctgattttgaactactggcctcaagtgatccttctgcctcgacttcccaaagtactgggattacaggcatgagccaccttgctcagttggcatttgccattatcaaagcaatttaaattttaaaaagtactgtactgaaatccaggttcactgtcagtcatgcaatacctcggcacttgtccaaccaccttgaactttctacttcacatgttcaactgaaaaatatgcaccagggactacagattgaatcattgcactgcaaccatgatccaacacttccataattctgtcagcacaattaatctgattgagctggggtggagaaggtggtgtatgaaaatgctataaccatcaggccaaag

SEQ ID NO: 316723 - DNA, 4001 bp, Homo sapiens
gttatggctgattttgaactactggcctcaagtgatccttctgcctcgacttcccaaagtactgggattacaggcatgagccaccttgctcagttggcatttgccattatcaaagcaatttaaattttaaaaagtactgtactgaaatccaggttcactgtcagtcatgcaatacctcggcacttgtccaaccaccttgaactttctacttcacatgttcaactgaaaaatatgcaccagggactacagattgaatcattgcactgcaaccatgatccaacacttccataattctgtcagcacaattaatctgattgagctggggtggagaaggtggtgtatgaaaatgctataaccatcaggccaaagacagctaagtgtttttaagaagacgttacagatcttctgaacttcaagtgcaataagttttcaggagggagatgatgatgaattttgctttaacctaagggataatgcaaatttttcgtatgcagctctcaagccagtatatccatgtgataaagcatcctcatgatcatcctaggaattaaattaattttatagaataacctctccaacagtggagaatttggttactgtaattttcatctggaaatatatgtgtttatcttaaattattctttctcatcttaactttgtcttttcctccttttcaagttgagtacctgtcctagcaacaaccctgttgattggtaccacaggttatttctccatcttctgggtcattttatttattcattttgttgttattgttctcttcaattctttttttttttttttttttggagacggagtcttgctctgtcgcccaggctggagtgcaatggtgcgatcttggctcactgcaacctccacctcatggggtcaagcgattctccctgcctcagcctcctgagtagctgggatttcaggcgtctgccagcacgcctggctaatttttgtatttttagtagagacagagtttcgccatgttggccaggctggtcttgaactcctgacctcaggtgatccgcccgcctcggcctgccaaagtgctgggattgcaggcatgagccactgcacccaggctgttctctttcattcttactcctttgtatatcttcaatagttttctttgtttaagagttgtactatctgctgggcgctgttgttcacacctgtaatcccagcacttcgggaggccaaggtgggtggattgcttgagcctaggtgttcgagacaagcctgagcaacatggcgaaatcccatctctacaaaaaatagaaaagttagctaagtgtggtggcacacacctgtagtcctagctactcaggaggctgaattgggaggatcacttgaggtcgaggctgcagtgaactgttattgtgccactgcacttcagccttgatgacagagccagaccatgttccctccatgctctaacaaagaaagagttgtactatcatcataactaggttgcagcttctcttttatcttcatcttggccttagcagttcccacctttatacccactattaatctggctctactctactcagccaacctggtacccaggaaacattctttgctccagtcagagtgctttcttccatcttcctcatggaaactattctcttggcctctgggctttggtgcatgtttttcctgttaaactggaatgctttctcacctgtccaaatcctactcatccttcagggccccacttaagtgccaacttcataaaatttccttcactacaattcacattgatctctccattcttggtatttctaacataccaattgtgaaaacttcacatttaacttgtctccaccttctatgtcatgttttcttcttggggagagggttattttctcaagatcaaggcagtgaatgaagtatttgtttccatagttttttgccttcctttggcacctattatttccctctacattctgtaatggtctcctattaatggggctatttattagactggtcatctttcaaaatttccctacctctgactcaaaaaacactgaaattttcttgatattgtctggcacattggcttgctttgtagcaattttatgtaaattttctcccctgttagagtattaagttatgttcatttgttttgagacagggtattggtctgtcacacatgctggagtgcagtggtgcaatcagagctcatggcaaccttgaacccctgggctcaagcaatccttccacctcagctttcccagttgttaggactacaggcacacaccaccatgccaggcttgctttttattaatgtttatttttgtagaaatgggttttcactatgttgcccagtgaaactcctgttttcaagtgatcctcctgcttcagcctctcaaactgccaggattacaggcatgagccactgaacctagcaattattaagtgttctttaaaggagagacagtatttttgccatctttgcaatctccacagctctttaaacagtgtcttcctcatggaagaaatttaatatgtattcaacaatattttgttatattctgcaaccactaacacaatcctagtcaaaaaaatacttgtaaaattgtgtgttttagaacataatagtgtatgataccagtgggatctaacactattgatctatactcttagcagggatactttctgagatgttttgaagtactagtaatggatatgtgccaatcctttcccctttgtggattttccttctttaatttcagtaaatactttttattacctgctgtgtgtcaggcattgtccaaggagccataagagttatggaagcaataccaaccgattcattaaaaatactgactgaggacatataacagagcaatgaagttttcgaacagtatcacagagcctggggttctgcataatgatttgggttttgaaaggctgaacagaactggctgtgaacatactagtcagatacaattaaacctctttctgcttatacatgtacatgtattatacatgtacatgtctgtacttatacatgtaaagacagacttcaaccataaaaacttagttttgtttatattttagagtttcatacaagattttatttcaaaacaaagcatccttctgcttttaaaagtttaaaaacttcggtagagcagagtttagtaggcacaaatgacaaagatgttgaaacctacaactttgaaatttcattaagctaatcatcagcaatcaacctgttatttgttttattgaaaggtgttagagaggcagtcattgaggatggagtctcaaaagttagtcaatacatgacatgtttttatctcataagattataggtttccaagcataggaaacctgtgcttggaattaaaacctatgcttggaattaaacagttgttaatttagaataaataaatggatgctaaggtgatcattgctatatataaaatattgaccagaattagacttataagtgtgacaaatgtaaccgtgttaacagaagttattcttggaagatgggatcacagatagtttcattctttgtgtttttccatatttttcaaattttctcaatgaaaatgcattttattaactagaagttggaaagtttgttgaaaaaaagtaaattagaaaataaacaagacaaagtctagtccaaaattattatttaactgtttatggcatcagatcacagacagtagacacataagtatcaaggggctttaatgatttataatagtgctttttaaactaaatttcatggaatgctatgattcctcggagtttactcaaggaccaacatggaatggaagagatagatgcagggaatgtggcttaaggcatctactggaaaagctcagctttcttgttcatatctataaatatgcctgttggagaacagatttattgttgttgttgttgttgttgtttttctgttctagtgaaagctagtgtcaaaaagtcaccttgggtgacccatgttcaaaatggtggaatagcaactccaagtt

SEQ ID NO: 316724 - DNA, 4001 bp, Homo sapiens
gaaatgcctatctccggtgtgattttcaattattgtgtatgggggcttagaatacattaataaatcttgaggcaaaaacagaatgataaaaataacacttcaaaggagtacaggagaatgaactttcatgacattcaatgaaggaggcaggtatgcaaagtgatatgttttctaagatgtacttttcattttttgttttatccttttactttgtaccataagcaattttggaaagaccacaactattagtgatgtctacataatcatactaatgaagtacacagaagcttaaatgaagtatttttatatgctcccttacaactatttgaaaatttactttggaaacccctgctcaaatgcaacccctccccacccccaaaggaattcttgtgctgtcttcttcacttttccagttaagcaatttaagttagaggaaatcaagcccttgagcaaatgaatagttaacgggaaaaaccactaggaagggaatccgaagaacaagctaccaaattatttgcttgagtcactttctcttatattgtcacagatgaaaaattacactccacgtggtgatcaaacctaacgctaaggcatattttgtgtgccacacagtattactctgtttcctaagtaacctattgaaacaatgtaaggtatacatctattaatgcatttagtgatgatactggaatttgtgaaacgtgacagaaaggacagatgaagaaagatgaggagagacaggtattaattgtcctaacagtacaggctgtaataaaggccaataatcatttgaattcctgctccttaatgtgagtctaaagagcggcttacctcaggtatttggaaagtctaaatactgtatttgctgtagaaaattcatccaacatacaattcaatttttaaaattaaaccttttgcctaatctttaagatatttgatgttataatgcccattatcacactttatttaaatgagataaactcagagagtttaaaaaattacgcaacttctcttttcccttactatggctggcctcttataaccgaaagcaatattcttgcctctccactttttaactgaagctttgatctcatctgtatttatgaagaacgtgctctgggagagtccctgtcaagacattcattgtaacacccgctcctactcatgctttcagcgctgcccgtggacggaatccacccacaccttccagacacgctaggtgtgggctcggaaacgcaagatggagggcgggaggggagccggcgtctcctaaacctggcgcagggcacggactcgaagttgaaaaagaagtgtttacaagtgaggcttttaaataaatcaccgctatggagggcatttcctccgagccctgggcgccagcctgagaatcctctgccggacgccaggggacgaaccacgctgaccccgccagacacgcgaccccggggccggcgctggcgtctgcactcgcgcgaccccgccgctcctcctgggagcgccgtctaaccgctcccggcgacgacttcccagagcgccggggagccagtgcccacgcggggcagagctgcggcgcggcccgcgggccgggccccttccctccaacgccgggcggggctcgcggcccccgacccggccgcttcgccgccgcccctccccgcgctcacctgctcgctctccttcggccgctgtccgcgccgccgcgggctcgccccgggatcccacccggtccctgccgcctcccgctccgccagcgcgtccccgtcctcgtcgcgttccccgccgtcgccgccccgcagcagctccccggctgagcacatcccgcagccaactcctaccgccccggacagccgccggaggaccacgccgcgacgcaccaggcagcgccgccgcccgaaggctgccctgggatccgccgcacccgccgctgacaggagccgccggagcgcgccccgccggcctgggcgcctgaagtaccagcccggcccctcctgtcactggctcgcccaacccccggccgtcggggcggagccgtacaggggaggggccaagacagggggcggggccaacggtgtgttggggggcgggggtgtgtgtgtgagattgagagagaggccgacagactgagagaagaagggtgttgtgtgaaaaactatggacatacactgcatgagggagattgtacatgagagaggctgtgtgtatgtatgagggatattgtgtgtgcgtaagagaccgttagagagtgtgagagagacgctgagcgtgatttgtgtgtgtgtgtgagagagattctatataaaagaaactgcgtataagagattgtatgcactttgggaggccgaggcgggcagatagcttgagcccaggagttggagaccagcctgggcaaccccatctctactaaaaatagaattaggcgggcgtggtggcggcagtgtggtcccagctactcaggaggctgaggtgggaggatcgtctcagcgcgggaagtcgaggctgcagtgagcagagatcacaccactgcactccagcgtgggcgacagaaccagaccccgtttcagagagagagagagagagagagaggaggggggggggaaagagagagagagagagagagagagagagattgagattgtatgtgtatgcaagagactgtgagagagagattgtatgagggaacaacagaaactgagagagatcaagtgtgaaagagaaattacttgtgtgagagagccagtgcatatatttaagagagagcgcatttgtataagagattagtgtgtgtgggtttgtatgtgagagagaaacacacacatgcacccagttacactctccagcagagtacccctgttcttgcctgagtatctgcccgtccttttcaaggaagacacatttcactgtccctcttgttcctttagcctcctttcctagtgtctcactgaaggtctgtgtatttgtccctttctgttgagtgcttcctagtgtgtgttgtttgttggagccttgggtcgtttgatggtgtatcaaatgatgtatctttctgtaactgggtaagaatatgtctttctcagtgggtggtgaggggaatatatccaattgataattattttttgtactactccatccattttattcaaggaaaatggaagggtgtttaaataaaatatcacttttttttctgtgtatgccttatctgtacattgggaaaacgatgggttattgtacaggtaaaatacagaaaagtaaatatggaaagtaaacatgtgtacacatggagaagagtaagagttatttgggatcttctattaaaatgttttcaggcccagagaaggaattaaaataggcagaatctcataggcttattttaaagaagtttcctgttttttgtagtcaggagattctcagtctttctcacacacccacaatctctcatacacacaatctctctcatacacacatgatttcacatacatacagtctctctcacacatatacaacctcgcgcacacaccatctctcacacatggtttctcacacatgccctctctgattgtctctcctccacaaacaatctctctaggggccagaaaatatgccgttggatatcaaaaattagaaagaaaatgaatctggttcattccctttcttaaaagtctttaaaactccagaaaagagtatttaatattatatacatacaatcagaaacaaatatcaccatgggaacccagtagcctttctgatgggcctcattttttttcccctgaaggcaacattttcattcttggaattttggtttggctattagtagtgtttcttataaaaaccaactttttttttttttggctgggcgtggtggctcacgcctgtaatcccagcactttgggaggccgaggcaggcgaatcacaaggtcaagagatggagaccatcctggccaacatggtgaaaccccatctctactacaaatacaaaaactagctgggtgtggtggcacatgcctgta

SEQ ID NO: 316725 - DNA, 4001 bp, Homo sapiens
cttcccaagttccctttactccaaaagcctatcattaacaaaatcaaaagtctggggaaaagtatatgcaattcatacttgatacaaataactaatttctttaatgcacaaagagctcctagaaatcaataaggaaaagaccaacactccaacagaaaagtgaccaaaaattatgaacagccagttcacggagagaaaatgcaaaatgttcacttataatgacagaaatgcaaactaaaaccacaataaattaccatttttcacttagattggcaaggatcagaaagtctgacaacaagctgtgttaatgaaggcattgagaaaaaaatcatttattgctagtgaggcataattgatatagcctctgtgaagagcaatacgtcaatatctatcaaaataaaaatgcaactatcctttgacaaaaataagtctagttctaggagttactatacctgcacatattcaaaatgacataagcgttgaggatatttgtggtagcattgttcataataacaaaatgttggaagcaacttaaatacccatcagtagaggactggtaaaaaaaattatgctataccatacaatgaaacactgtataactgctaaaatgaatgaggcagctctgaattaacatctatgctaaaatatgttgtgaagtgaaaaaaagcaaggtgcatttatttaataaaaaggaagcttatttgcatatatgcttgtgaggcatacactatctcaggaaacatccaagaaacgagtggtaacagtggttgcttccctgaagggaattatctgcctgcagatatgggaaggaggaaggcttcctttcaacttcatcactttttaaaaacctatctgcattttacactatgacagacatgcattactattttaaggtaactgaacagtttaaaattattttttggccgggcgcggtggctcacacctgtaatcccagcactttgggaggccaaggcaggcggatcacaaggtcaggagatcgagaccatcctggcgaacatggtgaaaccccgtctctactaaaaatacaaaaattagctgggcgtggtggcacgcgcctgtagttccagctactcgggaggttgaggcagaagaatcgcttgaacccggaggcggaggttgcagtgagcagagatcgctccactgcactccagcctggcaacagagcaagactccgtctcaaaaaaatatatatattttaagtctaatttaaggccggttctcttaaaaagagtatggtggctgcctcttctcccctttatattatatatgctgaacgtttccgaaaagtcataatgcatattatcaagatgattactgtcctgcaatgcaattttaagtttggctgtttagactttcttaatacaatatttattgttactctgtatgtttctacttttaacctctattcttcaaattgctcttaaaacaagttaaaaaaataaattttcaattgttctgattgctttatctttacctggaaagacctctaaaaggaaacgaaggaagagaaaggagaccgaacactggagcattaagaacccaggaaaagaaaaaatgtccgcaaagtttaaaagaaataagttatggtaaaggtgttttctcaaccaaatgatctgcaaggaaaatttccaaattcctctgctcaacaaaaatttctttagtttttctacaataatgatttcttttcagtttccatacctccccgaggccccgcccatttatcagggaaacggagaaatgaggaagtcagcctgaaagggggagtacgctcacttagcaggagacagctgaaaagtaaaatacttttcagtattttccagagatcaagcgaaaaacaagacctggcgacgacgaaaggaatgtcagagagaagagggaacaactagagaacacagaccacgaagcttttctcaaacactggcttcttcttttcagccgaggtcacaggagagggctcggctttaggctccacccagctgcctacacgttctgggggaggggcttagaacactgaagctaagacgcttgatttttctaggaaagaaagatgttgaagggccacacatgaacaactgaagacttctaatcgttccactaaagtatgagtggtttcctagaagaaggaagggtgattcagaaatataaatactgtgcaataatttgaaaatcaactgtaaatcattaagattacaatataacatgtacagaaatatttcatttaatacaactaaaggctaactggccatataagcaaaaactataaattatattataccagctataaactatattatactatattcctggggaggcatgttcatagcagttaacaattgtgaaattagaaccatactgcctgggttcaaatctcaactcaggcacttgccagctgtgtgatctgttctgatccttgcttaaacttctaactttgtattcttcctggtactttgcacatagtactgggtgctcaatgtcaattgatcaaccaaatgaatgttagtgaaatgtcactaattttcaatctatacaactttaggggttttctttattgcagaaaagtcatataaaaacattaaatggtggcttgacaagagttacacacaaactacatacatttctgcttgtcattccttgtattcaatttatactaatagatacttttcatgaacatccactgaattctttcattccttccatcagatatttaatcaactctgtgttccaggtattatgatggagcctggagacaaactacaaaacatgacagataatgcaggaaggagcatgaagtaagtactaaggtggcacctaccttgggagaagtggataaagaactcaggagatgtgaaaaggaggaacatgagaggggatcctttaaggataagtgaaatcatcacaattttgtttcctaatgatgaaacttatgttgaaaatactccattaaaattcaactactaaaatcttgtaaccacaaacacaaacgcaaaaacaaaaaactatcatgatcataattatgatcatgtaagctaaaaaattcgagtgcagacataaaagttttcacctgagatattcactttatgtaaataccactcatcagttatagccagaaggtatttgcttccatccagtttgggtgtaagcgtagagttaagtctataattatttatttgatgccaagtagaaatacgacaatatacaaggttcaaatgtgggagaagttacaagcaagtccttggagagtcagtgagatgtttatgaagaaagagtcatatactgaacttcaaaaacgagttggaccttgcacactcaattttcccttagctataacgtttatacaaaaagtttttgtgtaaacgttatagctactaaaaatcagaacaagttcaattatcaccaactcaaagctggattagaccttttcaatgattattaagctacacatccatatttaacagctagtctttagaggaagggaccatctcattctattaacagtgagtattgagtaaggccttcagatgcctaactgcatatatttgaatacatttttaaaatttcttaacacatatcgctaaggttactttgtttatatgacattatgagtacgggacaacaaaactcttaagccgttaaacagaaagccaaatcaagctgcatctatgacatgcctgtttagtgaaactttacttcagtccataaaaatacaatttattaaaagcacaaaactagtggctagcttcaagttaacatttttgttgctagtggtgagatttcctctaatgttaaatgattttttttaaaaaaatacgttttaagtccagacaaaattaattttcaaaaatgaaaattgtaatctatccacaaatgtaagttttaccgttttgttttttgcaaaaaaaagtaccttttatctttccttatatttgaggaaacaagcttatctttgaagaagtagctgctgaatttgcaagatcttttga

SEQ ID NO: 316726 - DNA, 4001 bp, Homo sapiens
attcttcctggtactttgcacatagtactgggtgctcaatgtcaattgatcaaccaaatgaatgttagtgaaatgtcactaattttcaatctatacaactttaggggttttctttattgcagaaaagtcatataaaaacattaaatggtggcttgacaagagttacacacaaactacatacatttctgcttgtcattccttgtattcaatttatactaatagatacttttcatgaacatccactgaattctttcattccttccatcagatatttaatcaactctgtgttccaggtattatgatggagcctggagacaaactacaaaacatgacagataatgcaggaaggagcatgaagtaagtactaaggtggcacctaccttgggagaagtggataaagaactcaggagatgtgaaaaggaggaacatgagaggggatcctttaaggataagtgaaatcatcacaattttgtttcctaatgatgaaacttatgttgaaaatactccattaaaattcaactactaaaatcttgtaaccacaaacacaaacgcaaaaacaaaaaactatcatgatcataattatgatcatgtaagctaaaaaattcgagtgcagacataaaagttttcacctgagatattcactttatgtaaataccactcatcagttatagccagaaggtatttgcttccatccagtttgggtgtaagcgtagagttaagtctataattatttatttgatgccaagtagaaatacgacaatatacaaggttcaaatgtgggagaagttacaagcaagtccttggagagtcagtgagatgtttatgaagaaagagtcatatactgaacttcaaaaacgagttggaccttgcacactcaattttcccttagctataacgtttatacaaaaagtttttgtgtaaacgttatagctactaaaaatcagaacaagttcaattatcaccaactcaaagctggattagaccttttcaatgattattaagctacacatccatatttaacagctagtctttagaggaagggaccatctcattctattaacagtgagtattgagtaaggccttcagatgcctaactgcatatatttgaatacatttttaaaatttcttaacacatatcgctaaggttactttgtttatatgacattatgagtacgggacaacaaaactcttaagccgttaaacagaaagccaaatcaagctgcatctatgacatgcctgtttagtgaaactttacttcagtccataaaaatacaatttattaaaagcacaaaactagtggctagcttcaagttaacatttttgttgctagtggtgagatttcctctaatgttaaatgattttttttaaaaaaatacgttttaagtccagacaaaattaattttcaaaaatgaaaattgtaatctatccacaaatgtaagttttaccgttttgttttttgcaaaaaaaagtaccttttatctttccttatatttgaggaaacaagcttatctttgaagaagtagctgctgaatttgcaagatcttttgagtacttctaactacacgctttattactacacagttaaatatttaaacaacagttgtctcctttgtctaaagacccacaaagaccgagaaggtacttaccttcttgagatgaccaaatccaaacctagaactcctccagaggtacagccttggtgggagattctgaagacgccagtctggcttctatccctagccgcaggaacctgcatcttttacttagtccagaaaggcttagtatattagtaacccaaagatagtgagggcatttaaactgtgtatttcattctctactcacgtttgcattttggttttttgtttgtttgtttgtttgttttaaagaggttgggcctcactacctggagacactgtcccaccagtttggccgccgcgccaagccggtggctcagcccgctgtcatccaggttctcacgactcctcccattgcttgacagccagccaatagcgtgctaggactctaggacgcgcgatggcgtaagctccaacgcccgcgtgatgacgcaagaggcgccaccgtctccaaggagtggtccggggcaccggtttcaaagtcgcagggcgggccgagtggacttccgctgctggcctggggcttcccagccgtcttggcgttgtcctctccaacccccgccgctccgcgtagaacgccgctctcaggctgccgtcaagctcccgcggcactctcctaggtggcccgacgagacccagagtgacccgcgggacgcctgtatcgaccgcgtcctcttcccaccagcgtgggattcggttgaacgtggagtccccagcaatcttcagtctctcaccagggccagggactcgtctggggcgcgggggaaagaagcgtggcggggctgtagatgccgcgtgagtaggatgcagattgcaccgctggagcgcttgacaaccaaccgagcgttggcttagttttgttttcccgcacagcaagctctctgtctttcagaggaaggtaaaggtggtgaaagctctaaactaaaattgtatcgaaatggctgcagaaatcgactttctgagagagcaaagtaagctccatgtttttttgagacttcatatacaatgtttaatatcgtcgtcgttgaccgacaaatcttttttgaatgctggttgggtacatttaaattggtaaagagttaaagaagttagttgcaggaaaaaaaaaaccttgatgttatacgtgaggatgtgtgtatatttaagcagaaccgtgtggtagtacttgtagcttacacagaattctactagacgctaaacatgtttgttatgctcctctcgtgctctgaagattagaaggctaatggccagcaggagtttccaagtgtgcatttaaaatctaggggcacagctctctggccatttattaaaaagatgtttattgaactcctgtttctattatgtaccagacactatggaagaacagctgctgcaaagataaacaggacagtttttacctccaagaatttaatttggggagggaaatgtattccaaaatatattgaagtgacagcaactgctggctcttttgccacagtctcatagggttgttggaaagattaaatgaatattaaaatatgtaaaggatttagaatagtatctgatacattgtgttaaacaaatattaactattacacgattattattaaaatatgttcaaggaaggtgctattgggctgaaacgtgcagtacaaatatgaatttactatatgaaaaactctaggcatcccaaatagaacaatatttgtgacactgaggggattaggaatatgctttgttaaagacttgcaatacggctggtttgagtgtaatattgatgtaaattgaattggaatatttatatagggaaatggcaagtgcagttgaaggcgtagaaaggggctggatggtgaagggccctgtcttctctgtgctaaggagtatggaccattgcatgggttataggaattcagttgagagtggcatgatcaaattgtagtttagaaggcccggtctgatttttacggggaatatgcattatagcagagtgcagttagttgtctactgtcatcattcaggtaagaagtaaactaagttgggcacagggagactggagatcaggggatttgagagaaagaggtagagagcaacttagtttttgcttgagcaacggggaagttaggaaaaaggtagtaagttccgttttggtagcattatagaccagtggttaagaactcagtcagcctctggatttagtctgtctgggctcacagcctacctctttccaggtctgtgacctcgagcaagtttcctagcttttctgcacctcagttttctcatttatataatgagtataagaacacaagaatcctcttgaagttgtgagacttaaatgagatgatgaaaaagcattgagcatagtgtctggcacatattaagtgcatggta

SEQ ID NO: 316727 - DNA, 4001 bp, Homo sapiens
gtgtgtatacatgtgtgtatgtgtcttgtgtagcaatgcacatacacaatgcaaataaaataataataataataataataataataataataataatgacacttactataatggtacttgcccatagttcaaggtctaaatacgtactaaactgacaaaactaaacagaatgcaacagtgagttttctctgaatttcttatagctctggttttataatcccgtagggaatcctcatttacttcacagaatattgtttaaaagacaaattcagctgatgcctaatcaaacgtttaagaaaggaaaagactgcactacaataccacagagtaaaactactgtgtggttgcaacacgtgctcactatgcgttcactggatgacaggcaatgtgcaagtacttcacatacacgacttcatttataatccacaccgcatagccaattgttatatgcatcttgcagatgcagagatcaaggtacgaagaagatggccttagggagctgggggcagggccaggcttggagcccacgtcttcttgattggaaagcatgtgttgtccatccactgcctgccaaagtatacaggatataaaagcgaccctttgtaccagctaattaggtgctctgttaagatacatctgacaccagggcatttttttggtagacgtggagtatctaaacaaagtttttttaaagttgtgggtggaagcagaaaatgctgtcttggaacaaaaagactccgagtctagcctttgcatttccttactacaggactgtgactttgatcaaacttctctgaacctcagttttctcacttgaaagtgttgtgttgtaaagaccaagtaagataattaacttataaaagcagttgccaaaaaaaaaaaaaaaaaaaatcagatcccagacacctcaaaatacttcacatagcccagtatctcatggggagcacagagtgtccagtccttttatttaacaaagacactccccaccgcagtcaatgcttaccctgatttaaaaaaaaaaaatagtacttacacattataacaactgccccgcaaaatggttttcactgtgttctttcttggcactccatacgccatggtgagttattacggtatgatttcgttacataggtgcctgatggaatgtcacagataactctgttcactttacctgaaatgatggcaacgcacctaattaatgcctctcacgtgaatattttgtagccaaataatagaaaaaaattctgaatgtcagaaagtccttaataagtgttcattgaactggaaccccaagtgtaaaaccgtgttctctttcatttttccatgaactcattttttcattttttgccaccgaataaggagaaaatgccaggtaagtttcgtcatcctgagacaaagtttcggtgtcgcactctctgcccttgcctgagcctgccaaaccagctccaacaccgctgcgccaaaatgtgtctgatcgtggcagtgctgagcgaccaaaggctctgcctgcacaggaaccacccgccccggcccgggcactttgagcagagcaatccttcccaggttttccctcattcaaaacactcagcaccactcccgcgtccccgcccttgcacgccgattcggggcgagtcccctacccttccccggacggacgcgcagggcccgggaggaactggttcccgggacgggtgggggcctcggccgcccacagagcccgcggagaagggaacggcctcagcctcggctccttcccacacctgggccccaccctgcctccgactcgccaggaatgcgctgtgtgcgcggggcttccagggtggcgggtccccgcgagccggcgccggcggcctggttacccgggctccaggggctcggagggtcgcggccggggtactgaggtaagagcgcgctgcgctaagcgcacatggccgcgcacacgcctcggggccgcgccgcaggcacacgcctccttcccgctcgccgcgggcgccgagtctggggctcctcgcgtcacacgggagcctcaacaaagggctttgtggggccctccccacccgccagggaggggacgccgggcccgggagacgcgccccgcggggtccgctctctggtaaccgggccggggcaggccgcgctctcggaatccagccaaccagccagagagggctgtaagccagacctttcctgggaaggacgctttccaatgtagggggctgcatccaagcgatctggacttcgtttgcgggcgccatttaaagaaatgtacccagtcctggctgctgacatctggggaaccgaagccctgttgccagcgttctcacactgcagtgggtgaaggcagtgagctcaaagcccacgtgtgatattttaggtgttcgtgttcagagcaagacagcatcaatttctaaagccgttattacgctgtggtgatttcgtatttcttcatttgaatacatcagatggccaccccttacggtcaaatgaaacgagcttacatttccattttgagtgagggttttgatgtcagaactggtttggaattctagctctgccacttaagatttaaccttaagatttcgcatgtcactgctctaagcatcaatttcttcatctataaaacaaggataatgctctatgtcttagagggttgttctgaggatgaaagatcctgccctgagattctccgccacgtgataaatgcctaattgattgtgagcctaaaaacaactttatgaaataggtaagagcgatactactcatttcaattgtggagccgacgaatgagttcagggtggttaaagggctgcccagagtcacatggcaagttccaaagccaacttttaaagataaacacagatgggccaggcacggtggatgggccgggcgcgtgtctcacgcctgtaatcccagcaatttgggaggccgagaggggcagatcacgaggtcaaggggttcgagaccagcctggccaaccgacatggtgaaaccctgtctctactaaaatgcaaaaattagctgggcgaggtggcgcgcgcctgtcgtcccagctattcaggaggctcagacaggagaattgcttgaacccgggaggcagaggttgcagtgagccgagatggcgccactgcattccagcctgggcaacagagactccatctcaaaaaaaaaaaaaagataaaacacagtaacctttccatctgacaagcaacttctgatccttctgattagagtaggctcgcagggctgacccatctttcaaaggtgcttttgtgcctcccagaaactggaaggtgaggactgtcactcgctcttcagcatttctgctctaccaccaatgaaaagtgagcaccgaggagtgacagtgggtgttttctttccacaaagaatgttgaaaccctcaatggactgtgagaccagtgtactacagattttggcctgaatttttatttatttatttatttatttatttatttatttatttatttatttattgagatggagtctcgctctgtcgcccaggctggagtgcagtggcgccatctcagctcactgcaagctctgcctcccgggttcacgccattctcctgcctcagcctctcgagtagctgggactacaggcgcccgccaccacgcccagctgatttttttgtatttttagtagagacggggtttcaccgtgttagccaggatggtctagagctcctgacctcgtgatccgcccacctcggcctcccaaagtgctgggattataggcgtgagccaccgcgcccggtctttggccggaatttttaaaaatgagttagcatagaatggcgaataaaattagagtacatcacacagataagtgtaagaaggtattattttgtggcactttcatttctgttatatacatatatatatacacatatacacatacgtgtgtgtgtgctcaggctcaatgtacagcccttaacaatgggtctaaaaaatttgaaaggcactttcttaggtgattttatttt

SEQ ID NO: 316728 - DNA, 4001 bp, Homo sapiens
aatgaagccaatctgaaaagactacatactgtataactccagctctgtgacattcaagaaaaggcaaaactgtggagacagtgaaaagatcagtggttgccaggagctagggggaaagggggaggggggaatgaataggtgaagcacaagagattttttaagtggtgaaaccataacgtatggtactataatggtgaatacatggtcctattaatttgtcaagacccccatatatttaatagcataaaaagcaaaccttaatggatgcaaattaaaaaaaattatttacgagattgtaggatttcaggaaggaattcagactgtgacaagaaaatctaactgtattacaagtgcataaaacaaccttactgaagaggctagaaagaaaatgtgcagacttaagtaactttggaaatgaatagagtttataagaataaaggcaaaaggaattgcagataagcagtgtactcttgttgacaaagtccttctcacaggagtaaaaaagaggtaagagtgaggaaagagatgtttttcccaaagccaagtgagtcacaagaaggggagtggatgagatggatgatgagcaacacaaatcataaatgcccaccataaatatgcatttgattatttttctgtaacattgtaaaatatgctcacactttggaaaaaaagaaaaaaaggccaggttcacgcctggaatcccgacacaggtgggtggatcacttgaggtcaggagttcgagaccagcctagccaacatggtgaaaccccatttctactaaaagtacaaaataaataaataaataaacaaccacatgtggtggcatgtgcctatagtcctagctactcgggagactgaggcaggagaaacacttgaacctgggaggtggagggtgcagagagcccagatcgtgccattgcaccctagtctgggcaacagggcgagactctgtctcaaaaaataaataatttggaaaaaaaggaaataaaatgaagtttagtttatgccttatagacttaccacaactagtcatcttctattttttagatattattataatttcacacacactgcccaaatcatttaaagtaagctgaatgaacaaaactcaaaccaatcactttactaggtttaatgcatatcctgctcaaatttttatcaagcaaatatgtcaagtttataatgttatgagaagcttaaatcagtgttaataaaaattcgatgaaaagtatgttttttattacatcaaagaagtttctcttgcacaaaccataaaagctatgctaattcaaatattcctttgtgaaagttacctcagatatagtgacaactgctgtgttaaagacatgtttatggcaacaagatgatgatgatcagactgagtgggcataatgagatagcagtatcatgtaaattaaatgtaggtgggttgggcatggtggctgatgcctgtaatcccagcactttgggaggcctatgcaggcagatcacctgaggtcaggagttcaaggccagcctggccaacatggtgaaaccctcatctttacaaaaatacaaaaattagctgggcatgatggcagatgcctgtaatcccagctactcaggaagctgaggctggagaatctcttgaacccaggtggcggaggttgcagtgagccgagatcgcgccattgtactctagcctgggcgacagagcgagactctgtctcaaaaaaaaaaacccaaaaaacaaacaaaaacaaaaaacatatgtgatcattgcattgttatatccattatataaaaatcatatatgtgagagaaaaagcaaatttagatctccttgtgaaagcaaacacaaaaactatttacctgtaaaaatcatttgttttcccacagtagtagatgttggcttttggtatgatacagatgccatggctaaagtcttaaccgtgctactggattttcttcttcggcttcttcaaatcagttaagctgcaccagaaagaacgaaagactctgcagtctttcctctccctgcttgtgacctgcaccaggtggttgctaatgactctttatgacagggagatagaatgttcctccttgcagagttctgcattccaatctccaagagcagagacagatactgctatagtcttcccagaacttgcatccagtaataacttttccttatttgtcaatatcaagtcagaatacacttgttcacaggtactagatccagttccagcttatgtcccagataatctggcaggctcagtcaccactgtctttcaacatttcaaaaagaatgtcttgcagaaatatgttacagcaaaaaacaaaaagcccccacaaaccatggttaaatatatttgacaaacactggcaagataaaatacagtaaaaaataacattaataaattaatgagataattacacacacacaaatatatatagatatatttccagtctcatattccaatccctccttaaatagtgcttgtgctttggtcatgtcaatttacctgtggttctcaatctgtgcaatgctttctcattgttctgagcctttacacatacaatttgctcttcctgtaatgttgctatgcaaatatttcttgtcctttgacagccaaggcccacatctgctcttccaggaggatgtctgcagacacagctaagtgctttcttcttcatgtccctttaacctctatagcactgtgtttagatgtatctttttaactcaccacttcaattatttgtctattttatcgacctccccactagaatctgacttctaggagtttatgataaaagtatacttatttatatttcaatttccagagacttgtatgcaataaatagttaatagatgtttgtgggatgaataattgtatgaacagtaattctagcttgcacagaaatatatcggctacctgataatccattgaagataaattctaacagtaattttgtattcaacattaaatatatggagttgtctactgtaaatgtaatatcttttatattttgagaattataagaaaaacactatattaactctggaaaggcttacagtaggcttatggtaggcaaagagatgtgctactcaggtaggttccctttcaaggaaggcttgtagcccagctggaggaaggactgtcagcagacagtgtccagctgtcagcaccttcggggtctgccttggctgcagagagctgcctcctctgtctgaggtcaagccttttccaggggagcctatgtcaggtactgaatgaggtagaggtataaagaccagtcatttctcaccaggttggtcaaggctgtgttgagcccttacagttcttcttcttcctctgatcagtcctgcttcctcacctttcctttcacaggtattgaacccaaataaccaccttgccccccactttcagagaacccgacctgagataactagacagcataagcacatatgcacaaatgtattatacaagagtgcttctcattttaaccactcagccctcctaaccagaaactgaatatatttccccaatgtgggcaactagagtcagtcgctgttgtgttactgatctttggtgtcattttctttggttctgacctgcattatgctcttctttaccttcctatggcctgctacagtttcagaagctttcctactctttctgttgttaattaattctggttcctatagtcaagggctctctatctctagctgaaagtatctttctttgaaaagctcctagttgtgtctttgaaactaccattttccaaggcgcccaactttgaacattcctagaagagagaagcctgctcactcacctgtggttttaaggatgctgagaagagaaaggaagaaggaacctaaatgaagaaagtaattctttagtaaacaaggcagaaaataaatgagatcttggcttttgttggaggacttcccattaacacttcaggggaaatgcgggcttctgctttgcctttgagactgttacaaactttaatctgtt

SEQ ID NO: 316729 - DNA, 4001 bp, Homo sapiens
gtttcgctcgtttcccaggctggagtgcaatggcgcgatcttggttcactgcaacctccgcctcccgggttcaagtgattctcctgcctcagcctccttagtagctgggattacagtcatgcgccaccacgcacagctaattttgtatttttagtagaaacagggtttctccatgttggtcacgctggtctcgaactcctgacctcaggtgatccgcctgcctcagcctcccaaagtgctgggattacaggcgtgagccaccgtgcttggcccaggattgctgttttctatgaaaatacactagagtctcagctcaacaagatgacttggaccccttgacactaagcgccagatatatctgagagatttcatcataaataattcttactgctatttgggtaacatgggcattgacctgtgaacactttaaacaatgaaaatgtatagatcaaagaacagaaactctgagctctgacaaataacattaaaaaatcacacacaaatgcagaaaacactcagctcctggtggaaaattcacttttcagccaaacgttttcttcaccaatgatataaaataaaacagtgttcctcaataacacattagcacttcattctacatatttacttgcaatcagtttgttctgcaaaaataaaagctggttaagcactctagtcatccttaaaaaaaaatacttgcggagcaatgagataatctagttcatcccctagtttccaatctgcaggaaaggtcaggccacagaactctcccaggttacactctacatacctcattccacttgacccactcaagagaacataaaactccccttccctgtcttctcccctccagtggtgtgtgagttacggttgggaggtggggtgctagtttctggggattcgagatttaacagaaactatcctaagtatgcattctagcaatcatacaaagggaggagtcctgaactaaaccgtcaaagaagccaatccacgtgacctaaacccttcaagctgggtccagcgctaagcaggcctggggcagacaatggcattatcagctgtccctgggcaggtggccaactagaacagcaggctctaagtcccatggaaagaaatcacagcctgatctcaagtacccacagaaagccagcaaactcatgcagtgaaaactattctccgaaacccatgcaatgaaaactattctccgatgggaaaggaggaggcagagagccagcaacaggcagcgcagagctgcgtggcttcgggttactgcggatgattgaaaccagaaggcgagacaaaaagaaaccagtgaggggtggggcgggtggaaggaaaaccccttaagactcctcaccactaaatctaaagggggaaccctcagagaggggtggcactttagctgctggcatcccccccgcttcccgcccgcacgctctggggcgcagaagggccggtcgtcccgggtcatgggggttgggggaccgattccctagcctcgcgagccccgccgccgccggtcttcccagaggcgccgaggggggacgcggtcccgacaccacactcacgtctccgatctgcagctccacttcctccagctggtccaccgttgggccgctgctcctgctcggaactggccagcccaaactcactgggccgcccggggaagatgctgcagaggcgtctgaagaggagggagaagagggaggcggcgggggcggcgaagaaacctgcaactcctcagggtcggccatggggaagggttgggaccgcggaatccgacccgagaagccgaaccgacaccaactgtcttttaaccactcgcgcccaaagccgaaaggccccgcctcctaacgccagaaatcccgcccagtctcctcgtgggtctcagccccggaccacaaagacgtttcatttttcgggacagccaatcatatgagtcaattcaccttaggcaactcacggctcctgcgcgagcctccaatcgatctcgaagggcactcgtagagaaaactacacctcccaggaagccgtgtgcgtcgccccgccttctactgcctttcactgcgcgtgcgtcgtgctgtgggattcgcggacccctctggccgcgctgtggctgtttcaccgctccccggctgggacttggagtcccttatctttccctggtttggtacatgacccggaagcctcggctggccgttgcgtcatccatggcgccggcgcagagcgagaaggaggtgggaacgccgtgaagcaagagcggtcggcagagcggggaggcgaactgcagcagagttcttgctttccggcaggtgatggcgccccccgcggcctagaggtccagcgcccgccgcgagcagcggacagtcctcctgttgtgtccgaccgagagtcctggtgactttgaacatgctggtgccgctagccaagctgtcctgcctgggtgagaggaaacgggcggtggggataagtggaggagttagggcaaaagggacaaggccggtcctgggggctgtaggcacctctcgccccttctctcatcagctttctcaggctatctagggcaaaggtcacgcgctgtcagcctgttgggggaccctggcttcctccctctggggttgccccagttggtagaattaatatctaggctaaaggtcaagggcggggaaaacttgtcaacacgccctcggcatcaccaccacctgtcaacacacacacacctcggtggactcctgaactgaggcttcccaaatcctggttctaatcttcaaacctctgttggaaatggaaaaaaaaaaatcgtatttgcccagtttttctccctggtcctgacctgactttcgtcttcggagccattctagttcagtctaaagaaattgaagtctgatctgtcacatcatggttaacattcatatgttgaccaagtcacccaagtgtatctggagccagtttttctgcgttgtctaaaattaagggctgggcgtggtggctcaagcctgtaatcccagcactctgggaggctgaggcggatggatcacctgaggtcaggagttcaagaccagcctggccaacattgtgaaaccccatctctactaaaaatacaaaaattagctgggcgttgtggcccactcctgtaatcccagctactcaggaggcttaggtaggagaatcacttgaacccggaggtggaggttgcagtgagctgagatcgcaccactgcactccagcctaggtgaaagagccagactccgtctcaaaaaaaaattaaattaaattaactctaagggctttatcgtgttatgggtattctgtgaaccatcgtgacagatgaagttggatggtctttttaaagttttacttaaatttttgttgttgtcgttaattcaaacagaaaagttccctaaaggatctcatattctgtcataactggcttaatttttttaaatctttagtttacttaagttttggtgatagaatcattaagtctaaatattccaaattcaaggatattcttatgaaatttcatgaaagtagaattttgttaaatttggcttccatatattaagaaattagaactttgtttaaatttcatgtcacccatgcattttttgctgcacttaatgtatggataagatggtgtttggaacgttaaagtagtcagatgctatctgccttagagcctaatttagatgcaatcagccttgggcccagtgctaaccaaattccactaccatttctgttttctttggatggcaattcattgccattttcgtagcctgctggcatgaaagaggtagacaccaatgtgccatcagtgtgactttgatatggtgatgctatgagttcagtggactttgtgacttctcttctcaaccacggagactgaatattccaatctctaaagtgagatatcagatgtgttttcagaaaaggggtaaaggttgtgacttttttttccaatcctttggagaaattcagactacacagttccaaatattctcaag

SEQ ID NO: 316730 - DNA, 4001 bp, Homo sapiens
taattttttaaaggctgttttaataagtatttagaacttctttcataatttagatctaggagagctctatttgaggagagctttggaaacatggagaagtttttgaagtgcacacaatccttaattcacctggctactaaatgtgaatctgtatcactgactttttttttttttttttttttgagacggagtctcactctgttgcccaggctggagtgcagtggcacgatctcagctcactgcaacctccacctcccaggttcaagcgattctcctgcctcagcctcccaagtagctgggactacaggtgtgcaccaccatggctggttaatttttgtatttttagtagagacggggtttcaccatatttctcaggctggtcttgaactcctgaccttgtgatccacccacctcagcctcccaaagtgctgggattacaggcgagagccaccacgcctggccagtatcactgagttttttaaacttttttttttttgacaaggtctccttctggcacccagactggaatgcagtggtgagaccatggctcactgcagcctcaacctcctgggcttaacttcctgccgcagcctcccaagtagctgagactatacgggcaggacaccatgcccagctaatttttgtattttttgtagagacagggtctcactatgttgtccaggcttgtcttgaactcctggcatcaagcaatcctcctgccaccacctcccaaagtgctgggattacagctgtgagccaccacacctggccaacttaaatttttgaaaaggtaatacattcaaatagttccaaattcaaaagtataaacattttcacaagaagtcttctcctatacttggccacccaattcttcttccacaggcaaagagataatcattttgtttcccaaagaatgttcaggtatgttcaagtgaatattttcatagatatcctttttcatttttttaaatgctgtctcagaagaatcacattgttcatgctgagcacactatatagactattctgcaccttgctttttttatttaacaatgtatcttcgagatatctccaaatcagtgttttattttgtattattatgtagaagtaattggatatccaaaaattgaactgagacatttaaatatttatgtatattagctctttttattatttatgacttttgtaaaaatccctcagccattcacttagcatttcatttctcaggaaggtaacaatggatggccttcttggacgcaaatgtaaatgctgtttgcataggggagtgtcccatctaaccaaaatattctgggagaaaactgccaggcacctttgaaaagaaatcaaattacctatgaggacaataaattaggatagaataccctaataaaacgagattcctattctcataaaatcaccttcttgctgggtgctgtggctcatgcctcttaaccccagcactacggcacgctgagtggggagggtctcttgaggtcaagagttcaagaccagcctgggcaacatagtgagagctcccccgccctactccacaaagtatttaaaaattagctgggcatggtagtgtgtgcctgtagactcaggaggctgaagatgggaggaacccttgagcccaggagtttgagactgcagtgagctataatcaggccactggcactccagcctgggtaacaaagatcctgtttctaaataaataaataaatgatatcgcttaacttcattgaaattttacacgttaacaaactttagaactaaatgctttaaaatataaaccattaaaaaatcatttgacttaaatattaaattctaaattttatatagaaaatacccactattcgtccatagagaaaagcaaatatacttacgattaaattgtgacacatatttatcacccacagtaatatattccatctcactaaagaggccaatcctttccatgtccgtttttcctccttccgcaggcatggtggcgtctggtggtggtactctctataccgctaacttcaaaagtttccctagggtcacgtgttttatagcaaagtcctactttacattgaaaataaaaataaaggggaaaagtttagaaaaaagtggttactaatttccagttctaattactttcagtctgagagtttaaggtttactacaaaacaatagcctcatactccatggggaaagaacctactctgcggggtgggggagaatactgggattcaaaattctccagatgagccctcccccttgactctccgtatgaagtgctcacaaattacaaaggaatgtacaagatctcatcgattacactgccatttatctgttggaaatgataaaattattactgtacggtgtattataaacaaatccttcttttgagaagttcagggtagattttaaaatcataattatataaggcagacatttttacagtttaaatacaatgatttcagcatcctgcattgtcccttatgttgaaaatataacagcttttcaggatgtacaacacattgaggtattaccctacaactcttgaggtttttttcaagtttaaataaacataataagtgtgtcactggcaaaattataaagggaatggggaagagaacaattatttaggcaagataaaaacgagaacaaaaacaaaaattctacaatgaattctgagtatttgttaacaggtatacttcaactctgagctttctttggaaatgaccacttcaaacaaaggtgaaatattaaacatgcaactctttatttagaaattaattgttttaagacagagtctcttttttttttgttgttgttgttgttttttttttttttagacagtcccaggctggagtgcagtggcatgttcttggctcactataacctccgcctcccaggttcaagcgattctcctgcctcagccacctgagtagctggattacagacacgcgccaccatgcccagctgtttttgtatttttagtagagacagggtttaactatgttggccaggctggtctcgaactcctggcctcaagtgatccacccacctcggcctcccaaagcgctgggattacaggcatgagccaccgcgcccggccagaaattaatttctaatagtagacatgttatttttaaaaaggaagaggcccaaggagctaagaatacttacctctatcccattctaaagtttttaaagcaccaattatgagctaagcactgggcatacataagtgaagaaaacaaacattgggttagtcctcacagtttgtaatccaaagtaagaaccattttttttttttttttgagacagagtttcgctcttgtagcccaggatggagtgcaatagcgcgatctcggctcactgcaacctccgcttcccaggttcaagcgattcttctgcctcagcctcccaagtagctgggattacaggcgtctgccaccacgcccagctaactttgtattttttagtagagacggggtttcaccatgttggccaggctggtcttgaactcctgacctcaggtgatccacctgcctcggcttcccaaagtgctgggattacaggagtgggccaccgcgcccggctggtaagaaccttttaccttaaatttatttatttctttgcttattaagatggagtctcgctctgtcgcccaggctggaatgcagaggcgctatctcagctcactgcaacctccgcctcctgggttcaaggaattctcctgccgcagcctcccaggtagctgggactacgggcacctgccaccacgcccggctgatttttgtatttttagtagaaacggggtttcaccatgttggtcaggctggtctcaaactcctgacctcaagtgattcacctgcctcggcctcctaaagtgctgggatttcaggcgtgagccaccgcgcccggccttttaccttaaatttaaagcaagctgtttgagtgcctctctgcaagcctgcctgaaactggctcacctgagcatgaatcattgctaa

SEQ ID NO: 316731 - DNA, 4001 bp, Homo sapiens
ccaagcccagagaggggcccaacccaggactgccgggggcgacgcaggggctctggtggccagaacagagagacaggacacaggcgtgccactgggcatttattcacacggagcagcgtggtcctcagtgccccgctggccagcaggcacacagggcacggcgctctgcctgcagcagtagggtctccgtctgcaaagcaacaagaggggtgagggtgcagcccagctgcccactggcattcccctgggcctccacccacccaaggcagccctatctccaccggctcctgagacagacaaggtcaggccctggctctaacccccacacccagagcctcccactcatctctttcctctgcagtggctcccactggtggggcctgcctggggtctgctggtgcccacgccatgccagcgtgcccacctgccttcttccagctcccacaccacccgcaggggtccactgtcccccactccctgccaccctcatgcctaaggataggtgggggctgctcctcccaagagctcagttccaggctctgtgagtggggagagggctccaggtcttagtcggagccctctggagtgttcccaagaaggacactagggctggtggggggtgggaccaggcagggtcttccctgctttctccttcctagaattctccctttccaggaagaagcttgagccccggcacaaacaaaaactccttggctgcaccccatggcgtgggggctccctgttcatccaggcttggaggggccttaaccaacctgtgcatccacccaggatccagaccaccctgcccagcctgaccccccattcctgacactttcgccacatcctccggcctcagtttctcctctgccctggggccttgccgcccacctaggggatcctggattgggctgacagtccttccccagggtccagatctgtcacagccctcaggagtggcggtcataggacaaagtgcccagtgagagccttctgggggaggggctagaaatagagtatgctggagagaggggcgtctcataggtgagacaggtgcccagaatgccccttggatgactggagccagaggaagggggcaaggtgcggcatcttaaatcggggtgaaggatgagggacactccactcccgcagggggcctcttcctcatcctccctgccctccccaccccctgggaagcccgggaggaccgtcgcgccgcgggcgctcacccgcgcgtccaggctgcaggctgtcttccgcaggtcctgcagggcgcgctgcatgaactcgaaggcgtggcagtccacgcatgggcggcctgcggggggcgcgggtcagggtggagggggcgcagggggggtcacccgcaaggcccccacgcactctgggcccgtccacccagtgccaaagagcgcacgtccccactccccaagccaccatctcccgcgaaggggaggacccgctcccgggaacaaaggcgaggcgcggtcctccccgcagagccccggccccgcacgcccctgtcgccagccccgccccgctccccggaacccggcccccggcacctactctgcgcggggacggcactcccggcgggctcggcgcgggcccgggcgcccagcagcgccagactcagcagcagcagcagcagcggcggcggcggcggtgacatcggggaccggcacgcgggcgggggggccatggccagcagagggagcggggccgccctgaagccagcgaggggtcagcggcgcccgccccgcccgccccgggccggtgagcccccgtcccctcccgcgggccccacgacccttgtccaagccccaggcctgggagccctggacccacccaccccgggcccgggagccccctccccacctccggttccccgactccagtccgccggtctccgggcccagcgagcctctagtccgcgccccgtatctagaaaacgcccattcggacgcccgcaccaccgcccttaccgcggttcagggaccccgggaccagcagcgcggggacaccggcagacgttccgcgtccggcgcgcaacgcgcatgcgctccgacccgaccccgcccgggttccccatccgacgtcgtcgtcatggaaacccgagactgcgctggccgcgggtttagaggaacctaggacgctccaggaatcgggtgtgcctggccctggccgggggctgcccccgggagcagcgtccaggcccatggcggatgcagtctagaggactgcctggaggaggcggcgccggggcgagacctccagagcgcaaggccggcgggagaaaagctgaggaagtgggaaatctgtggctggagctcagcaggtcaggagcgatcctgagggagctgctcgatgctcgcgaggcgcggggagctgcgcatgcaaacgcttggcctccgaccgcgggcgagtggggtccagtgtggggtcgcaccgcccggagagagctggtctgggggatcggctcgggggatccgccctcgcccggcttttccctggcccagcctctccccgatcctcgggcgtcagggtgggcaccagcctgctcggtccctcccggctacccacccccaacccagggtcctcctctccgcctctcggtgtcctcggagaccggagaaccgcttgcgcggagccccgaccacaggtcctcggcctctctgtgccgatttcagtcccgtgaactcagggctgttggccttaaagagcgccgtgcagccagtggcccccgggggcgcccggcaagtgcgaatctgggccccggacgccctgggagggatggtcccagccgtcggagccaggcccccacgccgacaccgacacaggcggtggcctcctcagaaggcgccccaggcgcacgtgggtgctggcgcccccgctccccccccaccccacccagcagcccgcgctgtggccgggagctcagggactaaccacacctcccgccagaccctcttcttggtgggcggagccgcacccctacctggaggccgccccgctcgccgtgcaggacccggagcctcgggcgcccccctccccagcctagccgacctctacccccaacccccggggttctggccggtggtcttcccggcacaagctgggactgcggacgcacctgcttctcgcgtggtcagagccgcccctgccccggccggacgcgggtgtcctgaccctaagagtgggtgggagggtgggttggggaagcgtgcccgtgactgccgctgcctcctccgggttgggccgacgccgggcttcggggacccggtcgcacctcgggggtgtgctgcatcctcagcgcgctgaaacgcacgcggggcccgaggggccgggtgggggctgcgggccgctgtcccaggcgcctggggaggcagcggccctcccgagtgtcgggctagtgcgcacttccgcgctcttctccactcggagccaagagcccgggagcaggccgtcgcggtcccccagtggggcgggagccgtagaggggtagccccgcgctgttgccggggccgcggagccctgggggggacgtgcctccggggacgcgccgggccgcaggcgtccttctccccttcggtcccacgctgcgcccgctcgcgacctgctcctatcacccctgcccctagcgcccacggacagtcgcgcccacggacaatctaatcccagcactttgggaggccaaggccggtggatcacctggggtcaggagttcaagaccagcctggccaacatggcgaaaccccgtgtctactaaaaatacaaaaattagccgggtatggtggcacgcgcctgtaatcccagctactggggaggctgaggcaggagaatcatttgaacccaggaggcagaggttgcagtgagctgagatcacaccactgcactccagcctgggccacagagtgagactccatctcaaaaaatatatatatatatgtatatttcttaccaaaaatgcatcttcattcccatgactgtcttcatctctgtct

SEQ ID NO: 316732 - DNA, 4001 bp, Homo sapiens
ggccagaacagagagacaggacacaggcgtgccactgggcatttattcacacggagcagcgtggtcctcagtgccccgctggccagcaggcacacagggcacggcgctctgcctgcagcagtagggtctccgtctgcaaagcaacaagaggggtgagggtgcagcccagctgcccactggcattcccctgggcctccacccacccaaggcagccctatctccaccggctcctgagacagacaaggtcaggccctggctctaacccccacacccagagcctcccactcatctctttcctctgcagtggctcccactggtggggcctgcctggggtctgctggtgcccacgccatgccagcgtgcccacctgccttcttccagctcccacaccacccgcaggggtccactgtcccccactccctgccaccctcatgcctaaggataggtgggggctgctcctcccaagagctcagttccaggctctgtgagtggggagagggctccaggtcttagtcggagccctctggagtgttcccaagaaggacactagggctggtggggggtgggaccaggcagggtcttccctgctttctccttcctagaattctccctttccaggaagaagcttgagccccggcacaaacaaaaactccttggctgcaccccatggcgtgggggctccctgttcatccaggcttggaggggccttaaccaacctgtgcatccacccaggatccagaccaccctgcccagcctgaccccccattcctgacactttcgccacatcctccggcctcagtttctcctctgccctggggccttgccgcccacctaggggatcctggattgggctgacagtccttccccagggtccagatctgtcacagccctcaggagtggcggtcataggacaaagtgcccagtgagagccttctgggggaggggctagaaatagagtatgctggagagaggggcgtctcataggtgagacaggtgcccagaatgccccttggatgactggagccagaggaagggggcaaggtgcggcatcttaaatcggggtgaaggatgagggacactccactcccgcagggggcctcttcctcatcctccctgccctccccaccccctgggaagcccgggaggaccgtcgcgccgcgggcgctcacccgcgcgtccaggctgcaggctgtcttccgcaggtcctgcagggcgcgctgcatgaactcgaaggcgtggcagtccacgcatgggcggcctgcggggggcgcgggtcagggtggagggggcgcagggggggtcacccgcaaggcccccacgcactctgggcccgtccacccagtgccaaagagcgcacgtccccactccccaagccaccatctcccgcgaaggggaggacccgctcccgggaacaaaggcgaggcgcggtcctccccgcagagccccggccccgcacgcccctgtcgccagccccgccccgctccccggaacccggcccccggcacctactctgcgcggggacggcactcccggcgggctcggcgcgggcccgggcgcccagcagcgccagactcagcagcagcagcagcagcggcggcggcggcggtgacatcggggaccggcacgcgggcgggggggccatggccagcagagggagcggggccgccctgaagccagcgaggggtcagcggcgcccgccccgcccgccccgggccggtgagcccccgtcccctcccgcgggccccacgacccttgtccaagccccaggcctgggagccctggacccacccaccccgggcccgggagccccctccccacctccggttccccgactccagtccgccggtctccgggcccagcgagcctctagtccgcgccccgtatctagaaaacgcccattcggacgcccgcaccaccgcccttaccgcggttcagggaccccgggaccagcagcgcggggacaccggcagacgttccgcgtccggcgcgcaacgcgcatgcgctccgacccgaccccgcccgggttccccatccgacgtcgtcgtcatggaaacccgagactgcgctggccgcgggtttagaggaacctaggacgctccaggaatcgggtgtgcctggccctggccgggggctgcccccgggagcagcgtccaggcccatggcggatgcagtctagaggactgcctggaggaggcggcgccggggcgagacctccagagcgcaaggccggcgggagaaaagctgaggaagtgggaaatctgtggctggagctcagcaggtcaggagcgatcctgagggagctgctcgatgctcgcgaggcgcggggagctgcgcatgcaaacgcttggcctccgaccgcgggcgagtggggtccagtgtggggtcgcaccgcccggagagagctggtctgggggatcggctcgggggatccgccctcgcccggcttttccctggcccagcctctccccgatcctcgggcgtcagggtgggcaccagcctgctcggtccctcccggctacccacccccaacccagggtcctcctctccgcctctcggtgtcctcggagaccggagaaccgcttgcgcggagccccgaccacaggtcctcggcctctctgtgccgatttcagtcccgtgaactcagggctgttggccttaaagagcgccgtgcagccagtggcccccgggggcgcccggcaagtgcgaatctgggccccggacgccctgggagggatggtcccagccgtcggagccaggcccccacgccgacaccgacacaggcggtggcctcctcagaaggcgccccaggcgcacgtgggtgctggcgcccccgctccccccccaccccacccagcagcccgcgctgtggccgggagctcagggactaaccacacctcccgccagaccctcttcttggtgggcggagccgcacccctacctggaggccgccccgctcgccgtgcaggacccggagcctcgggcgcccccctccccagcctagccgacctctacccccaacccccggggttctggccggtggtcttcccggcacaagctgggactgcggacgcacctgcttctcgcgtggtcagagccgcccctgccccggccggacgcgggtgtcctgaccctaagagtgggtgggagggtgggttggggaagcgtgcccgtgactgccgctgcctcctccgggttgggccgacgccgggcttcggggacccggtcgcacctcgggggtgtgctgcatcctcagcgcgctgaaacgcacgcggggcccgaggggccgggtgggggctgcgggccgctgtcccaggcgcctggggaggcagcggccctcccgagtgtcgggctagtgcgcacttccgcgctcttctccactcggagccaagagcccgggagcaggccgtcgcggtcccccagtggggcgggagccgtagaggggtagccccgcgctgttgccggggccgcggagccctgggggggacgtgcctccggggacgcgccgggccgcaggcgtccttctccccttcggtcccacgctgcgcccgctcgcgacctgctcctatcacccctgcccctagcgcccacggacagtcgcgcccacggacaatctaatcccagcactttgggaggccaaggccggtggatcacctggggtcaggagttcaagaccagcctggccaacatggcgaaaccccgtgtctactaaaaatacaaaaattagccgggtatggtggcacgcgcctgtaatcccagctactggggaggctgaggcaggagaatcatttgaacccaggaggcagaggttgcagtgagctgagatcacaccactgcactccagcctgggccacagagtgagactccatctcaaaaaatatatatatatatgtatatttcttaccaaaaatgcatcttcattcccatgactgtcttcatctctgtctctctctctctgtcatacttgctggttcctttggatgttgtttctgtttccttcctaa

SEQ ID NO: 316733 - DNA, 4001 bp, Homo sapiens
acagatgaacctcacaagctcatgctcttttgtgttttgcaatgtcacaggccgccttggttggaatgattcacataatgatcactctctgaataggaaaaaattccaggtcctatacattttcaccagatgtcctattcctgcatttttttcagagttattaaatatagtaccttttttcctactctggtaaatggatctgtttggataccatctttctttcaaacactattttcagacaggacctcagcagtgcttaaagactcctgttatggtttgagtgtgtcactcaaaagttcatgtgttagaaatttaatccccaatgcaatagttttgggaggtaaggactaataagaggtgactaggtcataagtgtggaacctccacaaatagattaatcatatgagcaggttagttatctcaagaggaggctgtttataaagcaagttcagtttctggtatctctctctatcataagtgctctcttccacctttcaccctctgcaataagatgagcctcaccagatgctggcaccatgttcttggactactcattctccaataaccctgagccaaataaacttctattatttataagttacccagtctgtggtattgtgttatagaagcagaaaatggactaagacaacttcactacctggccaagatgaacctcaagtatcacagaaaaagtagcaaagggatgtccaaagctaattaagtgtcaatatacttgagagttattttaaaaatgcagaaattatactttgttggactaaaccagataaggcacccaattgagaagtacttctgagacattttatctttaagtacttgttttgatgatttggaaaggtctggatggaaatataactaatatttatcagggtattatgtgggttattgctcttatctgaagttgaggttaataattcaactgattatcaaatatgttccaagaatttggataaaatatttaccaattaatatatacagatggatagatttcataacaagtcctgacatttttccacatccccacttatactttctcaaatgtacttagctccttgcagctccttgacagtgcttggggctaaatggttctttctccatgcagtgtgcttttccattccccacctcgcctgcctttcaaaccagcttggaggaaacctattttactgagctctcttcagacacacaacactccctccctcaccagacacccacaaaatctccttactttgtgctgattacttatttccctagttccagtcactttataaactgaagttaatttttttgattatgggcttatcacagggcctggcttacagaaaacactcagaaaatgcaataaccacaggtagggagtagggaaggatttcatgaatttcttcctcctctgaaggaagttttaagctcctgaaagccagaaaaccaaacaagaaacaaaatgaaattctcaggagcacctttttgctgaaaagagaaccccaaatacccaaaatttagtcaaatattcatatccatatcctttcaggactaggtagttatatgtaattttaggaatactaaatagagaataggatcataatttcagctggtcactgacatttagctcttcttcctgctgacatttacaaaagaaaatacagagggttaaagtctatgaagtctctcagggtctacaatacctctttcttctaagagcactcttgtctatttatagtgatatatccaggtgcaaattacaaagaaatcttactgtttacactcaggctcatgctgtcctgctctaaaagaaaattggctgcacatggacttgtccagttgttttttccggtaactgcctgtgtatgttgtcacggaagaatctgaccatcgtgtttcatcctgccaagatgctccagccttgcgtctgatcagatcaaactcttgagaagtaagagggctaaagggcagaagaatttgtggagtcaagtagaagtagtgtgacataactacgaacggcctctctggaaaacaacttgtcaagtcctctgcataatgaagaattaatttccttctagtagcaggaagcaattgactgggctcaccaaactttgtgactcaacagttcacagagtgcagaagcttaactgtcttagatatagttgccaagcaacagatcacaaaattccacaaatgctatccccttgcctcccaagggaggtaaattttaactaacaaatttgtaagttatataactttctggattttgctctaagaaatatgaaatatgctgcttcataattatggcaagaaagcaggtggcaaaattatttgtattttactgctatcatgaataaagcagtaattcttaatgatggtggttcaagaagtggaaacaagagatgaaagaacagtgccaagcattcacttctcctaaagacctccaagtgtctggaagagaacatgaactgcttgtaatgtcaacaatagcaggtgactcaacagcttctcatatgtcacagagtagtggtgctctggctggctgcacactagagtcaccctggaagctgttaaaataagcaggagtccacgcccccaccacagagattctgatttagttcatgtggagtagggcccaggcatcactatttgtttaaagcttaatcctggaggattctaaagagcagccagggttaagaattaaggtcatggacacggaaaaaacatttgacaaaatccagcatccctttaggattaaaacttgaggcaaaattggcatagaagggacatacctcaaaatactaaaagccatctatgtaaaacccacagccaacattatactgaatggggaaaagttgaaagcattcctcctgagaactggaaaaggacaaggatgtccactttcactacttctattcaacatagtactggaagtcctagccagagcaatcagacaagagaaagaaataaaggacatgcaaatcagtaaagaggacgtcaaacagttgctgctcactgatgatatgatcatatacctagaaaatcctaaagactcatccaaaaagcttctagatctgataaatgaattcagtaaagtttcaggatacaaaatcaatgtacacaaatcagtagcactgttataaaccaacagcgaccaagttgagaatcaaatcaagaactcaaccccttttataacagttacaaaataaataaataaataaaatacttaggaatacaacttacaaaggagatggaagatctctacaaggaggctgggcacggtggctcacgcctgtaatcccagcattttgggaggctgaggcaggcagatcacgaggtcaggagattgagaccatcctggctaacatggtgaaaccccatctctactaaaaatacaaaaaattagcctggcgtggtggagggtgcctgtggtctcagctactcaggaggctgaggcaggagaatggcgtgaacccagaggtggagcttgcagagatgccaagattgtgccactgcactccagtctgggtgacagagcaagacaccatctcaaacaaaaataaaatataataaaataaaatgaaataaaataaaataaaaatctctacaaggaggccaggcacggtggctcatgcctgtaatcccagaactttgggaggctgaggcgggcagatcacgaggtcaggagatcgagacatcctggctaacacggtgaaaccctgtctctactaaaaaataaaaaaattagccaggtgtggtagcgggcgcctgtagtcccagctacttgggaggctgaggcaggagaatggtgtgaatccgggaggcggagcttgcagtgagcggagattgcgccactgcactccagcctgggtgacagagcaagactccgtctcaaaaaaaaaaaaaaaaaaaagatctctacaaggaaaactacaaaacactgttgaaagaagtcataggtgacacaaacaaatggaaaaacatcacattgctcagggatgggtaga

SEQ ID NO: 316734 - DNA, 4001 bp, Homo sapiens
aggccctgtgtctgaaggcagcacagtgcatttgagaagctgggatgctggaaacagcacacttagaataagcaccaaagaggatggctgaagcaactcccccaccttgcctgacagaattcatctatgaatataggtactcctccttctgtgccaagcatccaatcaatgaaatgatagttattcttccccattagcttcatgaagtcaaagcctgctttgtttggttcaccactgtattcaccattactattgtccccagtaggtcatattctcctagaagcagagcctgagccaaggattcaatgcaagggatttgttgaggcagtgctcccgagatgtaccagtgagggagttgggggtggggcacaaataggggaggagaggagactcaacaagtgtatcatcttgggtgacaccccagcctcatcttggtcttgagtggtgtgctgaagcagagatgatatctcagagtttgtcctctccaaggcacaggtgctgggcttttgtattcccacaatggtcagtcactggctgtggcttaggggggatgggaagggctgagaatgagttgccaagttgttccagctctccagggaaggccccagtgctcaggggaaacttagcagcagggcatacaggggctgggctggatgcacagggctggtaaaaggcttcagagggggtctgagctgggcaccatcagggtctgctgtttttctttaatccaagaattgagagagagaaagcagtaaaaaaaaaaaaaaataggattgcattgatttcttttcatgtagactccatgatctggacagaaagttaccttcattgatgcactgcagttgagtgagcaccggagacagtcacactggggtttgggtcaaaggtccagctggcagcaaagcattctggctctgttttatctgcagtgtctgcagttcctgtatgtagagggaagaaggctggtgttcccaggtctccttttatataattataaaatgagcttttataattataaaagcaatgcgtgaaaataaacaaaatcaacattcctgaaggggctaaaatatgctcttttggtaggttgactatttcagttaaaggcacttgaaaaacagcaggtgcaaagagatcagtctgaacttcattttcttaaaagcagaagatgaaattcccatgtgaaagatgtcctccctacactagagaaaaagcaaggttcttatcatcaaggacaagaaagttgaagtggaacgaattttgtacaaacaagccttgttcaactaacacttgtcatgctggctacttctctatccagttaaccaccctagcccaagaccctttgcctgatcacatgtttacagtttataattctttgtcaaatctggtaaagaattaactgactctgacagcttctttgtgtctttatttctttatgaggctcctatgctatgtaaaacttgtgttgtgctttgctcctgttaatctatgttatgtcaatgtaattcttggaccctcctgggaccctaaaagggtgaagtagtattcttctgtcccaacagtttctgtcctaaaaggctgagcaccttccgactcactctggagcctgcagatgggatcctgaggggcctaataaatgatggaagaaagtaggaattcttaccaaggtcagctctcctggatttccgtccatagtgtccaattgaaagaagaaggtaaaaatttttgcgtgttccttccttcccaaattcaactgacaggaaaaaaaaaattgtaaaaaattggttctttgaattgtgagtcttgtgaatttgcttctgggtgtccattggtaattgatccacagcctcccaggaagtccttgtttttcttatctctgtcttttgtgtgggttgtcataaggaagaaaattataattaattagatttgaggtaggaggctggcagggcttgttttctggtcatgacctcactgatctggtttgaaaggatatggttgaaacagaatgcagtgaagaagccagccaaaataagcagatggccatgaaagtgacctgtagttgccctcactactcattagcataaagacattcccatgggtgccgtgacagtttacacatgccatggcaatgggccatagcaatggcctggaagttaccatatatggttctggacgctctcggccccttttccagaatgttctgaataatccacctcttaattagcatataattaaaagtgggtataaatacagctgccaacagcttacacattgctgactctgggcacactgcttatgggttagccctgctctgcaaggagcagcactggctccataaacactgctttctgtcaccactggctcacccttgagttcgttcctgggtgaagccaacaaccctctcaggttgatccccaattttgaggctcacctgtcctgcatcagactctgcttcatcttctctgaagtcataagagcttggctttgtaatcagtgaaaatgtgctctttggtttctatcagcctggggctcaagctgttgggcttgtgcccagcagttagccagctctccaggattctgaaacaagaagtgtctctttgtatgaactgtgccagctctcaggacagtttgtcgtaattgtctcagcctttgttgccctgttaacaatgagggtcttcactttcttaggtatccttggaggaaactttggatctggggtgggggtgggacttctgtaccctctttatggatgcctcttttgtccatgattaaaccataaaaagatgatcagttttgagtcaaaactgaagtaggtatacctttgaaaatttggacttttgtatctaaaagtattttttttaagagaactctcatcctaagtaactgtcctattggtacctatgtgaagatttggcttaaaagaaaaaaaaacttatataaattgttatctcagaaaaagagaaactaacctaagtgtttttcaagttcacgtggttttacataatctttggtaaataaaaacctacttaaagtttgctgatttaattaaaccagcaatattattatactttaagttttagggtacatgtgcacaatttgcagatttgttacatatgtatacatgtgccaagttggtgtactgcacccatttagcacatttcgcacccataatgcacgtcatttagcatgaactcatcattttttatggctgcatagtattccatggtgtggatgtgccatattttcttaatccagtctatcgttgttggacatttgggttggttccaagtctttgctattgtgaatagtgccgcaataaacatacgtgtgcatgtgtctttatagcagcaagatttatattcctttgggtatatacccagtaatgggatggctgggtcaaatggtatttctagttctagaaccctgaggaatcgccacactcacttccacaatggttgaactagtttacagtcccaccaacagtgtaaaagtgttcctatttctccacatcctctccagcacctgttgtttcctgactttttaatgattgccattctaactggtgtgagatggtatctcattgtggttttgatttgcatttctctgatggctagtgatgaggagcattttttcatgtctcttttggctgcataaatgtctccttttgagaagtgtctgttcatatccttcgcccagtttttgatgaggttgtttgtttttttcttgtaaatttgtttgagttcattgtagattctggatattagccctttgtcagatgagtaggttgggaaaatgttctcctattttgtcggttgcctgttcactctgatggtagtttcttttgctgtgcagaagctctttcgtttaattagatcccatttgtcaattttggcttttgttaccattgcttttggtgttttagacatgaaatccttgcccatgcctatgtcctgaatggtattgcctaggttttcttctagggttttcatggttttaggtctaac

SEQ ID NO: 316735 - DNA, 4001 bp, Homo sapiens
ggacaaaaattcagaaaacacattttaacagaaagaaaattaaattgatgtatatgtttacagaacatttttctgacaaatatgcatatttgtaaaatatcattttgctttagtttgtatctaacatgtgccaagaaccctatcataaatcttatgtatcttacatgtgggtgctaaacaattactgaattgtcttaattcttatatgaggattaaaaattttttaaatagaagagaatcactgatgaaatactaatgaaaaaattgcttagaacaagcattttgggagaactttttaggctatggtaatgttttggagaggttaatttgcttctcttcatatccttaattctcacttaagtataatattgactgttaactaaatgatatgcatcattaaatgttgtagaaatgagcccctacattgctctgtcttcatactccctgaaggctaggacgaaaaattttacattaagtaattgttagaatattgaaactttgtgatactagggggacccttacactgcggtttttttttctaagtttccgtaaatctgttacatgacctgtagtcctaagcatctgcatttattgagtcgaatacttgccttaaatgcccacattctttcatttctaaaggtttttgcttgttggaaaaatttcttagatgttaaggctagctggctagactattgcacaattctacatggtatcccttttgttgcttttaaatcatgaactcatcgggttcttctttcagtagttcaaagatatccgtttcagttgtggaggtgtcttccttatagtctggggtatctaatacagaggtagttccagaaaatggctcagtgatcttaggtacagtctctgtattatcagtttcagacaaatcttcttctgtagatgattcttccactaggtttgtagctattgatgcagggacaacgaagtcatatctggattcaacagcagtaagcaaaacagaatgggtctctgcttcatttgcagtatctctctccatccaaatactggctccctcggtagtttcttcatcagttagcagagtatcttcccgtttatctttgtctttttcagcagaggtagtgagttcaaacacagtgataaacttctcatcagagtcagttaatgtagccacagcactggtgtcatcttctaaaacacttaggtcaatttcggttattttctcttcttcaagggcagttatgtctggaatagtagtgaagctttcttcaggagcaggagggatttcagcctcaggaatagtggaatcagtgacctggacagcctcatcagcagggacattggatttgatggaggaattataattgctcatatcagcttcatcctttttacgtggaaaggcaggagcgtcagcaacaccagcactgctgtcctttagtgtgccagagacttcagaggttattgagatctctgcatctcctgtgtcaatggtagctaagaggatatcttcttttgctatgtcagtggaaaaatctattaaagaaacagtagtaactggtgatgaaatattcccaattttcactggcatgaaatgttcggtaatagagtctcttgttatggagtttgtagtgccagtcagagaggtaatttctttctgtaggtgagttgttgacttaataaagtcggtccccatatcatcttctgatttgagtttttcctttttagctgtcagtttgttgtctgtagttgttgaaaaatcgctttctagcatatattcatttactgaagtgacgtggtctccttctgaagtaatagttgtttctgatttgggaatagcattgtcagccccaaagaaaatggttgctgcagttggtgttttactgctttctgttggaggatgagaataaattttgggcaaaccatcttcagccatggggcgaagtggcactgtgcactctcacaggtcttgcttctggactcagtggtatctctaggcaggagagcagtgttcatcagagtgattaaagcttgggtcatcatggtgattgttgcatcaactatgggagcaatgtcactgggtctccttggaggttgtttctaggctgcgattggttatctaattgcaggaatattgaatgaaaagactatagagtccgctctgattatgaaatcaaattcacagccaagcatttcaattgcagggaacttaagatttaccatgtttctgtttataaggaaaatgtctcctgatatagagctagggttacttgaaacagacatagcagagactgccaggcaccttttgggtttagaattagtaaggaaaactttggaagccacaagtttatcagcatcagcttaaagtcgtctatcttccaagcaagtaacagagtatttttgaggtgaagccattttcccttaagattcatagtattaaaaaaaattggtatctaaaaaaattaatggtgtttttgtcagtaagtatagctacagaaggtaattaggtagcagggaattcagttagttcccttattcataacaggaagtcccactttttcagtagagataataactaatagttattggcctgtttgggtcttttttttttttttttctttttttgttttttgtttttttttttttcatttatttttattttattttattttattttttttattatactctaagttttagggtacatgtgcacattgtgcaggttagttacatatgtatacatgtgccatgctggtgcgctgcacccactaatgtgtcatctagcattaggtatatctcccaatactatccctcccccctcccccaaccccaccacagtccccagagtgtgatattccccttcctgtgtccatgtgatctcattgttcaattcccatctatgagtgagaatatgcggtgtttggttttttgttcttgcgatagtttactgagaatgatggtttccaatttcatccatgtccctacaaaggatatgaactcatcattttttatggctgcatagtattccatggtgtatatgtgccacattttcttaatccagtctatcattgttggacatttgggttggttccaagtctttgctattgtgaatagtgccgcaataaacatacgtgtgcatgtgtctttatagcagcatgatttatactcatttgggtatatacccagtaatgggatggctgggtcaaatggtatttctagttctagatccctgaggaatcgccacactgacttccacaatggttgaactagtttacagtcccaccaacagtgtaaaagtgttcctatttctccacatcctctccagcacctgttgtttcctgactttttaatgattgccattctaactggtgtgagatgatatctcatagtggttttgatttgcatttctctgatggccagtgatgatgagcatttcttcatgtgttttttggctgcataaatgtcttcttttgagaagtgtctgttcatgtccttcgcccactttttgatggggttgtttgtttttttcttgtaaatttgtttgagttcattgtagattctggatattagccctttgtcagatgagtaggatgcgaaaattttctcccatgttgtaggttgcctgttcactctgatggtagtttcttttgctgtgcagaagctctttagtttaattagatctcatttgtcaattttgtcttttgttgccattgcttttggtgttttggacatgaagtccttgcccacgcctatgtcctgaatggtaatgcctaggttttcttctagggtttttatggttttaggtttaacgtttaaatctttaatccatcttgaattgatttttgtataaggtgtaaggaagggatccagtttcagctttctacatatggctagccagttttcccagcaccatttattaaatagggaatcctttccccattgcttgtttttctcaggtttgtcaaagatcagatagttgtagatatgcggcattatttctgagggctctgttgtgttccatt

SEQ ID NO: 316736 - DNA, 4001 bp, Homo sapiens
ggaggggagagatttgaattaagctgctcttccgacatattctccatgttttaacaccagacaatatatacatatgtaatttttattacttttaaaaatatttacctttcctttaattacagtataaaccaacaacatacatataaacgcactcctttcataaaagtaacagtcgaaactagtgaaagaggaattgggtttgggttccatgctacaaaaatcagcattcacggcttggcccctaggtccctttgcataagtcctcagtaggtctcctgcctccttccctaacatctccaagtagttctgccagtcgggtgaaggaggtggttttacacaatgctaggctacgcttaagagcgctctcagtctccagagggcttttccgttgcctgtataaataaatcctcccagagaacgcaaagatgcacacgtaaatcctaggaagaatgatggtgagcggtaatctggtgcaaagaacaacactggatatagggcaaggggttgggttctgttgggtggcccttttcctggacagaacaactactggatgcgaaatagactctatgccaagttgaactttcggcatcaataaatatggcaccgtctgaggctgtgagttctcatcagtacctgggtcatacggccgacacgccggctaaccaggaggcatctctatttacagaaaacatgatctatgttgcattttacatgggttctaatttcctctccaaacacacattacacacaggcgcgcgcgcacacttctcaggatgatagctacaactgcagagatcgtaaattcactaagtctctcagtgcaggagggtgggggaccgggagaaggtgggctagggaccatcaaaatgagccacagttggagtaagggtcctaccccttctgtgctccctccctttattaagacagcaccttccccagagctgacaaaccaggggccctcctcccattcctctcccaaactccctcgccccaagacggaggccggtgggtcgggggcaacgcgacccgccctcagctggaaaggggatatgcggatgccgggcaaaggtgcttactttccaagctcctcgaaaagctgatactcgtccgtgaacctggtgcaggttgtggtcgaagccatcctcggtccgggctgtgccctggctgggagcgcgacggaccagaagcgagcagacgcgcggctaaccccgggactggccccgcggcgctgtcacccagggccgctcttactttcctggtccgaaagtagctcgcccgcgagggagtgtgcgcaggggcggggcgggaggggagatgaccagaaagggtggcgtggggtctcctccccacagtccgccgatcctcctcctcctgcgggcctcgcttccttcttctccactggacgctccacccgccccttttccagtccctgtccccaaatgcagggggtaaagtactcaagaagagggggccgggaaatggaaaaacagccaggcacgggacgagtggcaagcagttgcgaaacgatccgcactggagcaggaggagtagaagcagaggggagggagtccgagggggcggaggtggagtgcagcggggccgaggccgcggagcccagagcggacagcctgagcccagcggccgctgtcagcaggctcaggcgcggggcgcgccggggctccgacgagcgtgcgcgcccgaggccggcttccctccggcgggcggcagcggctccggcgaagcgaggcaccttggcggcctcgcgctgctcacgagcccgcgcggcttcaagacggcgcggcgagagaaagagcgctcggctcaggcgaagcctcttctgccgtccccaggcctccgtctcctcctccggcgcctcctcccgccgctccctccgcctgccagcaccccctccctggcgaagccccctcctcgctggtcccacacctccctctagcgactccaagcctgtcccttcgtggatctctcgcactccctcctttggttgcacacacgagcacaccagtctagggagaaaccaggtgggtggaggaggatgtgcgggggagaagactggaggtttgggtgaatgaggcgagaagtcacagttacccatttaaacccgcacagagaaggctgcctcaatctggggctgactgagcgggaagatgcagggcaactcgaggatggcccggggcagccgccctgggtcgcggaagcccacgcccctgttttgggcgccgggcagcagggacttctccaggccggttcccgggccacgacacccggtgggccgagcaagggagagcaaccacttcatctccacgccgctcagagttgacacagcaggggccggatgtgggctgttcactgctctcagagaagggtcccaacccttcccacagccaccagcgactgtcggggcaaaacccagcctcagcagggttcactgcgtcgccagctccccagaaccgggcgcaggttttctccctcccccgcagccccttctgcaaggggcaatgacggcccctgagccacattacacttgccacctccaggcccacctcccccgctgttttccaggatggtggctgagactctggcaatccccaaaggcctttgctttggctgtgaacgttaaaagaatgaaagcaaaaactccgccgcacaaccacaccttcccttcccttctgagtaactcccctgcaacctcagtaagttctgatagtaaggcgaattctcgcgatatttcccactctggcggtcagggggaggtagtaggaaggctgggtgtcggtcacgcgacccggcgggggctgacgtcattcacatcacgtgaacacgtctagactgtttcgctttgcaaagggaaaaaagaaaaggggccgtcgtgtgtgcttttgctttcagccagatagtggcaattgagtgcactccgtaaatggctatctggaaaaaccatttagcagttcaagaatgtgtccttccctttagcatatctgccattgttttcagtaggaggaaaaaaaaagtatgcattacgatttaaaatagataaactgctgccgattgctagaacaacttctgggccctctttccagttctccttaatgaaactatgcaattgcaaatttagccgcagaccaaaaacagcgttatggacggtctttttcaaattactgccaattgttctacagcacgggactataaaaaccttgcaatcctattgctaatttgctcgtggtattacttcatagacaaaatttcacagctgaaagataaaagataatttgcagacacaagagaatctaagatttaaaggcgctgctgcttgctcccaaagactgctattaattaatgttactttgtggtcatagataatcctaattccttttttcctgatctggggaacgcttctgccaatgagtgagctttttactgaagtactaaaaatgttcacaaattttaacgtttattacaacaaaattgaagttcgtatgtgttttgattcccagccgtaaaaggcaagaaataactgtgtaaaatgtagtgctatagaaaaagatgataccaagaactgcataaaagaaacatggtctctaaatattaataattgggctataaattgaaaaaaaaaacacaatttggtcttggctaaagatttgtaatatctgaactatttagcaatgtggctccaaggtgataatgaaataatttaatatttttccctgaatctaagaatgaaacagaaaaagtaaaattaaaacaataaaggtaatataaaaatttacatctgggaagaaaattgtttcttaaatattcaagtaatgaagtctacataattacagtatttatctcagttatttaaactaccaataattgtaaatggttataattgtggagtacaataaaggaaacataactgagttttaatactgatgtattattagacaataaatgtgtacattttttacagcaaacactgcttaatctgtacgtaccct

SEQ ID NO: 316737 - DNA, 4001 bp, Homo sapiens
aaaaccaaagtccaagcatcgggctgtgatagagatgatttaagctttatatttcatttttagagattatgtaaccacagcacgcacattcacagtggctgagcccattttgatacagtctggtctaaccaccttgcctggccctctttcagctatcttgcaggtttacatcgtttcagtgactccgtatgtcacctctaccatttcttttctaattattatttgctgaataatcctaaaccaggtctactttttctagatagggcataaaagtaaaaatacaatggatgggcattcactgtgttatgccaggccccgcatttggggcaagacactaaggataccaagataaaccaagtccgtccctcctggagtttgcttgcaaatctagcagggaagatagtaaacaagcaactgcaaaggatatgacacatctctcttagggaatgctggctgcagaaagaacacagcataggaagatttaaccttaaactgtttaatgaaaacagaaatttaagtagcagctcttctaatcaaatgtgatggcgggagaaagggagtgcagaggtgttgcaggcagacactaggtatgaaggtcagcattgccgtgcagaaatcgaaccggtgctaaagataaggaggggtgggggcactcaggacccaacacacgcaggggtttgttagccatattaagtgctgggtttaacctaagggcaaaggacgagctttctagactttcatttcataaagatccctctgcctgtgctgtaaaaagtggactgcaaaggagcaggcgggtctggaagtggagagaccagggaagaggctgctgtggtcagacggctgaaatcagagatagagagacgcggacagatctggcagacatttacaaggtcgacaaggcttggcgactaagcaggaaaagaagtgggtgggcgagagggggctgcgaacgatgttttccggtttcctgcttgggtgccacttactgagaatgggggaagaggcaggtgcagggcacacccaccgaaaaccagagcgccgagtgtgagcagggctcgctaactcctcacggcctgggatttcaaggcgacgccaaccagctgtggccacggatacacagccacaggtatgagctgcgagcactcacgaaactctgcagggccgaaaaggaattggagtttaaaccctgcaactatctctctggaagagctaaaccacattgtcaacccgggataatccaggccccaggcatggaaggcagcagagacggaagcctcgtccaaaattggaaggatcagcccccagggcgagtatctcacagtcagcacccggccgccccagccctcgcagcaccgcttcccggggccactcctccgccggcggtagcgccgtccgtttcccagcttgccgctgccttccgccgcctgacccggccttccggcactcggccggccgccaggtctcccgccctcggagctcggtgccccgtgcccgacctcccggccccgggctcggttcccctggccaggcctcccgctgcctggcctccccggcccggcctcgcgctgcccggcctccccggtcccagcccagcctcccgcccccgggccaggtctcccctccgatgacctgaggcctttccttaggttacccccaggtccctctccctaaatcaaaagccttaacccgctgcctggcttccccggccccggcccaggctcccgcctccgggccaagtctctcgctccgcgggcttcactgctcgcccccgcccgggcgaggtggcaaaacaaacactccgccttccagaccgggcaggtacccgggcgggcgcagggcctgggagaacgcagggagcgggggcagggctgacggcccggagcgagggcggcagtcaccgcacagcctcctcataccttctacaaccgcctcacaatagcacccatccgctaggagccgcgtctgcactgcttccgcggcccgccgccgggagatgtgctccagcgccagccccgcctcccgcccgcccctgtcggcccctcgcgccgcctccgctgcggcccgtcccctagctcccgcccgcccgagaacccagccccaggctgggccccaggaggcgcccgcccaccgcagcgcgccccgcccccgcgccccgcgtcctcacgccctggtcccgccctcgcgtcccgcgccagtcctcccgctttggtcccgccctgaggctcggcccggctcccccgccccggatttgaaatctaggtcttcctgagagtccgcgggcttccgctcccagcgcgggattctggagggaaattgagggagacttggaaaccgcgccaggcccaacgggtacctagaagggagacaaagccaggcctgctgcccagtttgagctctgggaagaagaggagcaggccgggacgcccaccggtaatttctgtctcctctgcgatgacctgaggcctttctttgggttaccctcaggtctctctccctaaatcaaaagccttaacctcctgtcatcagggtgccaggctagaaataaccaggtccacgcatgctgtgttttccaccatgtcaggctgctgtggacgctctttcgatcacaaaagccacgagctgcgtggagttcccaaggaggcagttctcagcacttgctggtcactgggtagtcagagcctgacacacaggctcaagccgctcacgcatcatagtagtgtacttaatccacatataaatgttacaagttaagcatcccacaacaaagtagcatttaacatcatgaggaaaaagagatggggcaaagagattaacgaaccaatccagagggagtgaagaagaggaaaagaagcctggtttgggccgagaggtccttctgcaaagacggcgtcaattaagccggctgttgggagctgccgaaggccccatcttttatagtcacagagtcctgtggtgagaactggtaatggaagagagtgcttgtttgtgtccttacctggctggatgcggactatttttttatttgtttattaaagtatagtatgcttgttggcaaatgccttatgaaatgtaaaaatggggtcttctcctaagatggagttattaatggttacgtcaatggtgtgctatatacactgccctaccgatccccttcctattttgggtcgtgaactcatttcagaccctgaagcaaactgtgaatcattttcgcagaagaattcaccaacacatgtgagcacgacattctgcatcagatttcaaaaagttcttgacattcagaagtcagattcagggaccccatggcagagcctgtttctaacacttgcgcctattcgactatagggactatattctgcacagaaatatacttagttttatatatggttaccccttgctgagtttattgcatgcttttacattttcataatacatttgtttgtttcagcctttcaacaatccctcgggataggaattccaatttaaagaggataaggtttaaagaggttaaggccgagtttaaagaggttaagtcccggcgcggtggctcatgcctgtaatcccaggactttgggaggccgaggcaggtggatcacgaggtcaggagttcgagaccagcctggtcaagatggtgaaaccctgtctttactaaaaatacaaaaaaaattagccgggtgcagtggtgggcacctgtaatcccagctacttgagaggctgaggcaggagaatcgcttgaacccgggaggcagaggttgcagtgagctgagattgcgccactgcactctagcctgggcaacagagcaagactctgtctcaaaaaaaagaaaaaaaaggggttaagtagtttgctgttgctaaaaagacagtcacaggagttaaactcagatcccacaaataagacttaggcctttctttatccctcctgaattgagtgaacaccaatgtttgacagtcctttttctgcctcaataaaactgagaaataggacccactcccaacct

SEQ ID NO: 316738 - DNA, 4001 bp, Homo sapiens
gctgcagtgcagtggcgcaatcttggctcactgcaagtccacctccaggtttcaagcgattctcctgcctcagtctccccagtagctgggactagaggcgcccaccactgtgtctggccctcttttcacttctcttcctttgcaggataatgtaactgccacctccttattccttaaatcagcttaggttttacaaaactaatcattccttttttcacctcactctaatttgatagtccctccagataatcctgccagctaccatttgttgatggcctgatgccttagataccttatctcacagctccacagctcaggaacagggacagagaaagtgggccaggcgtgccaaggtcggcaaagtgaagctgggattgaaagccagcccacctacagattccaaagtctctgtaggcccatccccacgcagcccctcccacccgagaccggctacctttctaaactttgttcaacttcccaaacgacttcggtcattctactgtcatcgtcttcattcactgcactctctatgaaaatctacccatcggctccatcaacaatgtatttagtaaccctatgtagagtaacctccatcaggcctagaacatgcactggggagtgcggtggaggaagaagaggaagggagcaggtgagtgaaggaaagccccggcttcccgcccctagagactgcaactggaccctgcactgtgcctccaggacaaggctacctatctacctcctctacgaccatgtgacttttacagcttgcctctggagcaccatttcctttgtgcagcaaaatataaagagttcttaaacaaaggcactctaaccaactgcaggcgtttcgttctttttttttttttttcttcttgattcgaagtctcactctgtcgccgaggttggagtgcagtggggcgatctcggctcactgcaacctccacctccagggttcaaacgattctcttgtctcagcctccccagtagcttgcgcccaggcctggctaatttttttgtatttttagtagagacggggtttcaccgtgttagttaggctggtcgagaactcccgacctctggtgatccgcccgcctcggcctcccaaagtgttgggattacaaggcgtgagccaccacggccggccaactgcaggcgtttcgacctttttgtttgtttcactctggccaggcttgaagtttctaaactttaccagtaataagtgacagaacgtacgctcttagcagttgattactttgcagaaaaaagttattgtggttttggctcaaaccgacagacagcagcaggtttcctggatgaagaagagagataccggggtgtgctggccgccaggaactggccgcctccagctgaagcccgggaggacccagggtcttggcccgggcaccccgcgggcctgttatgttttcattatgactcggcggaacaacccctccttttcacttttcgaagtgagcaaacaaaagatccaacccccaacatttcaaacggccaggtgtgggggaacgccaggcccgcgtggggacagccttttaaggtttaaacagccggggcgccccgaaagcgctcatcgccccggaggacaaaggcggcaggggcacgccccggcgccggcgtcgctactcgggaccgccaggaggcggcagccaggtccccgagtgtttcttagactgaagcgcgaaaccgtccccacccgccctgagcgcttcaatccaagagtgcaacttctccaggccgccctgcaaagccgaaggaacccgcggccccactccggtccgcgcgcccggtccactaaccctcgtttcccctccagccggagcaagacgcagacctgctcggtgcccagtcgacgccccctgcctacctgccgggtgccccctgcggagccccgaggccgagctcattgcagccaaacgcgcagccagacaccttgccctcctcttcctgaagccacaggctcccgggcccggccccgccctcggcccttcctcggcggccccgccccctgcccccgagcgtggggccagttggttctgattgcgcgccgcccgggctcccgtggatcgggctggtccttcccagagttaaagctcctcccagtcgctccggagcccgcggggaccaagagcgcgggggcagggagaggtacgcggtcttcgcctccaggcccgctgggactaaccgtgccctggggacatgccagttgccacccggggggacacacagaccgcctagcccgaggcaatttcacatcacttgtgtgagctcggactcatttaatcccagctgccccaaacatttgctattccttactttgctatgcctgtactttctagaggtacaggcatagattgttttataccgcttagcagatactgcctgtatttcaacattggctcgctttgtgtctctgtgtcacattttggtactctcgcaatatttcaaaatttttcattgttattatgtctgctgttgtgatctgtgatcagtaatctttaatattattgcaattgttttggggcaccatgaaccgcgctcataaaggaaggggaaattaatccataagccctgtatgtgtttggactgttccaccgaactttcccttctctctccccctcctggggcctccctattcctggaaacacaattttgaaattaggccaactaataatcctacaaaggcctctaagtgtccaaatgaaaggaagagcctgtcactttaaatcaaaagcaaacatgattaagttagtgaggaagtaatgttggtaggcagaaagctaggcttcttgctccagttagccaagttgtgagtgcaaaggagaaaagccaagtcatgaatgcaaaggaaaaaattttgaaggaaattaaaaatgctactccagtaaacacacaaaagacaataaagctaaacagccttattgctgatatggagaaagttctagttggtctggatagaagataaaaacagccacaacattcccttaagccaaagcctaatccagagcaaggccctaactcttcaattctatggaggctgagagaggtgagggaattgcaaaagaaaagctggaagctagcagagaggatggttcctgaggtttaaggaaagaaactatcttcatgacataaaagtgcaaggtgaagcagcaggtgctaacgtagaagctgcatcaggttatccagatctagctaaaatcattgataaaggcagctacactaaacaacaatcttttgtttttgagacagtcttgctttgtcaccaaggctggagtacagtggtgcgatcttttgcaacctctgcctcctgggttcaaacgattcttctgcctcagcctcccaagtaactgggattacaggatgtgccaccatgtccaggttaattttgtatttttagtagagacagagtttcaccatgtttggccaggctggtcttgaactcctgaccttgagcaatctgcccgcctcggtctcccaaagtgctgggattacaggtgtgagccaccgtgcccagccaaaacaacagatcttaaatgtatatgaaacggccttctattggaagaagattccatctaagactttcatagctagagagaagtcaatgcctgtcttcaaagcttcaaagaacaggctgatgctcttgttaggggctaatacaactgatgactttaaagccaacattcctttaccattctgaaaatcctagtgcccttaagaattatgctaaatatgatctataaatggaccaacaaaggctagttagtgacagcacatctatttacagcatggcttagagaatatttaaagcccactgttgagctctagtgctcagaagaaaggttcctttcaaaatattactcctcattgacaatacacctggtcatccaagagttctgatagagatgtacagagactgatgctgttatcgtgcttgctaacacaacatccattctgaagcccagggatcaaggagaaattttgacttt

SEQ ID NO: 316739 - DNA, 4001 bp, Homo sapiens
ggggaaaaaaacactttttactaaaagcaactgttacttaccacttttaaaaaatggttaaatgccaaaaaaaaactacacttcaaaggaaaacaaagcattccctatgtaatctaccattttaatactctaaaatgtaggattgtttttaaaagctaaaacaattctttattttctgtctgaccttgataaatatgcttacaccaacactaccccatcaagcctttggaaacagtaagcgacccggggaattatactttctagatgaaaaccaatcactcatggaacacgattcaaaggaatgcagggcccaaaagcatcctgtgtctctcttactcttggttttcacccgaagacttgtgtccacaaccacctttgaaagcccaactaatggcttcaatccagtccagcaaacactgatggcttggggtgacacagtaagggtcaccactcttcccctcctttgttagaatggtaaggaatatgagcttcaagaagcattcactgacactctccctgacctataacttacagaatcttttttcttttagagagcccaatagtctcccaaccagcactgaacaggtgataccaaaccgatcaataatgttaacttaaaaatgaacagccacacctggcgtctatagtcccaggtccttgggagactgaggcgagaagatctctagagccagtaaatcaggagttggggtccagcacgggcaacataatgggaagccctctcaaaaaaaaaaaaaaaaaaccagatacacaaaaacagtaagagccacaagacgcacccctaggcctctattctccccatgcctccctgatagtaaatgaagtataattttgtccattctggtgattaaacaaatagcatcttcggatctaacgtcctatttctccctaaactcaatgaagagttatattcacaaaatgactaatccattcataataagccggaaataaaaaaccctgaagtttaaatgcaataaaaaagaatttggcagaacaaagttcaattgtccatttgcaaaactcaccaaaacaatttaataacattaaagcaaaccaggtatatctcaaaactggctggtactcaaaagggtttctctatcaaacactgctttgtgcattcgcgcagggccaaggcacggcccttgggcaaaactgaagggagccgttggtacctgcactcccacctttcctgcctgaactcctttcgacccagccctgtctccgggggccgagaactcgcccttttccctacattaaaagtaaactgttacgtggctctctcccacaacagggaagctcctcagcgttagcactagccgcagggcggagggtgcgtatagcggggcctcaaaagactacgaggtctcaaagaacaccccaagtgttcagccctcggcggcaagctgcgtggccggcattctgcgaggcatagggagatcgcgggtttctgcacgagacgcattctacccttggaacgggagagcgcctgcacgcggctacatcgagtaaccctagagccctaaaggccagacccgctctttttacaaaggagattttctttaggcgcctggaccgcggccatacaactggacaactccagtttggtacctaccgccgaggtcaccggcggcggctttggccccttccaggtttctggcaatgaccgccagtcggtagcctttccgggccattaactgggccacagctctgccaatgcctcgggagcctccaaaaacagcacacactttgtccatctcggagtcacaaactcggaggaaagagggtagggagtgggagcccctctccaggttccctcaggcttttaaacaaccgcggttccaaaaaaaaaaaaaagaaaaaaaaaggcaaaccgcaaaaaaaaataacgccgctcgacacctcctgcagccgcacaatagtaatgcaagacgccgtgaaaaggaggaagagctcgacgtcgccgcgtcgacgtcatcacgcacggactcttccgcgccacacctaacaaatacgccgacgagagctccccgccggcggaagaatggcctggagagggcctcgatgcttgctgggacctgtagtcttgacgcatgagagcaactggcgcaggcgcgctgctcggtggggaatgtacttgtggcactgagggggatcctctgtccccgctgggtcatatcagtcgggattcgagccccggtgaccaatcgacccggtttgttcggaactgacagggttgtcaagacgctgggctttccctggcaaaccaagacgacctgatcacgtagttagaacccagagaaagcattactgggcgtgagccggtcggggctccggtatttgcccttcgcccaggtgttgttttggctacagacttgatgtcctacctgttgaagaagtccccaagaatcgcacccacaccaaaacctaccctacctgttcctcccccaggttgctgtagaaatggacctctacccgcccagatgttaccattcatcgcgaagggtgtcgtgaagatgaatgccctgtcgaacatcatccagcaggaggtcaaggaattttaactgaatgattgaatagtcttgcaagatctatgaaacaagcttcggctgctgtagagaaacaaaaatgggttcctgcaattctaaataagatgtactgggtgctctgagagttaataagctaaaaaattcaatgtttgttacaattatagtgtaaacagaaagcatttctgatacaatattattttactagattcagaaaagtatgagccatggtccctaccactaaaaaaactacaacccagaactacaggactaatacacatgaaacactaggaggtatccaaaatcatacttagtaaaatgcaaaattatattaacacaagagctccgagaaaatggagatcagtgaagaatgaaggggtgcatggaaaagctggatttgagggctggatgaggtttgaaaaaaggaaaacaagagcaaaaagtctataaataagcaagttgagcattaatttaaatttgttattcctattccatttagatccaaaaaaagatttgaaatggtttgcaaaaatacatgagtatttgaatttaaaaggcaaagaggaccactgccccttctcccacaaggccagaacaataaattaggtcagtggaaaaaatacgaataaagtcatgctataagaatctatttagtattaaagaagagattcataaacttagagtttcctgccagcgaaagcaacaaaggaaatataattacaagtggtaatttctgtaagaaatcagcctcctggttatgcagcagagaagcctgagcaaaactccctcctcataggtcctcctaaatggcacactaagcattgtagtagacagtgagcttcatgaaaagaaaaagagattgtaaggctgttttcatagcatctattagactttattaaaagcaaatacaataggaagttaaacaatataagcaaacagtcacacataaaaattgtgtctttgaaacaatatatgtttgaaacaatgaggaaacaagcctgaggaaatttgggatggtgctatattatagtcagctttaaagtcaggtgccaagcattaaacaggcctttaactgcagaagtaataagataagagctgcatttaagaactattagcaggccaggcgtggtggctcatgcctgtaatcccagcactttgggaggctgagacaggaggattgcttgagtctagaagttcaaaaccaacccaggaaacacagcaagacccccacccccccgacccccatctctacagaaaatacaaaaaaaaattagctggacatggtggcctacctgtggtcccagctactcgggaggctgagttgggaggatcatgtaagtccaggaggtcaaggctgcagtgagccatgattgcaccactgcagtccagcctgcatgacacagcaggaccctgtctcaaaataacagtgttctaaaaaac

SEQ ID NO: 316740 - DNA, 4001 bp, Homo sapiens
gccatacctggaggttgagatacaacgcatctcaactccatattggttgcttaaaaaatcatacaatatatatgccctactccaggatggcaaaaacatgggtttataggaagagtggtccacatatttctttgccaaggaatatgtggacctgagttccaacttcagctttatttattagctgtgtgatcttggaacaatgccctcccttctctgagacacgttttttttttttttgtctgcaacattgcaatcatacttcctaccttgaaggatgattaatttataagggctaaatgatgaaatgtgtgtagtaaaatgcctagcacaggctgggctctcaatattggtaggttttgttactaagaaaaagtgattgtggggagggaaagtggaaaaaaggaatgaggagggaaaagagcttgggggatagaagaggagtcatgagaaagaccttaggtgatgttcaagcccacccaccttcagctccaatcttcaacccccagctaccataactcatgtttcatgtctccctcccttcagccaggcccagggcagttgccttgctgtttccatttatggtgcttctgaaacctcctgcacttctacccatgagtattttcttcctcacaccctgagaacatttttctgttccctcctggagcttggacacctggggaggtgccacatacattgttttggaatacattatcttattctacaagttattccagctgcagtttcccttagcataaggttagtgaccaatagctttatagaatcatttaatcagctcgatataatgtacactggccttgaagagtacacatgagtaccatatttgagctgtgttacgtgatatatgaccagtgcatttacatgatgtgctaagtactggaagcccctccctggatgtcatcccactgtcctctcagtgtttttataaatctcttatggcacttagctcattgtactcttatcatgtgtttataggtctgttttcccagcaaattctgagcttctgacctagtctaatttatgtttgcacactctaaacttaaattcattgcctggtgcattgttgatgctccataaatgtttgaatgaatgactctataagtgagctctaggatatatatatatatatatatatatatatatatatatatatatatagagagagagagagagagagagagagagagagagagagagatttcatgctggtgctgaatttatttgcagaaaaggttatatgaaaatgcagtagcaaacatatttcttatttgactttattagcttttcataccacctctttgcaatgaagggaaacaaacaatcagcttaagttgtagccagtacattttcttgaagtctttggaaagcacagcaactcttagcactgtggttagtagccctttctctgtctcataccaagaaaagtgtattttgcagtaattagtgcttctccccttaagccagtttgaactaaaaggcccataaatgcaacacgcagctaatgtttcacagagctttggtcagagagcattttcactcaggacttgtgatgaactggacttacatttcctgcaaaccagataccagatagcagctcaaatcaaagctgccaagtaatggtctatgttcccatttcagaaagtaaaaacataaataacgatgagagcccctaaatttacaattcattaaatccagtctcacggtatcctggagaggctgaacttcaagccgggtaactgaaaacaggaaatcactgttgcagcctaaagtccggttagggactgatttaccttaagaaactttacaaaaggcactttgcagattctgcattctaggatggaagtggagagagacggtgctgttgaatcttttaaaagggtccggagggaaaggctgagtgttggagatgcccctgggctcctccctgggaagctgcagccatgtcttggagcaaaaacaccagcttagcaacccgttcctaaggaaggtcactcggtagcttttttttttttcctttaaagtgacaggctacttccagtagtggagtacaagcatgctgggtaagcagagacgcacagcctgcagtagaaggacggagagaaatcaacatgagcagcactggaaattaggtcaagccttaagagctgcccctccctcatgtcatccggtcgtcttgcatttccaatgaagaacaggctcagaggtggggggatttagaatcttaaaaggtcgtcattacatggtgaagctgtctaacgtggcagcagcaaaagctctgtggaggtgctgcagagtaccaacaaatgttgcacttgagtgttttccagttaaaagtggaaggttgaacgcacaagtttaatctttgcctattctctgaatcccactgcaattcctgaaaacggatataaatgttatggctcaaaaaagttggaaaaaaaaaaagagggagaggtaggaggcaaagtagctggaagagtaatagaatgaatggagccaaggaaacacactccaatagactagtgtgtatgtgcacatgtgtttgtgtgtatttgtgtctgtgtgtatggtgtgtgtatgtttgtgtgtatgtgtattgactgtatcttcttattttctgtattcttgatgctctggcatttggagccttgatcctggagaaactgattctcctatgttagctaatttctagagatagcaaatgattcccctgaaatatgcaaagtctcctttgatatacaagccaaccaatccagagcccacacaaccatctccattatcaaactctcacacactaagccaatattcctcctgtcctaagtcaccccaggtccagataccagaccactatagcccagagaacaccacgattattcaagctatccactcctaaatttatgcagcaccctaccctgcttcacctattccttcctgggaaaaccctagtaaaggctctgtgctgtactctgctgtctccgttctgccttctgaccaacattggttcttccctatgtggtcctgtgtggcatgccatgttctatgatttgaatgtgtcttcccaaaagcatgtattggaaacttaatccctaacacaatggtgtcgggaggtggcacctaatgagaggcaattaggctgtagggctctgccctcataaatgcattaatgccattattgcaggagtggattccttataaaagaatgaatttggcctcgttttctctctttctctttcttgctctcatgttttcttgccttgcaccataggatggtgcagcaagaagacccttgcaggatgccagccccttgatcttggacttcccagccaccagaactgtgaaaaataaatttctgttcattataaattgcccagtctgtgtattctgttacaacaacagaaaacgaaccaagacaccatgcttcttgtttctagggatctgttaagtataaacttcttcttttgtgccaatcatgtttgtgtctgtgtgtcttaccatacctaattaaaacaaatccagagtacattttttgacacagcctgcatgcatgtgtatgtgtcaatgtatttgtgtttgtgtctctgtacgtgtatgtatgtgtgtgtgtgtctgtgtatgatggggtgtgcacgtaggcatgaatatgaggaaatgagctgatttactgtgccaggatttggggcagcagtgttatagctgaattgtgttctctctcatccccaaagatgctgaagtcctaacctcagtatctcagaatgggaccttatttggagatagggtatttacagaggtaatcacattaaaatgaagtcattagagtgagatctaatccaagatgattgcgtccttacaaaaggggaaatttggattcagagacagacaaaatagaagaaaggcaacgtgaagacatggggagagcaccatctccaagccagggaacactcaaggctatcagcagccaggagagaggcctggaacagactgtctct

SEQ ID NO: 316741 - DNA, 4001 bp, Homo sapiens
aggtatgcaatggcaccaccctagacagcatcagatgggaaatatggagaaaaggatttgcaggtgataatttgagaaagggcagccagtcccgggatccacaaaaatgctactcaacgtgttaaatggacttaatagaaaacacttggggctggtcgcggtggctcacccctgtaatcccagcactttgcggggctgagacgggcggatcacaacgtcaggagttcgagaccagccagtctggccaacatggtgaaaccccgtctctactaaaaatacaaaaattagccgggtgcggtggcgcgcgccggtcatcctattttctggggaggctgaggtaggagaatcgcttgaacccaggaggcggaagttgcagtgagccgagatcgcacaactgcactccagcctgggtaacagagcaagactccgtctccaaaaacaacaacaaaaaacaataatctgtgtttaaaatggcatgtgaaaggggttcctcgtattgggttgttttaatgtttggtatctctttgactacacaatgcaacacttacagtaaaagtacaacctttaaaagtataaaaagcccatctccccaatgactttataagtctaccattttacattttaaggagtttgcccctgttcttacatttagtaacaacatggccttcctcattctctttcaaacattcctggaattgattttctgaatgcacttaatcctttggtcacaagctcaatgaaaaggaaaaaaaaatgcacttaaatattccctgcatcaattgaaactgaagccctcagacagctggaggaaaagggggggaaggaaaaaaaagaacaaaataaacaggaagtgaaagtgacaagagaatcacactgcttactttttggcttttaagcctttaacaatctgaaagtaatcttaacagtgtgggggaggaacaaacgaaaactcagaaacagctccctccccaaccacacacaccctgaaggctttggctgtctttcctcatctgggtcagagtttgcactcccgggctcctgtcaggctccatcgcaatcctccttaaactcagcgctttccccttcttctagtcttttttggtgcacatccactctctactcctccaagccacggttctccacagaccacaatacaacggtgtcaggccaactgttactcaccagcacactcatgattcacccgtctctcgggtgtctgaacaaaacgcgagtttttcttccttctgggaaagggaggtgctcgcagatttcaggatggaaatttcactctcctgcgaccgtccacacccgggacggtcactgccccgttcatcgtttccgggctccttaggggctcgggcactgatcaccaagagggaaccggccccgcggcgcagcggctttggaaacttgctcctgaccgagagctgcagcccagaaactgcctcccaggttattctgctgctcccaggccgaagtctggtggtccccgcaccctatctcggcccgggtgaggcacccccagccgcagcgctctggcttcaccttccccgggcccggagtcttgacctcagcccaggcctccgtgacccacgtcggccgcccggccaccacctgtcgggaccgcccggcgcgcggagcccggcagccagcaaaacgcagttgactgctcggccgctcggcttttgctcccgccaaagttgtccaacgcaaactttgcaccagcctaccccgaacccccacagcccggcacccgctcttacctggggcggaggcggcagcggccacgggcgcgctgggcgccaggtgccaggggtcggcagcagccgcgtgcgccacggccagaggcccctctggagcatcctcccgccccaggcgcgcggctcccgcaggcgtcagcggcgcatcctccctcagccgggctcctcgtcagcgcctggtggctccgagctgtgggcgctcccgccccgcctgctcgctcagcgcgccgcggctccagcttgggcgggctcacgggagggtgtgtccctgtttccacttgtcggctctctacgcatccgggcgcagggctgttttctttcctccgaccaaaaaaaaaaaaaaaaaagagagcgagagagcgggagcccgagagcgggagcccgaggtcgagggccccctccttctccagcagaagaccctctggaatgaacagcagcaggcgacgcacaccttgcgagctctagatttcaaaactcgctgttaattcccggtgctgcgtgctctgagcgccgtcttcgccatccaacccagacggggatgagacgaaaacagcgtccggcatctggagggggcagggccgctcaggaagtttgttttccccaccgagcttggagaagacggattgaagcgggtcggccgaggcctctcccacctccacaacctccaaggcctctgccccgggctgcggtgccgggcccctgctcgctggcgagtgcggtgtgaggcgggcagcccgggcctacccctgcggaggtttgtagttcacggtataggggcccaaacccgagttttttgggaaagtatctcccacagaattggcttctcttttgaagcacgtttttaattgaagaagcttcggaaccggtattgagttcttctaactactgggaaatcggatgctttgttttgagactacttatttttgaaagcaaaccaaaggcattaaagagcaacctaaaccaattacagtagggttgttagataaaatataggatgcccagttaaacttgaattttagatacaaatagtgaagtatgtcccaaatattgcatgggtcacatttattattttaaaaatgaaatatctgggatatactaaattatttggtgtttatctgaattcaaatttaactgggcactccgcatttttatctcctgaatctgcaagagggttcagttaatgaatcaaaattggcaaacctgcaataagtggcaaatcactcctggcggtaatctcctttccttattgaaaagggaaagaatcacaagtttctactatagtaaaaactttatcactattaaaggctgattcacctgtgttaactagcatgtctttcaaaatacagttgccccagatggagagtgacacatgaaactttaagttcatatgggaaggtaaattaccttacctgaatcttttcctcctattagctagtgctccaagtgaaagaagcgtgtatttttgtttttttgttgtgaagggttcttgtttaatacaactgaaaagaatgcctatacaaagaattgacatgaaaaagcattgattcaacactcatgagctaggttctgaaaggtgtaaaaaaattacctgaacatttttagaaattggaaactacaactaaaactgataaaaatccctattaacatttgtgaagaatcttgataatgtgtcctgaattggtgggttcttggtctcactgacttcaagaatgaagccgcggaccctggtggtgagtgttacagttcttaaaggtagcgtgtccggagtttgttctttctgatgttcggacatgtttggagtttcttcctcctggtgggttcagtggtttcgctggcttcaggagtgaagctgcagaccttggcagtgagtgttacagctcttaaggtggcgcgtccggagttgttcattcctcccagtgggttcgggtctcactggcctcagaaatgaagctgcaaaccttcacggtgagtgttacagatcataaaggcagtgcagacccaaagagtgagcagcagcaagatttattgcaaacaacaaaagaacaaagcttctagagcgtggcacgggacccagacaggttgccactgctggctctggcagcctgcttttattcccccatctggccccacccacatcctgctgattggtccattttacagagcgctgattggtccgttttgacagggtgctgattgatgtgtctacaatccctgagctagatacagagtgctgattggtgt

SEQ ID NO: 316742 - DNA, 4001 bp, Homo sapiens
tctactgaggtgtggctgctctagtctcttctttccgggccctgacaaggctttttgtgaagatcttgcatggtggaggtgcagaaatcctgtcccaacctcagtcctcttgtggttcagcactttggcatcaggattgcccatatcctacagaggggcaactgggggtccgggcatggcacatcagtctagacccttctcctgccccgtgctctgctccttccccggcatgtcccctcacagcaggctcctctgagaggcgtgtagtcagtcgcctgggactccaccttcaatgtcctcagattcccctagctgggtacccccatcttattcataatttatgtggtgcttgaaagctttagctatgtggctatttcaaacatcctccccatataatatcctgtagtccgtaaatatttactataaaaagtagttttctttagaaaaggtatacacccctccctggatatccacaggggattggttccagagcctctgcggatagcaaaatctgcagatgcccaagtccctaatacaaaatggggtagtatttgcatagcttctatgtgtatcctgctgtatactttaaatcatctctcgattacttgtaataccttatacaatgtaaatgctatgtaaatggctgttatactgttcaaaatttgcatttaaaaattgtggtactgttatttttaaaaattttcccccctgaatattttccatctgtggttggttgaatccaaggatgcggaactcccagataccgagggctgactgcatatcgttttagtgtgtgtccaaaaaactcaacaattcttacttagcattcagagaagcaacggagcgtagcgtggtggtgaagacaggcagtccggagccgccctgctgaatgcccgctccattcctcgctgcctgtgtgaccttagggagttaacctctctgtgcccgtttccttatctgcaaaatggggatcgtggtagcacccacctcgtaaaagtgttgtgagaattaaacagttgatccattacgtgcttagaacagcactggcacaaagcgcgagtgccgtggtggctgctgtccgtgtcatcacggccgtgggaagcacgccaggtgagcaggtggcacaggccagatgctgccgcctgtgtatagttaaaggagccttttacggtctggcgattttacctgtgtcactgcagccactttccttcaccccctccgaagaatttaggatcttggacgctgaaaggagaacggagtcaacttcatcctcttcccggtgctgcttttctgtaacagaaccgtccggggctgttctgtcgcgggtcgtggcgtggcggggctgaaggtgggggcggggcagagggatggggcggggcagggctaacggctggggcggggcggagggaattaggagggggcggggctgaaggctggggcgggggggcggggagggcggggagggcggggcggagggaattaggagggggcgggtttgaaggctggggcggggcgcagggatgggatggggcggagagactgggcgggacctgtgggggcagaggaatggggcggggtcaaggctgaaggctggggcggggcggagggatggggcggagggacggcatcaggccgggcctggggcggggcgcggcgctttccgcaagcggccacccgagggcgcgctgggcgggcggcggcggcagaccacgtagccagcctgtaagccacagcggacgcagggggccgcagcgggtgctcagccctagggccgagcgggagatgtgcggcgagtgcagaagggcggacccgggatgtcccgggttttcgagcggggagccgcctgctgaatgcccttctgctgccctccgttcccgcggctcccctaggagccccgccccgtccaactcttacccgggctcatcgccgcggctcatctctctcgcaaccgccgccgcacgcacccgctccgccgccccgcgcagggcatcctgtcgccaggtaaccgggtggccggggcgccggccccacccccaccctcggcggcgcgcgctcggctggggtccctggtggggtcccggtgggtccctcctcactccggacgcttccccgagagcttccctgggaacctggcctgggacagcccacctgggcgcctccccgcacacgcgcgcggctgtccgggacgggcttgctcacactcggactcgctgcggtacccgccggaccaaagcggtgcggagaaagggaccgcccggggacggacacacgcctgagagctttccctttgcctttccacatctccacttcatcgctgttgttttttttttttaattcttagtcctctcatttcagcgcatccctcagaggagtttcagcatttggggatttgaacggcccatgaccaatattgtgaaaggacttttgtttgctgcaatgaaaagaagactcctatttttcaataatgaattaacctaaacatgtattaaaatatgctcatgaaagctgtgggaagcgacggtgggcttcctttgtctaagcatgttaatttttacgcacctggtgtatcacgtgcaggattgatgttgcgttcacgggaaacctgacctcctttaaccaaggactgggtgcgtgcccccagctaatcctcctgcccatcagaaaatggtgctctttaaagttttaaacgagtatatattatttattttgtagtaaaccatcacacatagaaaattaaaattcaaaatcacaatcaccaggatatcataatttgctatataataacatataatatataataagtaatacatgatggcttgctttcattgaaatgaaacttcttatgatagtttcagtgcttacttcctctaatttgtttcttatagaaatgggctctagtgcacgcgcctgtaatctcagctactcaggaggctgaggcaggagaatcgcttgaacccaggaggcggaggttgcagtgagccgagatggcgccactgtgctccagcctgggcaacagagccagactccgtctcaaaaaaacaaaaaaaaacaaacaaaaaaaaaaaaaagaaaagaaatgggctctaggtccggcatgatggctcacacctgtaatcccagcactttgggaggccgaggcgggtggatcacctgaggtcaggagtccgagaccagcctgaccaacatggtgaaaccttgtctctactaaaaataccaaaattagccaggtatggtggagtacattcgtaatcccagctactcgggaggctgaggcaggagaatcacttgaacccaggaggcagaggctgcagtgagtcgacatagtgcaactgcactccagcctgggccacagagcgacactctgtctcaaaaaaaaaaaaaaaaaaaagaaagaaagaaagaaaaaaatgggctctagaagatttgactttcttgtggcattgtagacaattttaataaattataattttgagaatttatggtctgcattgctgattgatattgatgattcaggagatagaaattatttaggcagatagggcaaaagagtcttcagcagaacttctaacaaaaaacagctcaagaaatcatttttttttctaacaaagagcagcctgaaagcctgcaaaccttgcaaagatagatcaggaagctggaagcgtgcacaccagggcgcagggggttggggggcagcgtgcgggtggatgccagcagctgcgctgatagaaaagggctacctgggggccaggcatgtccaccatggaatctccatctccccttttttgttagcacgtgtacagtaagaaagagatgggcgatatggaaaagctcagtcagagaacccacctgcgtagtaaaagattggggtgggggctgccagagattcatgccctatgcagatggcacacctggtcctaactggtttttcacgccctatgtagatcagactgcctccccattagctcatctataaaattctataaaaaatatttcacagcgaa

SEQ ID NO: 316743 - DNA, 4001 bp, Homo sapiens
ggctacgtgcccacctcatgtttgtgaagttaaggaggtattactctggagaaactctgctgggatgggcaggaaaactcctgaaggacctacttcaggattcactgacttattcaacaagcatttttcgagcacctgctgcatacagagctctgtgtataggccctggaataaagaaccaaacaaagcacacggcctagtgaggaagcctattgttacaataatgtggtcagggcaaggtgaaggttaagcccagccaactgaggggcaccccatgccatttagcacttgaagcctttccatcctttagttcactctcactgtctacggtatgaccttcctcccagactatatcatgaaacccccaggagttctttgagggtaggggagttctttgtcttattcaccactgaatcccaagcacctcacaatgtactgactcctaacaggcacctgatatgcaattgttggagtagtgaagattctgctgctatttaagggcctaacactggacttctaaggagaactacctccagcctccttgactactaagtatgattcttgatgggaccagaaacaaggtccccagaggatctgccccttaacataaagcctgacagtttgagaagatggagccaggctgcaatacaatggatcataacaccagacagttaggagagctttcaactactagaccaatgctgagcaaactaaactagggcaggagctaccgcatgtcattcctcttcagaaacacaacgctctgcacacactgggcatgaagcactattatcagactgacctggagacccagaaaacgatgaaaggagtgagggagtagagggtttcccttcccataacccacaaggaaaggaaaagagcaaaccgatacactctgcattgtgtgcacaggattaaagaaaaggaagccccaagttggccttggctggagcttggttctcagaagggagaaattccccggcatgggtaagtaacaccaggaattgcccccacaaatggtggcaaaccagggcaacttacctggttgcctccaggtgagagggagaaatccgcattccctctcacctggagaggccggcagcttctcccggcaggccggcaaactcttagggggaactgaagagcaaacagcataggatcctgaaagtggacccccagggtatgtttatgacaaaagagtcgcagggcagggggacacggtgttctgtgcttccacaaatcgaatcacttctgcacctgtgtttcactttttcgataaatgcccctccccaccttacacatggtaggcctgcagtaaacacgtgttgattgaattgagcaagtgaatgagtgaacggctgcagcggacccccgaactcccccaactcgaaccaccgccgcaggtaattccacctggcccaggttccaccccagggctcggattctcccccatggcaccaccttcccgtttcagtcccaggcgtccaattgtttggctccacaacagtggcgagcgggcaggcaggtggggcttggcaccttctgctcccggatcccagggcttcagcctccaatccagggccaacccctgccttggggggaaggcccctccccaaaggctgacaccagatggcgcggaagaaagtggcgcccgcgcagacccgaaagtgcaggaggagcggcgcacctggcggggtcgcgcgggtgcggcagccgcggccacttggagtgcgcgcccccctctcgtccctcccagctcggcctctctgggggcgcgggcccggggctggcggccgctcggcccggcccatcccgcctggccggcgccgcggcctcacctcgctcaccagcccctgccagtcgctctcagtccggtcgccgttcatggcctcctcctccatgcgctggccggcctcctggacccccgccgcctcctcctcctcgcgacgtcgcgtcgccgccgccgcccgggccccgcgcggccccgagagggcccggcgcctccgagccgctgcgccgccgcctctcgcggccgccagcgctgttgactccacgtcagcctccgccggagggaaagggaggaggggcgcggccgccggggccgcagacacagcccgggccgcagccgagccccgccgggcccgccccgcgccctcagccccgcgacctcgggctccgcgcctcctgcccggcctctaggcaaggggaagccagggtctcagcctacaggtcactccggacccctcagcgctctccgcgcgggaggcgggccccacgggcaggcctgtgtcccccgcaagaagcaaatccccaaatccagtccttctccgaccaccatcacgactcccacgcctagaatgcaagctccccgagggcaggggtttccttggttcgcagatgtgcctttggcaagatcctggcccataggagatgctctacatatatttattggacgaatatttgttgaacgcaagaatgaatgaaccacgttttattatatacttagcattgttttttaaactattagtgcttgcttatatattttttaacgtatcatttgtcattaatagaaagcaaatgtaaaaattgaaaataaagcattattcaattctaaatagggccaaaaactctgagggagatggttagcatgggttgagagaggtgtcaaagacaaattggcactggtggcattccatggctcatgcctgtaatcccagcaccttgggaggctgaggcaggaggatcccttgaggacaggagttcaagagcagcctcggccacaaagtgacacaccccctctttacaaaaaataaaataattagcaaaaggggaaggcattggcattaagctgagacttctcctaagaggaaagactgaaagagaatgacagagggaaggtgaatcacacacataagtcaatcgtattcaaggtgctgttcctgtgacacctaaaatcccctcttggaccactatcaatagtgagccctctgtactcgcagaaacgctgtgtgtggagatgagcaagtaggttgagaagttgtgaacccattgtacagttgtggaagcatcattaccaacatttatttataatttttagcccctgttgatcctggatcaaccctgtgaaatggatgttatcctcatttattagatggggaaactgaggcctgaaacgtggagaaacagggactcaactaggacttctggctctagcatcttggaaatctaagaatgaagtatcaccttgaaagtttgttcttggccttgttttgcacatgatagactgtttgcaaaatggcagcaatcattccccttctttgtcccttgccctgccactgtctctttcactctgtgctcagtcatgtaacttgctttgaccaaagcaacgtttgtacatgtgttaccagaaaaaaaaaaaaaaaaaaagaaaaaaaaaggcttttaaagcaattgtgcattaggatttaactcttgcttctgctcttggaaaccatgtaaataagctccgaatagcttgctggttaaggtaggattcccaaccaacagtcaaccatcaccagatgtgtgagtgaggccattgcctgccgccccctccacgcccccccacccccacccgcacagctgatgacaagcacatgagtgagcccagctgagaccagccgaagaaccatccagctgagccttgctcaactagctgactcacagcatcacatactaaataagtagttgtagtttaagccactaagttttagggcgatttgctaggtatcaacaggtaactgaaatggatggtgacacaactgatgaagggcctgaatggcttgaactctccctggcagcccttcaaaaagcaatagtccctggcatcataatctaaagaaaattttacaacggactggctggccaggagctaagaaaaggaaccagtatactagtcagcacattggttttctgcctgttgtatacaactgcagcactcatcctggggaagttcaataaca

SEQ ID NO: 316744 - DNA, 4001 bp, Homo sapiens
agcatgtaaaatgtggctagtctgagctgaaatgtgctgtaagtgtaaaacacacatcagctttcacagacttgatttttttaaataatataaatatcctattaataatttttatattaatttcatatcgaaaggatatttgtgatctactgagttaaataaagtacattgttaaagttaatttcatctgtttctttcccctcatttaatgtagacaccaggaaattgtaagttgcatgtggtggtttgcatatgtggttcacattctatttctgttggcagcacttgtctaaattgtgagggatggttcgttgttggcgtgggaggtcagtgaattctggaggagtcagaaaaatcagaaaaacctcagatgaagagacaaggatgggggtaggatggcatttggaacccattctccatggttgttgtctctaattttccctgtgaataaaatgaacagtcttccctttccccatcattcctcccaccattcgccacccaccgcccaccagagaatgagatggttttagcatcctgtgtgcttttcacagctgaaatgctggcaattttgccacagattcagatctactcggactcactggtttcctttggtaaaatgccccatatccagaagggaagtctgctggcttctctgacctgggcgtgtctttaggatttctcaataggatgacatctgtggctggttgtccaacactcatggctcccttctggaagcggtgcactttgttcttaccctgagttaccccgaaaaggagaccctgagaaggactgcatgcaaatggtttgggggcacaggaattgcagggaacactttgagagagcagggaagtgagacagggaacaaatggaagccagtaaagggtgaattaatgaggccaccatgggggacatggattcagtgtcttgggaaataccttgagaaatactgtgcagcatatctccttactgtccctgtgtaaggaacctgggatatttattaactaacttttattccttagtattgagggtcaatcttggggtgttaactttctggtatttccagcttgggtgtacaccaccaggaacagggaatgccctcagacagaaagatgcaggcaatctttgaagtatacaggaaatgtctgcaagtgatcttcaggataggctgcagggaaatggtcagagcacagacagggtctgctataccttagaagaaagagagaagacatggagagaagtggggtccttggcaatagtcctgatctactggatcaagccttacttgaagcctacctctagacttgtcattacctgcccctatatattccatatgctatttaaactggtttgagttttctgttattcacaatgtaatgatttctaactcagtcttttcctaacctggttcctacaattgagcagattccctgtggtttcaaaatcaggaaacagggctgatgggtaagtcatgtcatcatttccttcctgaaaccagagtgcaacggaaagaaaaggaggagttgcatgggatggtggccaagttctcattgtgacccagggaccattacagtaaaaggaacctgcctagggaacttgctcagctctctctaaacacagtcagctccatgttcccaactgaatgtcacgtcaatgcgtcgatgttaattccggtaaactgaatccacccgagaatcttgttgtggaagcaaaatcggcttaaaaggcttctttgatgcacagggaattctcacaagcaataaattaaaaataatcaacgagttattttatataatctgtatataatataaagtaattgtgtccataaataacgaggcagttaaacaggaaaagaaaggatttttacctgacgttcacatcgcttcacaaggtttagtggattcagaaggacatctggactccaggaaaatttaagcgtagcattttgagacttccctaaggcccccttctctagtacgcaatcgcggattcaccagcttgagtcagttggcctcagttttgcttttggaggtttaagtcgggtggtgggaagagatacatttccattcctgatatggccacaagagggagctcccaatggtcggctgcacctgaaagtcctgtccgtgaaaactgacaaagaaaacttgatttaaaaggcgtcttctgataaacctcagcatctccttactaacatactaagagcaatcactgaacacttttcgtatgttcaatgcgtcctcgcgggatctgagaagcattgtcctattaaatctcagtcgtctgattttcagcatcaatttatcttgggagctgctcctgcattttataaggtgaattctacagcaacgagattaaagattcagaaagtgagtaaagttaacactgagcccttgggcctggtaaattgacaacggagccagaataagtatttaccattgtaaagctctgatcctcatggcacagttgtttctgaagaatgctaccagcacttccctgccctgcatttgtctggctttttccattcatatttgaatcgattctctctctctctctctctttttttttaattattattatcattttccagggactttgggtcattataagattgcaggtaatgacagactgtaattaagcctaaaacagatttttcttttaggagacagaagaatccactctagctgagactccagattgcctgggctgtaatttacggtgctatcacaaaggggtcctttttccgcatggtgctctgcggtgatgagccagaagctgaagctgaggggtgtgtgactctcccgcacactctctggagtgagcagaatggacgcttaaatggctaagtatagcttgaaactgattacaggccagatcccactattgtgcatcatcagttgtcattgttgagactgaaattgcactgggatgtttctctttgtcaccggctccaagctcatttctaggacaggagtgaaaccgtatggtgagcctcgggcccaagcacagggagaattgttcttctggtgtgtcccccaaggaagagcttggcaggtctttggcagtggaagatgggctggcttcagtcatgatacctataacattggtattgctagggcttccagatttatggatagtaaactctaatctctagcaaagaaggttgaaattgtagctcttcctcagttgctgtgtgaacttaagcaagcagcttaacttctctggccttagttttcttatctgtacaacagaactaattatagttactctctgatatggtttggctgtgtccccactcaaatctcatcttgaactgtagctcctatgattcccacgtgttgtgcgagggacctggtgggagataattgaatcaggggagcaggtctttcgtgtgctgttctcatgatagcggacaggtctcacaagatctgatggttttataaaggggagtttcccaacacaagttctcttgtctgctgccatataagacgtgcctttcacctcccaccatgattgtgaggcctctccagccacatggaattgtgagtccattaaacctctttttttgtaaattgcccagtcttgggtacgtctttatcagcagtgtaaaaatggactaatacactctcctattctcaaggtagatttgcagagcaatgaaatgagatatatgaagaccccaagatatatatatatatatatatatatagatagatagatagatagatagatattcacacacacacacatacactcaggcactgtacacacacatgcacaaacataataggcatagaagatatagaaactacccatatgcccatatgtattattatgggtatgtgtgtgtgtgtgtgtgtgtgtgtgtgtgtgtgtgtgtgtgtggtttcttggtaaaagcactggggtaagactatggagcgttcatatgctaggagatgaagtctggacctgactgcatagtaacgataataataataatcttgcattcagggcttattgtg

SEQ ID NO: 316745 - DNA, 4001 bp, Homo sapiens
ggtttgaagccacaaaaaagcagttttgactgtaccgggacactgtgccgtgtgcctctgctgaggattctactagagaagatgagcctcattcacccagaagaccactgtaaaatgtggcagtgtctacaactggtgaagatcttcaaggttttgtgtaggttctaaatttttaaaagtaaatttggaaaaaaaggataaagacaaacatttaaaaaacaagaccgggaaaactgcaaggggactgatggtgaatatttaaatactcaattatagagttgagaaaaacaaaggtgaggtaatggcactgaatagcgatataaatattatgtgcatgacaaaggagaataaatgtaactaaaaacggaaggaagagggagaaaagtggaaagtaaaagaccattgacttaaaatggaatagacagcagtcaaaggacaccacttaaaactgagaaaaagtaaaaggtcaagtaagaaaaagcaggtttaaaagtgcactataaaaagcataagtacaaaagtaaccactagagtaaaaatacaaaccttcttaaatgacaaagaattttaaatggaaacataaagaagaaacaccaaataaagaaactctagcaaatataacacattcagtaattacacccacaagataatagaatgatgtgaaaaaaataccacagaatttagaccaaacagtcatgttgattaatgtaagaggacttaacttgcctattggaagaaaaggattttcaaattgactttaaaaaaaacaaccctgctatgtacaaaaaagtatgcctaaaaacacacgcagagattcaaaaagactaaaaataaaaggatgaacaaaaattgccaggcaaatgaaaacaacaagaaagcacgggttaaaatcctaataccagactaagttgtcttcaagccagagagcattaactaaaacaaattgcagtgcacttgaagttaaaagccacattgcacaataaagatatgtaccatataacacagcaatcacttggataaagcataaatccacagaagatacggtaagaactgcaaacgcagtaataatgggaggctttaacggacaattagtatgagacaggccaagtggacaaaaaataagtagagatataaaagatttagaagaactaatcactaaggtagaccttttggctatatattaaacactatactttgataacagacaatatactttcctctccaagggcacatgaaacattcacaaaaatcagtcatattctagggcacaaatcagtaggttccataaagtaggtttccataaagtagaaatgttacaaacaacaccttctggtcacagtataataaagctaaaaattaaaatcaaaatctccaaattaaaaaggtctttctacctggaaattaaaaggccttctattaaacaactcttgtgtgataagggaaacacaagctgaaattaaataatttctgaaaaataataatgaaaatagtacatatcaatctgtgacatacattaaaatagtaaaaagatgaaaattcccagccctggacacctacatcaataaaaatgaaataataaaagtaaattcattaagtgtctaacacaaaaacatagaaaaatgggtgaactaaaagaaagcacaagtaggaaataataaatgcaaaagcagaaattaagatagaaaaaagaaaaacaatgagtcaaattcatgaatcaaaatcttcattctctaaaaaacaaaacaaaatagatgtgggtgaggaccactaaagtgatgggaagaggaagatcatgtaacacgctgcttatcatttttacattaattcatgattgtaagcataaagtctctaaaaatttaaaaaaaccctgagcttaacagtttttattaaacggaattcatttttatttcactcacattttcttccttttgattactgagatgccacctgtcaaaactacaattaacgatagaacatatctaccttaatatgcttcgtgctatcgttttttaggaagtaagtagtaggtagggagatattccataaagaattataacaaatagaatgttagtcaagattgctaggcaatttaaatgttctaaatagaagagactgctacttgaggaaaaaaaaaccttgcctattgaaagaaaaggattttcaaattggcttataaaaaacgactctatgctgtgtacaagaaggatgccttctcatttaaacgagtttcattgtgaatgtttgttgtataactttactgatacactaacatgatacattttgggattcttcaggataatgaatgacactaagaaagttcaaattgctgagtaatgttatcatgaattagagatcaatcagaagcataaaggaatgagtaggacagatatagaaccacaaccaaatactggcaaatcatatagtaattcactatcaaagactttagtattaagcaggaaacagaatctaagatcaaggtaagcagaattgaaaataggagttagagagtagagaaaagaagaaagaggaaggtttggctttagaatattctgatgtggaaaccacacttgtctacttcgacgtaagatgatgaatgcttgcgttattcatcataactcactatgaatgcttgtgttattcataacaggctgttggaaagcagcagtccttcaaaggggaatttttttcttagaaaattagtagtttacagaagacagcataggtttattcacttaaacaagagttgtttttttaaatttttaattaaaaaattttattattattattttttactgctccttgtgcagcagggctaccccataagcagtgtgcccagagtagtcaggagtttcacttctttatatacatatatgtatatatatatatatttttttattatactttaagttctagggtacatgtgcacaacgtgcaggtttgttacatatgtacacatgtgctatgttggtgagctgcacccattaacttgtcatttacattaggtatatctcctaatgctatccctccccgctccccccaccccacaacaggccctggtgtgtgatgttccccttcctgtgttcatgtgttctcattgttcaattcccacctatgagtgagaacatgcggtgtttggttttttgtccttgtgatagtttgctgagaatgatggtttccagcttcatccacgtccctacaaagggcatgaactcatcattttttatggctgcacagtattccatggcgtatatgtgccacattttcttaatccagtctatcattgttggacatttgggttggttccaagtctttgctattgtgaatagtgccgcaataaaaacacgtgttcatgtgtctttatagccgcatgatttataatcctttgcatatatacccagtaatgggatggctgggtcaaatggtatttctagatctagatctctgaggaattgccacattgtcttccacaatggctgaactagtttacagtcccaccaacagtgtaaaagtgttcctatttctccacatcctctccagcacctgttgtttcctgactttttaatgatcgccattctaactggtgtgagatggtatctcattgtggttttgatttgcatttctgacggccagtgatgatgagcattttttcacgtgtcttttggctgcataaatgtcttcttttgagaagtgtctgttcatatcctttgcccactttttgatggggtttcaacaagaattttaaaacaactgtttatttgtaaagaggatgcttagtatctctgttgccaatgctggtagttattttgtgtgtgtattttagagtaatgaaaatctgcatttaaataatatttgtaattcattttcactattttagactgaccatatatcctgaatttggtcaagtcatcagtgtttctctacttttgtgacactataggaattgaaatatttttcctattttcaggcataaagcttatgaaatgattaaagatttctagaaa

SEQ ID NO: 316746 - DNA, 4001 bp, Homo sapiens
agacttttgacagtttttcatgagaagtcagttacattaaatcaccctttgtttgcttttctggacctatttttgctcaatcccagataaaactcctaacccaggtttgggctcagcactgatttggaagctaaaacgttttgagataaatacaaaatagagtcccgtcccaaatgacacaggcctttttaatagcaacgaaggtaaaataaagcaggacagcacgtcctgaggatgaagtgttttgcagactcttctcatcgatctggtcaagaagggagaaaggctttggcctccctgatcttctgcctcacgcctctgcaggacaaagtgaggctagcgtggtggcgcttcagggattccaggcgccggtgaagcagttcggtcttgtccaccttttcttccaagtcccgaagaagtgagtccttgcctagaaggccgcacttctgattcagtctgatgttgtccgtccgcagcccctctcgggcttgcttcgtcttggtcaggatgtctcttcctagggcggcctgggcctcgatttctgccagctgtgtctttttgcacgcgttctccatgtccatgaagtgcagcttttccttcacgtgggttattacttgcacactgttggtcaccttgctgcgaagttttaaaagttcctcatttcgttcctcaattttctcattgaaggtttggttctcaatcttcagctgttcaaagtcaataagaagcagaccctgggtcaggtcctcctgggtcctcatcctggtttcaaaatgcaccaggctctgcttcagctgaatgttctccagccgcacggcgctcatctccttctcctttttatcctccaacgcctggatctgctccacctctcgcagagcagcctggcgcccgcccctcatccgacagctgcccatggcctgcatcaccacctgcttcttgagtgcctggaagcgtcgccactccttctccaccctggtgagcttctcctggcactgccgcttcaactggcccagctcctggtggtaccactgcaggtcgtctgcctgctgcttcttcagctcctccagcatgcccagatggcgcaggtacgcttgctctttctcgggggcctcggcctctgcgccccggtcagccacctcagcggcctccaggcccttctttctgcgcagcgcctcgaagatcttgtgctgcaggtataggttgtagcgctgggagcggttccgctccaccagcagggaacggtactggtccaggaggtcgctgcgcagctgctgctcctgcagcttctggacctcctcggaccactcgaggtcctcaaactcgtcccttccatagaggcgcttcccctcttcctggcttttggccgggcgtccttccccatccctctccttgctctccgcgccgtctctctgcgtctcctccttgtcctcttcctccccctccacccgctctgtctcggcctccggggctgcagcagcctcttcctcatcgatcctggtcagcggcagagaggcctggaacctgacttccttcccctctgccgcctgctccagttcctccgcccccgcctccgcctctagttcctcgggcccggctccgggctccggctgggcgggctcctcagccccaacctcggccggctcttcgggctcgggctggggctcggccggcctccccggctctccaggcccctcctcgcccgcagcctcggctgccgttagccctttcggggcctcggcctgctcgtccgcggcggtgcctccctgcgaagccgcttgctcctcctcctcctcctccggctccgactccagctccccgggttcgggagaggtcggagggccagagctggccttgatcttggacggccgcgcggccaggctttccccgtctccgccttccccgccggggtccttagtgtgctcagagctgacgtccatctcctcccggctcggccagcgcagcggaccccggcaggacgctgttaggtttcccggggcaacagaaggcgcgcgcgctgggcccggcgattggccaggcgacaggccgtcgtccagcgccttctccccgctgcccggcgagagcaagccaatgggaggccgcgagctgacgataggcgagattgattggaagcggccgtgggctctcgccgcgaggggcgtggcgcccccgccgggctttctgcctgcccatttcccaccgccgggcctggggcggggcgttcaggaggctctgggaaaggcggcggtggccggcgcggggggcgcgcaggcgcagagcggcgggccgggcgtccgcaaggtggcgcccgcggggcgcctgcgcgatgcggcggggcgacagctgcggcggcggtggcggccgggccgggccggacggcgcctgcgtactgaggggggacgcggcccggctggctggctctggcggcggctgggctggggccgcggtggcggcagccgcggcggcgggcggcggttgctcgtgcgcggcggcggcggcgggtcccgcgggcggcggggcgctgacggccgggggcgcggcggctgcggcgggccgggcggcgggcggcgagcgggggaagatggcggagctggggaagaagtactgcgtgtactgcctggccgaggtgagcccgctgcgcttccgctgcaccgagtgccaggacatcgagctgtgccccgagtgcttctcggccggcgccgagatcggccaccaccgccgctaccacggctaccagctggtggacggcgggcgcttcacgctctgggggcccgaggccgagggcggctggaccagtcgcgaggagcagctgctgctggacgccatcgagcagttcggcttcggaaactgggtgagcggcgcgacgggggccgggtcccggctagggcactggaaggcccgcgcctctcctgtaatcgggcgcgcaggcagcgctggacctgctcgctcgctccgcaccccagaaggccccggaggtggggagggcgacgctgccggtttatagtcgggcacctgtcggaacctatgctctgagaggctgtgacgcgcccaaggtcacacagccgagacggggccgagtggggctttgaacgctggcttctgacagcagagccatttccctcaccttcagggacgccttcacaggcgtttgcggagtgcagacgttgggcaagactcggtgccttacctgagttcgtggagacaggcaggcccacagactcgacagaaagcggtgggagcaccagggaaggagagcggtgggcgccctgcggcttgtctcggggtctctggggcggccccgtttgctttctgtcactgtatgcatgtgccctgtgtggtccgcagtgcacagagtcttttgtgggtagcgtgcctggtttatgcttgggtccccacaacccacgaccttgtgcgaatggtcagtaaagaatgaacaaagaggcctggcctgggaggcctggggcttgggttttgctctctttacctttgaggtttctgtagagacagccctgtgtggggagcggtgagagctggactggatccacttacgctagcaacatcgtgtgctaggttctgtccttgagagaggaacatggttctctctgggcggtctctcagctctccttccactctggaagcttgcatccgtattagaaaggagaaaatctctagccgtattcccgctcataaccaccaaagacatgtggccatccccgggcaccctgaggaggaggggagtgagacacccccagcgcccttagctttccagagtcttcccctgctacaccaggtgcctgcttctcggaacagcatccatctcgctgccacctctccagcagtcctgcctgggctgctttgattgccttttgctttcctttcctgagtgagtctcagggccgcctcacatactcattctgaagccctggaatgttgattctcctcccaactccttagagaagatgctcctttacaaacccttacctaatggccaccagcactgggat

SEQ ID NO: 316747 - DNA, 4001 bp, Homo sapiens
tttacttcatagagtggttgggagataaggtaagatcatggaaggcaaagcacttagtaccacatggggtgcataaaagcgctaaaaaaatttagctcttatgattttcattatcatcatttttgtttggcataggcaaagagctatatatctcagccaatcagggtcagcttagcgaccccatagcccccaggagcaaattcaactcctcatctaggggcagagacctctctctctctctctttctgccagagatggccccagctttggggagaacaggctgggaagtgaatcctgagaagagaatctgaaactgcgatagaactggttttcaaatagcccctgttccctaagaaaacaaaagaaacaactgcaaagaaccctcctccatcatcctcaccctccctagaagccaggactcaagttgtgtatagatcaggacacagtcaacagcttccagaaagggatagagcagcttaaagtcacttctgacttcaaacagaagcaagcaagtccctcttcccttcaaatagaagcaagcaaaatcaactgcccctgtgttttcctatcaatttatttcactcttagaaactgacctccaacatggatgatggggaccgacttgtggggaacgtataaggatgactgtcaagccagcaccaatgtccgtgcacacagccatgcacagcctgatgttctgtgattcagccctcagcagggctcctttgctgtgattgtcagaggtttgggaaggtctggggctgagtggggtctggggcaagctccagaaagagtcaccagcagcaacttacccatgaagtaggtggtggtcttgcaaacggcgctcccgaagatgaaatccttgagcagattggggatgaggttgaacggcatgcagaagagacagagcatgaggtcgctgacagccagggagaggaggaagatgttggtgaccgtccgcatccgcttgttccgaatcagcacggtgatgaccagcgtgtttcccagcacgctgagcaggaatatcaaggagtacaagagaatctgcaccgctggctgccactctgcagagagaaacaggagcaagacggagggatggaggtgatgacagcagaatgctaaaaccgaagccaagggtgaattcctgccgattttccccccaccggggtgtacatcactggacccacgattcctgtcctggcaacattttgcggaaacaaattgaggaaagcagagactgaattattttctttttagaaggttggtttgttaaaggatcactcagggaaccactttttcttaagaacaaagctcctcaagtgaacagtgatcactttctttcctggctgctaagcattatttcactttaatcacttcatgctgggtttccccccaagaaaagaaaacagctgcatggtgacaacaccttttctgctgtgcttgtaagttcaggctttgacacttgtagtccctcttgcttcactcagcttttcctcccctgcttttgttcccccaagtcctattcatgaatgcccaactcccccatgggggacaataagaatatttgactctattctgctttttaatctcttctccaaacttctgaacatatgactttatctagccttgtctcacaatgacttggttatatatattttttatcagccttgcctttgctgatttctcccacaactcaatagtttcctgaattaaaataacagcttccgacacttacctttggaaggacggggctgatccaagcagaaaagcgtctcattttcgagcccgagttcacagggaggagtgatgttgcttccattcacaagaaggctgtcaaccacatccatccttgcctgctgctttccaccaagtgctggagagctggtgaattgctcactcccggctcattcctctaatgaccgaagcgtctcgcagatgcaacctgccgtggaggagcagggagggagtgatttccaggtgtgggctttttcagccattcctaaaggcgacttgagttcacctcactcactccagcatttgtactcctgttgtggaaaaggcagtgagcacaagccaagcccgctccaccttcaccccgccccacctcccccggccctttcctgggccagtcttagggccctgagtacagacagcctggctacccgttaaccattctcagcgtgtggctgctttttacacacatgtgtacatatgcacggacacacacacacacacagaggcttccccagtactcctctatataggaacccgtcaccatcccagacatatgcagaagaaagcccaaaccggctgtgtgagacaggaacaattaacacggtaacagatccgataatgcagaccatcaggcctaaagaacacggagggactgtgttctacctccttatagaaaagcaattagtgcctttttagctttggaaccatgcccggtggtgtgtgtgtggacagaactgctggctggttgttaagttgctactaaacacagtgttgtttctcgtggtctctgcccttgttaactaggattgaggcacttttgaacataggtacctgggtccttattacaaaagacgttagtgagatttcctcttcattcatgaagccttgcattcagcacatcttcattgagagtcaatcatttgccaggcacttttctagcatgtcagcaaataatgagcagaattatttcaggtagtaagtactacaaagggagtaaagcagggagatgtgatgtatacaaacagattaggggctgattttttggggggcggggacagggtcttgctctgttccccaggctgcagtggagtggcgcgatcatggctcactgcagccttgctccctggctcaagcaatcctcctaccttagcctcctgagtagctgggactacaggcacacaccactaagcccagctgatttttttagttttagaagagaggaggtctcgctatgttgcccaggctggtctcaagctcctgagctcaagcaatcctcctgccttggcctcccagtgttggcattacaggcgtgagccactgcacctggcctggggctgctgatttagaaggggtagtcaggagaggtctcttaaggaggggactgtgatctgagactgaaccacaagaaggacaaagtcttgtgaagatcccaagacagcttctcccaggcaaaaggaggagcacttttagcagaggtaacagcaagtgcaaaggccctgaggtgggaatgagtgtggccccattgaggtacaaatagatagaagtaggagtgagtgagaggcaaacagcaggacgtgagatcagagaggggggccatctcagggtcctgggtgttccatgaagctctgtggtgctggaaagcccttcaacctccattgcacagattatgtcctcagttcagaccctttggaaagcagacgacaatggctgtgaaacctgcgtttctgacgccctgcttggctgtgctgagacttggtccatttgctagatacccgtggggctccttgtgtactgacaatgcttccactggcagagctgcatgctacatcttgctgagtctctgccagacacagaggaactaacgcatttttactgtcagtgtggggctggaaagacagtggtgcctcttttctttgaaaccatgaagaccacatggtttggggcatttagtcacagaaacaagaaggggaagggacactggagaagctgtggatgttattgggaggacaggctttggcatcagacagacttgggatcaaatcctggcttcactggttacctgctaggaaatactgggcaaattagtttccttccttccttccttccttccttccttccttccttccttccttccttccttccttcctttcctttcctttcttccctcccttcctcctttctttctctctctctttctttcctttcttccctccctccctcctttctttttctctttctttctttctctctttctttctttctttctt

SEQ ID NO: 316748 - DNA, 4001 bp, Homo sapiens
ggaggaaaagtgtcactttctggtatcagatgctaatccagactggttttatagaaacaaaattataaaactggaagagacgttatgtaatcacaatatttaagactgcatcttcaaatagcactaagtgatatataagtgagttaaataaaactgaaatctattctcccaaccaagaacacatttatgggatcagattaaaataagcatttaagatctaattataattagattgatgtgactggcagtgaacctgaaagagcactggataaggatctttttgtatgtcaccaagtcaagtgttagctgtgagatctgagataagtcacatcctttctaagccttgttacattaaacctaactcactatagtcaaaatgactacataagacatcttaaaatgcaaatcattaatatcatctaataattataattaccgtaattccacacagattttccttaaaacttaccaaaactaccatccattggataatcaagagggaccaatggttttctgggtccaggtaaactaatggctgaattaaaagccagggcatcttcacgctctattttttgagattcagctggcttcttctgagcttctttttctgcttcatccacatgaatggtgaacgcaggctgtttactgtttgctttccaaggaggaacggtgacatgctcatcatttacaggaagatccttaaggggtgcaacctaaaaaaaaattaataactggctttgagcctactagtcttgcattctttctcttatgggtgttggcctttgctttttctcccaaatactctatcaggaattaaactttctgggacaaagaagagtttcagtattcaaaagagaagggatgttcccatttgtcacaggcattcccacaaaggctatcaatagataacactaggtggaattatgcaaaacttatcagggccacaagaagggtcgggtgacaggccaatacgtgacaagtttaggaaagacagcaaaaaaattgttggttcaccactgtcgcccgagggtggagcaacagagcaaatccggctaaaatggcggaatttgccaaaagcaaagtattttgtacacgcttttctaaagtagaggtcatctcttaagcgtgaggaggataggggtcagagtcctacagcagtgcctggggtttaaaagtggagagaaaggcgcggagctgagcgaagactacacgttttagagcttggtttgaccccattatgtacaggcagatgccccctatagagagcagaccggcagcatacacacagtgttggcggggtcctgatgctaatatgggagaactcctactgtggcaaaccacacaccagcaccaactgcactccagaccctggcccccttccaaaagcccaggacatgccttctcgccactcttctctgcctgctaagccaatgccaaaccctgctcgacccaccctcctgcagatatcccgcatccctttacccgtctcgtcttcggcctctgctgctgcgctagaccccgcgggttcccggacttcagtaccgccagcgcggcccgggtccgcggttgttggacgggcgctgccttttccgggttgatattctcctggtcctcttggagcgccgtctgctgcaatgctagcagcgccgagcccgcctcgcgggtcgcaggccccggcgcagagttgcccaacatcactgctcccgggagtggacggcgggatcagcctgcggcgccaagcagcgtgcactctgcccagccgaccactcgcaccgacccggccaaagaatagtcgtagccgccggtcgcagcccaggccagcctaccagcccgcccgctcgctcacccagctcgagaccacgcagggccgaggaggttgcgaaaggcgcaggcaggcactgcccagcgtggcgagccaaagacgcccagagatgcagcgagcagcccgccggagcggcggctgttcttgcagttcaagtatcccgcgactattgaaatggaccaatgaaagcgctcgcggccttgacgtcattcaaggcgacagggtcgcaggcgagtgaagggtaaaccaaaggaaactgagcaggggcggggcaggagggagaaacaaactggctggggcgggagaaaacgcctgcgcggggcggggagaggtaggatttagggcccgacgcttccgattattttaagctgagccacctagtgagcgaggctgtccgaaggctgactctaagccttttagggaattaaacggaattaaactttggcgactatcatttgggttgcccagcctttagctctgggacgtctagttagcttaagtgactttttccaaaggtctaaaatctggggcacgtttttcagtatctccgattctccgttttcttatgtgttaatagggactaataactacagtcatatggttgttaggattaaataatgtgcataaattatttaacacggagctcacatagtaatacagtactcaagtgtcaagactgtaatgtcatcttaacatttaggcgtttattcatagtaaccagaaattgtgttttatgctttttatttttcctaatgaagatgcaattaatttaagatggcaccttgaactactgttgatatatataataaatagcagtgcattacaaaatattcaaatacagtcattaatttttttctatttttccccaagctgtggcaaccaacaaaaaacacaatgacgttctagtgacctagatataattatgttcctttcagaagtaaagttttttaaacatagtaaaaacaatatgaccttattaaaataaaactctcttaactatacgtgcctttaacaaatttttatatttatatataaatataagaatatacaaagcttgcacataactaataagtataatagcatatcattaagaagcactgttttctaaaaaattcgtgagtctgcccttcttgaaacataaagcttattttccattatctgtatgccattttaaaacctttcaatattcccttgaaattaataaatatgaattaagattaatgcacaaaacttctgtagccttaatgtcatatatgataaaaagagatctagaagatactagtgtaggaaaatctaagatggcatcactatttctgcactcttcacttgaagcacgctgaatagctccactggttacagcatgtctaattaagatcccccgactctgtgtaagctcttcttatttcctggctacaatttatagcactgagccaagtccagcatttccacaaactgcagcagagtcataaaacactaccaagcaaaaggaatatcagttgcaaatcaatcctatctcctagaaaaaacaattggtaggttatttccactagctggcaacatacatagtaaccaggacacaaagcaagtaccagtacttgggttctggtcccagctttacaaaatattagcatgtcctcttaatcacaaaatttcactgagaatcagttttcttatatgatttgacaaattttacaacagttgtgaagatcaaataaggtaatatataaaaatacattttgaagcctataaagcggtctacatgtttatgtgtttatgtaccttgtaatacatttgaatatattttaattttccacatattacttctcaatttaaaaattaaaacagccacttgccaaaaattcattaaaatcctatttaaatcattctacttgtgttttaaaaataaaaagactcttttagttttagaaagttcaatttgtcaaaagaaatagaagcattactttaaaaagccattatatctcaaatatttttagatataaaaaagcatttgaaattaaagtacatacacagttaacttctaattctcttttaacatttttcatttaaacagaccacttctttgggactttaccttatttgtatgtcatgctgcatcgaagaatgaaatcaatgcattttggtcataactgtccagaatttccaatagaaggggtacttt

SEQ ID NO: 316749 - DNA, 4001 bp, Homo sapiens
agctatacactttatcatctgtaagacgtaaatcactgcttcttaaaaatacgcatcataaaagagcttcagcaattcaatataaggtgaactgttgcaagatttcagagagttatagcaaatataattcaattcccttggaatggagagaaagggttcttttgtttgcttttctaaagtcatttaagattctactataaatatgtatttcacaggcagagggtgtttgcacaaatgaactactcaattcacccggggtctcccatcctgaagctgcaggctggagtatggggggcagcgaggagggtgccacattaaaaacaacaacaaaaaaccccacttctctaaagtatcactctcattcttgctaagaaacaaaagcattaacctgtaataaggtttatcttggtactccagaaagaacaacttttaagaaattttgcaggctttagtcatgattcaacgggggcgggggggttacctcctccaagccccatcagctgcttgagcaagttatcttttctgccaacttacctccggggtagcctcaatcaaactcagccctttttctcgaggttggaatctctcttcttgttccaggtagacgttcaacaacccgagaagttggaccccttcatgacctgccaagtgctctgcccccaaatccttcatctgcagtaaagacaccacacagagaatgtaatctgggggtaagaggggtggggaagcgggagaaagggctgaggccagtacctccagcaagggtcgccccagcacaccccgacaaggagcgggtgaagggaccagtcacgtccgccagagccccagggcaatccccaccacggccagggaggtgtggcagggggaggagccgtggtcaggtccgccggccagcgctgggtaagaccggccagccctggcctcttggcgtttcacaaacaggaaactgtccgcgggcgccggcgtcccctcggtctgccccacctgaagtcgcgccagggagggccttctgcccaggggactgcagtgtggcgagcgactgcagcgggtcccggggatggggtgttgcacaataggggggaggggagggagagtctcgcgactgaacaaagaagcggagggaggagactcccgagccccgcccgcccggggcgcccagctgcagaagcccctctcggagagtcccgcccccagcttttcccgtccgctgctgcagcgccgattccggacttacccgagaggcggatacccccgtcccaggagccctggggtggcgcggcacacccggctacggtccggggagagaagtccagtccagcccgcccgccccgcgcccgtagggacaacacccgtccacccactgatgccggggccccacaactctgcagagccccggggctgtcaattcgagaagcaccacgccagcaagtccccgtgacaacacgagcgggggcggggggcaccgaggcggagactgcccttaacctagtcgcaacctccttccaccccacgagcatctatctgtccatcgcgggcgccagctccccccggggctggggctgagggcagcaccctggtcgctccagcggatgaggagcaggcagcaccgaggcactcgcatggtaccaacctcctcaaagcccacagtccccaccacgaacaaagaaacccacggcggccctgggcgggtccactcaccgtgccggagacgcgcctccacccgcccgcggcctcgcggtccgcacggactgggcgcagcgggggcttccaaacctgtctcgcaggtcggggacccaccgcctcagcggtgcccccggtccggcatccgacccttcctcccaggcaccgccgcctcggcctcacagccccggctccatcccgctccccgcgcgcccaccctccgccgcggcgcaacgccggccgcggaagaccagcccaccgccgcacccccgccgcctcagcggaaacctccccgagccccttgtttttgttaagagtttcgacgcccccaagggggcggggcacgtgactccccgcggagggatcctgcacttcctccacggactttaaaaaagagtcccgcccctaagctgccgtctcgagcctctctcgcggcctccctagctctccttggctttgccgagccagtcctcccgcctggcgctagggcggagagcggaatctgggcgtcgggcttattccgcgattgatctgcgttggggaacgggggaagacagaggggcggaaggagatcgtttctggtctcattacgccttttaaaggtccccgatttgttttgttttcgctgttttgaaaagtccgcccaaagtagccggctctctgattggatgcgggtggggcgatgggcatgctgaggacctgattcaccctcgaatctggattggctaacttatcagtcttggagccctctgattggctttctccgtagcctgagcctctctctgccttggggccttagcaactccagggtctggattgcgcatgcctgggtgtgcagcggagaaggtattcagttacctgccctgcggggctgtgccttctcgcctggctgcctccgcctttcttgggggaatgtcacgctcgcggcgcttctcctaacagctaacctttgtgacagccttttcagccacgggagagttttctacattccttctttattttgtcttggcgttccattttgcaataacccaccaaattattataacattgtcggggcgtttactaaaatattcaataaatgctacaagtttgggtatttgctttaaaattttacagtccaagagaaaaaaaaatggagaagagaggtgaaataagataggcaaaaagttgagggtcgaagctgggtgatgggtactcgaggctgcattacagtattctttctagttctgtgtcttggaatttttccataatttaaaaaaattcaggagggactgaaggaggggcttttcaataaaaacttagcacgctgatgagggtacgtaaacatctaataattacggcgtacctccagaggttgtagtgctgttgttttaatgaagactcccagagcttcttggtccttggtaacccataaattatcatttattgttcattataattagcgttgttattataggcgacacgtctcccaggacgggacaaaaagcaaacaaaccaggtgccttaggccagagacactttcacacggaatatcaatggggcatgtggttgactgccctggaacatttatttgtttactctctccctcctaaattagaaaataccatattcgtgagttctaatctacataatcagatagtccctgggaagagatttctcctttctgttcttctatgtgttttctgtgaattattttgttacttgtgaaatatgggaaggcacacaacatagctttggcagcgctcttctttgcggagcagctaaggaattttaaaactaggtccctttgcatattagctcggactaaacacaggcatctgtttggagcacagagcaactgggggaaggcagcccaaaaagctaacacttatttcagagaggtgtgagcttggtgagggttttggaaaataagataaaattagcacaccagttttaaatgatttacaggctacataattttatccaatgcttgttttatcttttaaacattaagtgataacttttatttgacataatcatcttgctggaaatctatgctgataaacataataggagcatgaaactaacttagagactagagctaagattaaaattacagagatgacagctcattgtacagagcatcaataggctgagtggacagggcccacagacagaaagcagctcgaccaactatccaccatcagagaaatgaagagtttgtgatcaaagcatgaaggagactggggatgtttttttcaagtaagaaggcaaaggtaaaaaaggaacatacgttattttataagtgatgtgaaagaggaaatgcaaatttatgtggtaga

SEQ ID NO: 316750 - DNA, 4001 bp, Homo sapiens
tttgatgaaactgtggaaagccctttttttctagttttttatttttcttactacacccccatttcagccataaagcccattttaaagacgaagaaacatacataggaagatgaatattcatttttaatgtattacacaatcaaaacaaaacacggacacactcagcttccaatcttgaccaacacacatgctaagctccattctaacctactaggatgtcacattaccacataaactacctgtaactgcagatcatttttactgaacttccctaacacatgctgactgtattagtctgcccttcatcggtatcaagaaatttctagtagaggggctcagaatctctcggagattctctggtcccagattagccaatctacatctattccgtccattatttcttaatctatttgtccaatcctttctatttcatctgccacaaatgacctggaaaagctagcagcagataacactgctatttcaacaaactcattttcaggacagagaccacacagcgtagaatcagacttaattctggctactgggttttagccgcgttacctaaggagaaagttaatcttgtggagtctcagttttcctcatctgtaaaatgaggctcctactaccagccttggggggattaagtgaattgcaagccacttaggagaatgcctggcagataataagcctcatcaaatgttgttatttaacgtcattactgtaatgctctgctgctctaagtcgagtggctccccactgacagaataaaacataaacattttagttcaaaccccttcagagtctgaatccatcctacctcccgaaacaccttccactgttttgatacccaattgtcaacttctgccaaaaggatctgtaacggagccccctagctccagcggaggctcctctgtcctcctttcaaattccagttatttaatctagcctttagagcacaactcaaatctcacctcccccggattccccccacccacccgccccaagccctgggtaacgttgccctcccccgaatttcacagcaccggaggttcaccccattcatttggcattcagtctgccgtgcaaagttagtaatcctcctggtgtccccggagaatcgttcaacctgagggtgggggtgtgtccccttctttgtgtattaacacgggctcgtagagcctccaacacgcactatagagtagctaatttgccgctgccacaaaaaaaagttactcgctgacagaaaaactggcccgaaaaggaacacagtagtgccgttttcaagtgggcaggtgacgggtctgtctgggccggagaggacgaagagggcggccccgaggttccccgggctgggggatgcgggagggtgggtctccggcgagcagcgcgcggccaagggcgctgccacgggggcggcgcggggggagcagcggggccccagcgcgtcgacgccggccgcggagacgcgtcgagcccccgcccccgcccccgcccctcaccttctcctcctcttcctcctcctcctcctccccggcagagctgtaggcctcacagtggtgacgcggggtcatccgggggcccgttaccacctcattctcataggcgcgcggaggcggtgcgcgcgggacgactcggccaactgaggagggagaaaggggaagcggatcggggggcgcgggcgcgggcgctggcgctcgagcgggacgcacggctgcggccgctgggtcggtcagcgaattagttccatgatgacccccggcctgaggccgccgccgctcgagcccgggttgggagggggctccctctcgccatagggcggcgggggccggggagaggcggggggtgagaccggctctgcccctgcccggggaaagcgcctccgaggggaaatggtgaaagggggggaggggagaaaagaaaagaaaaaaaaaaaaagaaaggggaaaggggggaaaaataagaaaaagcgagacagaggcgctgccgcgtccgctcgcggggaaggctggggagggaggggaagagaggggaagggaggaagaagtgccggcttcctcggctccgccctcgcggaccgattcctagactcgcccactccttgtaaactacgcggacttggtctttcacccttcctgttcctccccgccgccttcccggtccaacgaaagtacagagaagtgcggccgaaaggagacgggctggggaagtcgttggcactaggatggaaggagggaggacgttttctcgtggctaagaaaagccgaaggtccgtggactcattttccttgaaggagcggaagggttgcttgcagaccgcacggtgacgtcagcgtctctgggcccccactgagggggcgtgcggtggccggagagtgcgctgcgcatgcgcctggggaagaaagaagcggccgagcgctgcgcttgggggaggggatttcacgatccgctcctgtggtccagctttacagcagcttggttttatctagccctactcgtccccaggctcttagaaggattcactgggaaggggctactgatctcttgggtggagatcttgcagatttgttgacctagcaaagtattacgtgttcttaccgttgacatgtaaatagaattgcggtttttctcactgccacattgtgtgggtggagggagattctaaagggttttaggaatcggaaaattagggagaatcaaatcatgggtgcttaaggcctcagtgaaacactgtaaattatactgctgacggcgaggaacctgcttggcaatgtggcaaggggattttatccactcaaccaacacgtctgagtatttccgaataggttttattaccaggtgcttaaagaatgtgtggtgacataaatgggttttatttggggttctgttagtacaaacggtaactttttgctattttgattgttttaattatttaaaaatatgtagtattacagagttttgaaagaggaagagctagatctcaaccatttatagaagtctcgtttgttttttccatttgttttttatatagttattttaactgtcagtgaaaaaatatgtgttgagtttatttagtggccagactcagcaaactggaagtagccaagacagacatagctcctgccttcatggagtttacagtccaaacagaggataaccattgagctaattatcactatgtaaaattaccaagtacatttacttgtttacttgtgcatgtatcccctccctagaatataaggtcgcaggcggcagggatcttgcatgtttcaccctctatccctgtgtataaaaggctctcaatatttgaccaagtaaacaattctggtattaaaaccgttaagatggaaaatcgccggctgctgtggaaacgcttgcctttccgcctggtttgggatatcagagaaggtttttctgaagaagtgacatttaagatgagacttgaaaccactgggcaaagaatgatacaagcagaggaagttatgtgaaaaggctccgaagctgagacgttctaaaaatctctgaaagctagtgtggctggccctcagacaactgaggcaggatgtggaagcagaggacagatgccatagaacagaagaaggaatgggaagccctaggaggatttcaagtgggttgtatcctttttttttctttttttcacttcatgtagcctattattatatggtcttcattcaaaaaagccaccatttttctgcatgttactcttgagactgtagcatttctgcataatactattgagagtgtaacataattccattgttagaccatgaaattgcttctgattttcactccaataagaataatgcaaattccactcctaaatatatacccaagagaaaggaaaatatttgtccatgcaaaaacttttttacaaacgttagcattattcataatagccaaagatgaaacaacctaaatgttcatcagctggcgcctgtataaatcaaatgtgatacatctatgtacaatcaaatttttatttt

SEQ ID NO: 316751 - DNA, 4001 bp, Homo sapiens
caatggtgcgatctcggctcactgcaacactccgcctcccaggttcaagtgattctcctgcctcagcctccagagtagctgggattacaggcgagtgccaccacgcccaagcccattggccaggatggtcacgaactcctgacctcgggtgatctacccgcctccgcctcccacagtgctggattacaggcgtgagccaccgcgcccggcctatttttttaaattttataggccgggggggcggtggctcacgcctgtaatcccagcactttgggaggccaaagcgggaggttcacctgagctagggagttcgaggccagcctgaccaacatggagaaaccccatctctactaaaaatacaaaaatcagcctggcgcggtggcgcatgcctgtaatcccagcttctcgggaggttgaggcaggagaatcgcttgaacccgggaggcagaggttgcggtgagccgagatcgcgccattgcactccagcctgggaaataagagcaaaactccgtctcaaaaaaaaaaaaaaaaaaagttatgtattgcctagttttgaaagaaaaaatttatcaatttttaaagtataattaatttgtatgtaatttgtggccatggtaatgtgtgcccaggcagaaacagaggtagcaaaaaaggaaaactcagggtagttattatgatgtatgaaaacagctcttggtgaaactaaggcctcacttttacaagatcttagatacacaggacaaaaaatgatgttaactataaagagtggaagcctccaaaaaaaaaaaatccaaagaaacgtaaaatggccgagcgcggtggctcacgcctgtgatcccagcactctgggaggctgaggcgggtggatcacgaggtcaggagttcaagaccagcctggccaaaatggtgaaacccccgtctctactaaatatacaaaagttagctaggcgtggtgactggcgcctgtaatcccagctactcgggaggctgaggcaggagaatcgcttgaacccgggagcgggaggttgcggtaagccgatatcgtgccactggactccagcctgggtgacacagtgagactccatctcaaaaaaaaaaaaaaaaaaaaaaaaaaaaaacaacgtaaaacgaatcaatgtgttattatcacgacttaaaaaaaaaacttaatatctagaccatgaaagctatataagcaaataagcatcatttagatttttttttccataaaaatttccgttaagtcgtgcaataaaaaatgtaaccaacatagtaactcgcggcctcggaagggggaaatttaacggtcaagaacaagaaattctgaaagcatggcctctaagggtcaagcgggaacctgaatacagtctcccagttcttactagctttgatgcaagccccaggcaagtcggggaacagggaaagaggaaaaagggaacgcagaaggttgctccggtaaaggacccactttcaggccagactccacgaccggcagccccgggcttctcattcattccgcgcggtctccaggtggcggccgcgcgttggcggccgtggcgttctccgcccggaactggggtgcactcacctgttcgggaacacgacctcgcggcgcccgaggccgccgaggccgccgccagcagccggggggatgcgggcctgggaacagcagccggcggggacaacgggcggcgcagccctggggcgggcaggcggcgcaggccgggcgcgtccctctgcagcagggccgagcagagccgccgcggactatgaaacatgccgggcgccgccgccaccacggcccctcgcgcgcccgaggagcggagcccggctggggccgagggcaccgagtcgagccgactgtccgggcagtgtgggcggatgctcccaggctccttctcgcgcggcgcaggttctggggaaatcccgggcagcagagccggagagggaggtgcaacaccgctgcgtcggcaccgtctgctgtgagacctggcgagacctgcagggcgcccggcgagcgctgcgcgctgacaaagcgggcgctaccaagcgggagctggaggggaatccgcgggacccggccactgcgcggccacgccaggctccctcgacccggcgtaatcctgttttaaaaggaagcggggcttaggctgatttatagatagaatccgcaggcggtctaaaataagaggtatccgttggagctgttctgaagaaaaaagcgtccccttccgctggccagcatggaagcgcccacaggctgggaatcccgagacagttccagggctgtggcccaggggacacgtgtctgtcagagtggcagacggcctacgtgtgtgcctgcgcgggtctgtgtggatacagcaaaaggcgtccgcctccgaccccctcggcagtgtgtgatgcgttaaacgatattaagcacaataaagcaccgcctgtgggcgaggcgacgatgattaaaacagcgttcttttcctcaaaagtgttatacttaggcaaagggagcagaaggtggcaagggaagtcagaccagaaagctctacaaggtagaatgagattattgccacaagatgccaaagattggctatagagatgacaacaggcccgggctctctagaaggttcattagaaggattggcatttgagttggcctatgacgtggaggtctagaatttacccacgtgaaactttggagggggtggtggtgagttataaatgaaaaaagtaaataagggtgtatttggggaaacaactcttagtcatgtaagatggaagctaaggagtaagaggacagatgcgtggataggttgtagtgtggaaggaaggggattatagtaggcttaattcggtggatagctgcgagccgttgacgttttgtaagctgagcaaagacatggtcagggctgtgctttaattggaaatcacatgtctctggttcatgaaaaggcagaaaggaaatcagctgagataacagatactgtagacccgcaccaggttactgttactggaaaagaaaggatggaagaaacatctcagacaggctgggcaggaaatgatgactaatcaggaatagaaatgggatgagggggagggaaaacccaagactggatttttctctgaatgattcatgagttagaaatgtattctattggttttcccatgattttgctgattcccctgtgttgtggaattgcaagcttttcatcacaagaatattctaaatatttttcagacctaggttacatatctaacacctgtggatagagggtgtggacagatcagctggcacaagttgattacaacttctggcagacaagctccttggaagtcattaaagcctcagtttcagtttccttatctataaaacatagaatcataccttagtcattaggtgaaataaaaaatgataataagctactctgggcacactgtctatcgagtagtcctgctccacaaggagcagtacttgtaaaaagaatttttttaaaaaggtgataataaaattagcctatgaaaagtgttttgcaaatatagcaaaatgttgattttgaatctaggtagtgggtatatatgggtatagggaccatgggaaaaatgttccctttgccctctgaagtttgctgaaaaatcaactcacaaaaggcagattaatgggagaaaaggcatatgcatttattaacatgtacatggggagaatcacagagtgattacacacccccaacggggttcagaagcttgtctaccatcctggccaacagacttggggagaggggagcagaggcattctgttgaggagatgactagggaaagtgaatggatcagggcacagggatgaacttgcacattatcttgtgaaagggtctgttcaggtggttacatttttggtcttacaaggaggggaagaaaaaacaattgttccttttggtgggttcggattgtagccagataaaggaacttcaacttcatcctgtgctttgggagagatggtgctgggcagt

SEQ ID NO: 316752 - DNA, 4001 bp, Homo sapiens
gagacatttcagtttgcaatattaaggatactgtcctactactaaacccagtcacagttctataaaagtacaggttgctacttttaagagaaaacattcattttataagcaccgtgacaggcactgtcccaaggcatctttaagtttcaagttacgtatctggaacatgtacctgttataaagcaaacagaaagagaaaccaagacaaattatattatagcctagattaccagtattttaggtcttcccttaataaccagttttgaaggaaccagtgataactgacccccacctaggtgtcctcttatccgttttccctaaggctgttaataaaaccagctttactttaaacgtgtacacattatttttaatagtccttgaggggcagagaagggaggatgtgtgttacatttcaataggaaggtattcaactgtaaagatttcagaaatgaaagctgttgaaaccaagtaggtattttctgacttgtaagtcctactgactgcctgaaaaggtaagaggggtggagaagaggacataaaaacattaaagggcaaagaatctgtaacttctaagaagtatttttttctacctgtaaaaatatgagttttttttttacttcatttcatattccatgtcccacgagaggaaggggaagcataattgcttctaattctgaggcagggagaggagagagagagagagagaaagagagcagttcaggatacactaaaaggaaaccccaagaaatttcacaactctttgccataaatagcctttcttctcactctggatacctcctcctttacatcagcaaggctcagcctccacgcacgcagaagcaccattcacaaatccctccgtcacccttaccccttgctggcaccgtgtgtacgagtccctgggacacaagccaaaagtcgaaggggccagggggccacatgcggtttcagcttacggctgactttctgctcaggtgaaccaacccactggttagtccagagcgcgcgcgcgcgcgcacacacacacacacacacacacgcacacaacctggggcccttgacgctccaccacaaagcaagtggttcaatctaagtcgctgccgttactgctgcctctgggcagggtcttgcttccaatccaggaaactggcgccagaggacaagcaggcggaggcaagaggtggtcccggccccgcactgcggttcctccgggagcccctggctccccgccccctcctccccttccccctcttcgccgccgtccccgcctcagcacccgcagcccggggcgccagcgctgaccggtcgcctctacctgcgggacgcgagtggcgaggaaggggagcgacccgaagcctgcgccaactctcgccgccttggccagcgctccgcatcgccctggagcggccgccgcggccgcaggcagcaaaccacgcagcagcgtggaggaaatggccacgcggcgcactgggagtcgcgggccggtggtgagcgagcccgcccgcctccttcccaccccgcccgcaaggccaggtctctgcgccgagcacgccgggcctgggcgcgcgctgctcgcaggcggccccgacacggcgcggtcacctgccgagcggtcatccccgcgtccgcctgcggccggccccgcaaagcggcgacgcgacgcgcgacccgctgagcgctgaggcaccaggggcgttactaccttgagggctccgtgcgcttgttaaggctcctcccgggcactcagggatttatgtcttcggggcacgggggtgtccttcctggtccccctcctctgccctccctccccttctcggctgttgggctcctctccactcccagttgcacagagtccagctgcgttatttaataatcctcctgctcctcctgcctgcgccagcggagctgctctgcccgagccaccgcttcccagtcagtcatgttgagacagagagagagagagaggagaggcggattggcagtaggtcggcgactatttgtggtgagggagagaagagcagagcaagaggagggcaggggagggacgtggggaggcgcttccaagtgtgtgagtgcgcggagtgtgactgtgtggggagcgcgagatccacctccccggcaggccgcgctccggggctgtgaggagggcgggcccaagcgcggcctttatacaaggaggagtgtggtgggctgggcggggcggcttggagggcggtgcccggcccactgcgtccgccggattccacgcacgcatcctctggcatcgacgcgcgcacacccactgctggcccgctgctgagttttcattttaggggaagcagtatcccaccgtgctgacctggccttttcccccagtccatcctagtgcttatgtggagttcaagtgcataggcaggtcaagactaaagaataggggaagtctgaagagacgtgaagtgactgcggggatgctggaaataaatgcactgtatttctcctctccaaggttccgatgttatcttttttctcttcctcctgtaagggaaggaattaccagattctttcgccgcttttccttctcacccacacaattcacatcctgacaagtgtcttcattcctcagtaacaagaaaagaaacctagcttctttcctttaagcaggtcacacctcccaggaaccatttgcagcaatcaattctgtaagataatgcaagcactgcgactgtgtccgagagtggaacttgtgttcctacaaggaaggccctacacaatacaggcattacaagagaatcagctcaatttgacatcatttgactgatggtcccctggagaaaatttgccagtttagaaatcgaaaagacttttgatgcatggttctgttgcctacataatttattttcccctgatcctctctccccttgcactgcctcatttcctttcaggtttacactaagtactgaactctttcccatccatccccttctttatctccactccagtatatttatgcctttagcaggcaatacagcaaatgtagtgcatttaattctgtgtgtgtgtgtgtgtgtgtgtgcgcgcgcgcatctgtttttaacccattctggtagaatgtaggaccatttctaggtagaaaatgcatccccaatattaagtttgtacgcctaacatcacctcccttaccttctgcccagattacaagatgttgtgatcaggtgcactgaggtattgagaaaaacttccagaaatcaagtgatctacagttttttcaaggtgtgtttgtgtgtgcgcgtgcgcgtgcgcacgctctgtgtaatctaactggctatgatctaacttctgaaatgtggttatattgggaataaaagcaagatgtattttttaaatgaatctgagtggtcaatgtatattacagcatggggacaactctgcttttgggagacaattataggaaacatttttcataaattagacaaaaggaagataagatttaggaggctacggaggaggcggcaaggttgacaattcagttgtcctatcttcttccatggcttgtgaccatcgtacatctttagggttttgtcatatgctggcaccttatatattctccacatattttaccctttcacattgatgttcctgtctcgtaattcttcaatctctcatacagagtttagcaaacattaaaaatgatttaagcatgtgatcaagacctaacaaagaagtgatattaaggagtgtgataaaaacaaagtgatattggaaaggacagcaagttgggacaggtgcgtgaatatatcaataatataagtatataggccattaaagcttctttgattaagcactggaaaaatgaatggactaacaaagcatattgggattgatagtgtgccctatgggacagctattattatttcctcaattttacagaccaagaaagttaaattttgaaagtgtgtgtagataacctaagatcatacaaagaataaataatgtcaatggaactcaatctgtcttattctact

SEQ ID NO: 316753 - DNA, 4001 bp, Homo sapiens
aacaaaacccatatccatattgagatgtttaaacacagtaccatcactggtttgttttttatgaatcatatactaacacatttttctttcattccaactttaaaattaagaaaacctaatcaaataaaaagaaaaatgcgtgctaaatatacacacatacacacatataggatacacatatacacacacagtatgacaacatctaacatgttatgataactttaaatataaatacatcccaaaattcccgcaaattttttaataaaattacattcctaaaaacaataacatttctcatgaaatttactgaaaaaaaaaattagagtcctagatgcaaattcactccacaaatcaataatttggaaaaccaagaacctcaccttattctaaatgcaaattacttaccatattatttaccaatccccatattctcaattagggaaaataaaacacaaaactctcaattgttattatcccaggtggaatagaaatataaactttcactggcctcaaataagaaaacagattgtttcgcccttaagaaaaataaaatagtccttgatgcagaatatcttcatcaagattttaatacaactttttcttttacccccaccccctgtcccactaaactactggtaaacaatttgttttgtaagcatctggcatagaacttagagctcttttctcctcatatgcttttctcgattaagaaaaaagttcaaacaggcttttgctttcagttaagacaataaagaattcaacaacataagattcttttcctccagttaaaaattctttattttagccaggcgcagtggcttacggctgtcatcccaacattttgcgaggccacagcgggaggactgcttgagctcaagagttcaagagcagcgtgagcaacatctctacaaaaaattaaaaattagccaagcatcgtggcatgcatctgaagtcccagctacttgggggcactaaggtgggaggatgtcttgagcctgggaggtcaaggctgcagtaagccatgatcatgccactgcattccagcctgggagacacaatgagacactctctcaaaaaaaaattacttattttgcatgtttttagtaaatagagctttgtaaatttgaatgctgttttcttattttccaggtttgatagactattgcccttcttctgagttagggttggaagcaaaagtaaaaagtaaaccactcccactaacaaaatcatcttgtcccttggtaagctttttgatatgaggtatatgaattattgacagagcttcaaatatagacctgaatttttgaactctagtatttttttttttacaaaagcacactgaaaccactcttggttaataccaaagctatttacacttgcatagtaattctttaataattatcatgattcaatttttgcacagataactaagtataaatttatatgtttcaggattatgaaatgtgagtgatttctttcaaactaaaatatctaatgtagttaagactaaattatgttcattctagggttcgagtgtttatgttcctgtttccagggctagtggatcattgcatgaaataagagcctatgggaaaagaaatctcagaggaagaagggaaaagaaaaacgaggtgcacatgtttggttcaaggccagttgtcccagatgctagagaagataaaacatacctccaattgtcttctatcccaggcttcatgggcttaagcttgagtcctaaggcaaaggatctacaggtaatgagcaagtgaaatctaaaagcagctgcttgtctatggaatcaccctgggacatggagagcccaaggcatcagcagaattggcactggcagcagcagggcttgcagtgttggcagcagcactaatgacagcagcggtgcagttagtgataacaacatatttggcagcagcaagagttcatttaactccttatacattagctccctgcacctcgagcatacacagccccggtctcgatggtaacagagatggcagacaacagtagaagccgcagcagcagcagtttcttctgtgctaaccagcagcactttcgtctcccagtgactgagagcagagcaaaggaagtaggaaaatagaaaagttgaggaaacataatggtcatgacgggatggaacttacagccagccataactgggttaaaactaaggactgccatttaattatcacacagtttttaaaagtgagttacagtgacactgctcaaatttaacctctctatgcctcaaatttattgtgtataagatggaaataataacagtccccatctaatatgattgtgataatgtttaatgagataatttaaataaataacttagcagagtatctgtcagataatagggactcaataatgatcagcttgaaaaatgtagagggcaactcaaaaactcagtgtgccttgaggcctatttcttcccaccaggtctcacagaatgtatcaatggactccagaagcattttcaaaagaataagaaaggttgggccaggcgcagtcgctcaagcctgtaatcctagcactttgggaggccaaggcgggcggatcatctgaggtcaggaggccaagaccagcctggccaacgtagtgaaacctcatctctactaaaaatacaaaaattagctgggcgtggtggcgggcacctgtaatcccagctatttgggaggctgaggtaggagaattgcttgagctagggagcaaaactttgcagtgagctgagatcatgccatcacactccagcctgggtgacaagagcgagacaccatctcaaaagaaaaaaaaaaaaaagaataagagaggctgaggtacgcagaggcccacccagataaatgttaaatttcagcaattatttttgccctagatccccctgtataaatacaagaggtctggaaatacaaaggctgcctaatattattattttcggatttaaaatttcaaacctcaaaagtatttgttttccattgatatcatataagcacaacattttttaaatgtttatttttaaaagtaaccttaaaacactttattacatctcaagattaagaagtaaatttcagcacattttaatagaaacaacgtatgtaagaaaggcataatttaattgtgtccaataaatgatttttattatttatgttgttatgtgctaattatccaagatctcagtgcatcattcatattgaaacatattaatagaacaaaataaaaaaatacttttcaaatgataataaacagcaccatgatttctactgctttttctataataattttctcttttttttttttttatggccacttcactgcgaaggcttttataccctcaagattggtctaaggttcataaggccagtttgttttgttttttttttttaatttattattattatactttaagttttagggtacatgtgcacaatgtgcaggttagttacatatgtatacatgtgccatgctggtgtgctgcacccactaactcatcatctagcgttaggtatatctccccatgctatccctccccactttccccaccccacaacagtccccagagtgtgatgttccccttcctgtgtccatgtgttctcattgttcaattcccacctatgagtgagaatatgcggtgttgggttttttgttcttgtgatagtttactgagaatgatgatttccaatttcatccgtgtccctacaaaggacatgaactcatcattttttatggctgcatagtattccatggtgtatatgtgccacattttcttaatccagtctatcattgttggacatttgggttggttccaagtctttgctattgtgaataatgccgcaataaacatacgtgtcatgtctctttatagcagcatgatttatagtcctttgggtatatacccagtaatgggatggctgggtcaaatggtatttctagttctagatccctgaggaatcgccacactgacttccacaatggttgaactagcttac

SEQ ID NO: 316754 - DNA, 4001 bp, Homo sapiens
attcaagagattgtgggaaagcatcccctctgatagactgatgatgggagagtaaaatggcacaactattttggagtatatatggaatacctggaatttggaaaaatcaaaacttaaaatatgcataattctcccttttactcagcagtttcatcactagaaatctatcctacagaaatactcccatatgtacacacaatgtatgtatgaagattttcattgcatcatgtttctcccaactaaggtgaaaatttcatgagtgagaacttcgtcattcactcttgtgtcatcagtagctagatcactgtctggaacatagtgggtgctcaacagatacttgttggatgaatgaatgggattgaaaaattggaaacaagctaatttcctgtcaataggaaatggttacatctagtttatgaaatactatgggctgtcaaaagaaatgagatagatctttatgtactcacattgaaagatcttcaagaccagtgttactttttttttttttaatgaggttgctttctaacattaccatttcattttggatttcacttcatactttacaatacagcctggaggaacgcctcaacttctagtttctctctccattaagtatctaattatgtgtaaatagaacaactaacgggacgctgggaagcccaggaggcaaacattttgcaaccggaactgttgagtgtgctcggagaggcgagggaggtctatttgctcgtttcctcggattgcttaaatgcgggattttgctatcccaaagcacagagtgtaaagtagcagctccccctgcctgccttcccggcttcttctgttttacaagcaacgataatttcccggtgaaagcgaggcctgggaatcaaatccaaaaagtggttgttccctttaggagaggttagtagctggaaaggagcatgagaaaactggaaggtcccatagactaatgtgttttttttccaaggtttgtacagattcaccgagttgctgcgccttatcatctaagtaatgtctcggttttagaagttgacattgttttgttaattacttctctggtcacatgcatttcaggccgcgcaaaaagaatcggagtgctgctttatataaatgaataaaactaagttccgtggtttggcccttctacaccctcctcccctaccacaggctttgcaaaccacttaagtgtcctctgtaaccgtccgggggcactttcgggtcagagacagcgggcggaaaccgcagaaaaagttgaaaatgtcagcgacaccctgcatctgcgagttctattccgtccctgaagcggtgaagcgggctgagcgcgccgagggtgggctgcagcccggcgaggggctgggctcagggcaccttgcccagaaggcgggcatcggtgccaagtgttcaccggctacgcagcagagccaccgagcagcgcccccccccgcctcccgcgggcacgctcggtgccaaggccagctgctcctgaaagcggcccgcggagccccgagcccgggactccctactcagcaccacccggcgggctctcggctgacccgccacggaagatgcccggttccgggcgatccgggcggcttccctgcgcgcggggccctgctgtccccgcagtgcccaccggtgcgccttagtcgccaacccacctcatctcaggatgaatttcagtgtacttgacgcatcgcgccaggacggtctcgggaaagcgcttggtggtgcccggaccgctccactgctggcgccacctcgggacgaccaccgcgagcaccacgacgaggatcaggaccaggatactgacgccaagacagagttgggctctcctagagagccggcagcagggtttgtccccggacaccgggctgaactcgcagttggccatagggctccaggcggggttggctgggcgaagatgaggccggcaggaggctaggcagcaagagagaggctggctgggttctgaaactgcacctccccttctgtttcacttgccttttctctgtttcccttcccacccccaaccccttgcctcagagttccgtggctggttacaccaataagagtttaaaagaccaacaactataggctcctgtgcagtgacccacccactccacctccagggagaaacagccaccttaatcctctgcaggtgtcctaagggggcagacagtacatccttatactccctccgctaactcccttcatcaaccgggcactttacacctgagccacatttgcttcctggaaagcatgagggtgggctgcctgcttctatacgtgtgtgcacacaatgccctctgcctggaaaaggatgtcctacctctctttcttaactctgacaaatgcctggtcaaccacctttaaagactcaacttaagtctgactccttctctcaagaggcatcagtggctaagctctgggttcaaatttagttcttgctggatgacatggggcaagttacttaacctctctgtacttcagatgtaaagccgggatagtagcagtacctacttcatgggattgttacgaggattaagtgagttaatatctacaacgtgtttagcacaatacctggcacatggtaatcacccagtaaatgtaagttgttactaccagctctaggagctgctcagagatgcaattttatagtccatggaatgtgtttgaagcagggtctggcacacagtaataatactgcactctatgcgggagtttaataaataataaagtggcttttcttgcctcttctttattaagagaacatctgtgacattcaagcagagacctaagtaatgtgagcgatcaagtcacccaactcccttggggcaaacatttcccaagcagaggaaatggcaggtgcaaagactctgaggcagaaaagctcttggcctgttccagagcagcaaggaggccaattgtagttaggctagagggttgagggaaacagaacagaagttcggaaagtagcaggagaccagatcacccatagctctgtaagacaggatgactttttggactgtgtgttttatttattttttatcttttttattttgttttaagttctgggatacatgtacaggacgtgcagagttgttacataggtaaatgtgtgccatggtggtttgctgcacctatcaatccattgcttaggtattaagcccctcatgttttagctattctttctgatgctctccctccctccactctccccaacaggccccagtgtgtgttgttcccctccctgtgttcattgttcagctcccacttataagtgagaacatgcagtgcttggttttctgttcctgtgttagtttgctgaggataatggcttccagctccatccatgtccctgcaaaggacatgatctcgttcctttttgtggctgcacagtattccctggtgtatatgtaccacattgtctttatccagtctgtcattgatgggcatttgggttgattccatgtcattgctattgtgaatagtgctacaatgaacatatgcatgcatgtatctttataacagaatgatttatattcctttgggtatatacccagtaatgagattgctgggtcaaatggtatttctggttctagatctttgaggaatccccatactgtcttccacaatggttgaactaatttacactcccatcaacagtgtaagtgttcctatttctccacaacctcaccagcatctgttgtttattgactttttaatgatcaccattctgactggcatgagatgatatttcattgtggttttggtttgcatttttctaatgatcaatgatgttgagctttttttcatatgtttgttggctatataaatgtcttcttttgagaaatatctgttcatgtcctttgcccactttttaatggggttgtttatttcttataaattagtttaagttccttgtagattctggatattagacctttgtcagatggatagattttgaaaatgttctcccatgctgtaggttgtctgtt

SEQ ID NO: 316755 - DNA, 4001 bp, Homo sapiens
aaaaaaattatttcagtccaaatacagatagattttaactatctattatttcagtaataatagataaaaaattatttcagtccaaatacagatagattttaacaagaaataattcttgcctgttgtattaattgtatacttacggcaatctaaaatttactcagatcgtgaactgtttttcctatttctctattggaacagtgatgcaaagacaaaacaaatattctctttgttctagcaaactatgctaatccaatgtatacaatacgttttccacacttgacatataatagtttgagattttataatatatatatttttaatgtagctatatgtggagaaccagaagattgatcttgaggggtgggaaatgaaaacaataccaatgaacatcgacttaaattattattttactaccagttttcatagtagattctactacaaactttttacagagcagtgtcccagacactaactttccatgcatttgacattttaccttctattccacttccattaactattttttaataaactgtttgtatttgaaaaaaaaaatctccatataattctatcccttcttaatttttttctcttccattaagagagtatgttttattaagcactaggctttaggtttatcataccaatgacaaaaatagcttgaatctataacctggattattttaaaacattttgtaattgatgtcctcaatatttgaaagcacaaagtgaaccaaaaaaaatgactttaagcatgtctgaggtgttctgaagcatatcccaagctaacattaatgcaagttgactgcttcaagtttattctcccaaccaattgcatatctggacacaccacattgaacacacctgctttttcaagtgacactgtccacaaatactttaaaagtatcacagcctacaaagcctcctgtttcctgaaacagttactcataaactataacttctcatgccttctactcttgaacggaaaggtaatacaaacgaaaaagaaacctggccaatgggcaaggtgttatttctggatggttctaaaagcaacaattttgataaaaatatttggagaatgctaattttttattttgtttaagacagattaaagggccgggagcggtggctcacgcctgtaatcccaacactttgggaggccgaggcgggcggatcacctgaggttgcgagttcgagaccagcctaaccaacatggagaaaccctgtctctactaaaaatacaaacttagccgggcgtggtggtgatgcctgtaatcccagctacttgggaggctgaggcaggataatcgcttgaacccaggaggcagaggttgcggtgagccgagaccatgccattgcactccagcctgggcaacaagagtgaaactccgtctcaaaaaaaaaaaaaaaaaaaaaaaaaaaaaaaaaaaaaaaagattgaaatcttttatagatcaaagaacgagataatagaagctttaaaacgtactatacttaccgtttcttcaatccgttcgcatagaaagacccaaaggttttcaacttggaaacaaatttgaggtgaaatgcatatggttcgcaggtccaaaagatgctgcctagcaaactagcaattccagcgctgttgtgatttcttctgcggacgcagtcacgagtccagggcgaagcaggcagggaggcaggtgggcctcggtccgccgcaagctcacacttaggaggaccacgggccgcatgctgtcgtcgtcaaggcaacgacctcactctgtccccaaccataggcacaaagtcttgggagacagatacggcccaggtcagaatgcgttcacggcaggcaccaacacctgtgaaggccaagggctagagagcaattagctgggtgagaggcaccacctcccagctcgtaaggcgcccagtacctggagcctgggaacctgcaccgctccaactacccctgggcgaaggcgttggccgcggagctgcaagggggggcggtttctcacccgccccgagagcgccaggcctcccttcttctgattggccgagccgagtcgtcacgagccatgattggctcagggccaaccaccccgccccttcacctagggctcggcccaggttctgctccctgacacgcagaggccctgcgtccccacacgccttggttctcgtcaggaggcgcctttctgccttccccagcgggaggaggcgattgtgatgcccacgcgaagggtaaaggtggcggttatgtaggactgcgaagactatgcaaaatgcgatacggtttccctcatagcatcgccgctggggcaggggcgggcgccgggcgccctgagtcgcgtaggcgcggcctgaccgggattccatgcttcctttctgttctgggcggtggggccagtgtgagccaggtaggagataacggtgacagtttaggaggtgatgattagtaggcgaggcaaggtggaagaaggtaggtgatgacagacctgacgttaggagggaccttgggaaggccagtctggccattgaaagtgagggaaaacactgagatggaggaaggggaagagagggcatgagtggaatgggaaagcgctgggatggctggggatctggaggacacgcacaacacccgcgtatggcagccaaatggggtggagttagggcttgcgataaaacttgccttaaatgcaaaaatgcagctcaatccacgactgagcaagactggtaggtcagaatcatgcacaggcttaaatcacacaggaacagagcttaccccattttcaaagaatctgaggcagcgaggaggccataaggccagtaaaataacactttcaatcatgataactaaatgttcatgatcattttggtctcgaaactactttgatttagggaatagagtgtcctggatagacaaatgtctaccatataccctagtcaatattaaggtattaatcattaatgttaaggtattgattccttcttgtacattaagaaatagacattctttttatagtcttttgtgagtttggttagtttgcattaatctcccagtggttaattaccttggtcagactgcttaaaatctagttcctgaacctgtaatattgagaaccagacctgaggcctagttatggaaagaatagaattatttggtcaattcaagatgtgactcttagtgtagcaattagctctgtccttagctgtgtccaagttgcgagaagccctgtcccatttggtacctctataggctataagagaatctgatgaacttcttttatatgggggtagattcagttttgttgggcctgaagcttaagaacaagagcgcaaaactattttacttttgcaactttataatcatattcaaccgtataacattttaaggccccttcatgcaagaggcctagaagcttcaataatctatttatatctcacagggaaccaaaggataaagactgaaaatactggatttggcgaacaagtgatgctttaggaaacaatttcagccagatgcggtggctcatgcctgtaatcctagcactttgggaggccaaggcgggcagatcacctgaggtcaggagtttgataccagccaggccaacatggtgaaaccctgtctctactaacaatacaaaaattagctgggcatggttgtgaacgcctgtactcccagctacttgggagactgaaaaaaagaaaacaaacaaaccaaaaaaaaacaatttcagtaagaactgagtttgaaagccagttgtagaggacagaggttattaaagacttacacattctggccatctacaggattgttaatagagaaggtattatgtagaaacaggattgtgttactattttttctttcttttcttctgaggcggagtctcactctgttgcccaggctggagtgcagcagcacgatcttggctcactgcaacctctgcttcctgggttcaagcgattctcctgtctcagcctcccaggtagctgggattacaggaccccac

SEQ ID NO: 316756 - DNA, 4001 bp, Homo sapiens
cacttgaagctgtctctgaactaggtttggaagacaatagtggcaattctacctctgagcttcctgaggagcccaacaagggcacctcgatctctgagctgctttgagaagctgaggctgaagagccttccaaagcactctttttaggtgatccactttgttgtctagaatcagtggattgggtcatgtgactattcacactggatttcagcaaggaaacaaatgatgcagaaccgtgtttatctggagcttctgcttcagaagctttcccagatcctgccgttgttacctgagaggaaacgctgctgctgctttggctggaaacagatcgatctccatcacttgtagagctattctgactggagatgccagagctccgagctgagttcccactctctgatttgatggccgaccctatacacgttgaactgttttcctgctgagctgatgcacgttctgtcttggcagaggtttttgcgtgatcttgctcaactgcagaactgttttttccttctataactcgttttttggatggctcttctaccccttctaaaaagaagaaaaacatagatatgtgactaagaatacctcgtacaaaacgggtgatgagacaaatacacattaaaataaaggcacaaagtgaaaacatttcaagactaatcgtttctttaaaaagtgtggagtcattaatttcttaaaacagtgttgaataacatcatgaatgtctaatattaaaaaaataacagcatcagacaacagtggacacttcaaaatctaaagcagtcaaagcaaactatcaaattcaaagcctaaagacacagatatatactttaggtttaacattccaactttattacttattaataacataaaaattctggcttgttaaaaaaattagtaacaataattcctaattatatcaaacttatgctctaaactcctatgtatgttcacatctatgatctgctaaccattgctactcgatatccctcttttcttcaccttggcaaccagttcatctcttgttgtataggttggagcatctgtcactttgatgccttcagccatactaagtattttatccataactttttgagggtatctgaaaaagaaggaaaagtcatttttaaaaagtgttttttctaaggtcctacttgtgcaaaaaacaggccacagggactgcatttcctggctgcaatcaagaaagtgaaccaaccgccaagaactgtttcctggaaccccataaacaagtgccccagggtctgggaggcagggcacctcctcactaatcttaaatctcgcacccgtccccaagagcgttgttccctaacacaagcaaccctaccagcagctgcgcccacaccaccgggcacacagacgtccgggaatcatgtcggctcctcgcagggacgcccttctcccccttagagggcagccgggccggcggattcccgcgcttcacaacttcccctccccgccgaggccggtcccgcggagggcgccgggccccggtctgcaggtggcacacaaaacgaggcgtgctggttagggacgctgcctcactcaccggcacccgaggaagacgtggttcgcccaggccatggaaaaggagatgagctgctgcagctgccggtttcgggtcccgctctcggcgtcggcagcttcatccgtgctagcggaggcagcgccgccagcgggggccaggtccccggcgttgcgaagcaaaaaatcccggcggtggcgccagtgtttgtcagtctcgccgtcgcagcgcagcgcctccacccaggctgccacccgcgggttctggctcaggtactccgacacctcctgcgccatgttgggcctgcaggccgcgaacacagctgcaccgggagacaggcaggactagcggggcgagcggccctgtcactgcggcctgcacccgcggccctccagataacgcccctccgcaggcctaaagaccaaacaacagcgcccagagccgccgaaccgcccacttccgcccaccgccggcttcttcccttttataacctcgccgccgccgcgcgccctcgcgttcttccggcgcgagccggcgctcccaagacgctttgcggcgccggggccgctgcgacgctgcgtccccgtgaggccacggagggcaccccgggggtgaggtgggcgggcgtcgggcgtctcccgccccacgagggcggactgcaagtcgagctggcctgggacgaccgagtctcggcggaaccccgggcgttctgtcctcgctttgtgacgccgcgcgctcctgccgtcctcctcccccgccgggtcagctgcggcgccgggagcagaggcgagaggggcagggcccgggcaagggaggcagccgggcgcggcggccaaagtccgctaggggggcgtcccgggggaccttgagccgcccgcagccgcggggcctgtggtctccgccctgagacgcctgtgtgtgagcggggccaaaacaaacaaaagccggcctccatgttagagtgttgggagctgcgtctcgcgctgctttcagtgtgcccgagcgaagcgttccgaggccgtcggggtctccgcgccttcaggagggcgggagtgccagtccccttacatagcagcagtagacagtaaggtcacacgaggacctggctccgtgttgccgtgaggcttgcagccttcgaagctggccctggccccgcagcggtagggcttgttcccgcagtttattaggtctctagttaatccaggcattgccttcctgttctggtcagtaggaaaacaacaccccgacaacgctctgtctctagaatttcctaaaatcaacagctttaccaccaaccggcagatgtccggaggtggagtggaaatgtacctatttatctatagggccccaaacctctctccctgttagagctgttttttccttctatatatttttttccactttacatttcccacagttacgtactctaactgctggctggcttattgttacgtttcccattccaggtatacatgcactgtaagataaatacgttaaatgatataaattatgaaatttttctttcaataaatgtagactttgatgtaaaaatgcatgaatcagaataagcaagcaaaaaaaggtcactttaggtaagatcagataaggttaactgtgtaatttatgtgcatgctggaacaaaatacagctattgtatgaaaacaatattgcccattttcctgccataccaaaagaaactacataaaaacggaggcacaaagaaattttgaagctttgtgattttgcttctagtttgctgttctttcctccttttcacagataattgctgaaaatctagagggggtggacggattgcagaaatctggctatttaaaaggtggagaaattacgatttctcctttcatgaattctttggcaaggggaccatggcaagtaaaagaagctatgatcgcatacctagattatatatgtgcattttaaatcaagaatgttctcacggccaggtgcagtggctcacgcctgtaatcccagcaccttgggaggccgaggcggacgaatcatgaggtcaggagttcgagaccagcctggccaatgtagtgaaaccccatctctactaaaaatacaaaagttagccaagtgtggtggcacgtgcctgtagtcccagctactctgtaggccgaggcgggagaatcgcttgaactcaggaggcagaggttgcagtgagccgagaccaagccattgcactccagcctgggtgacagagtgagacttcatctcaaaaaataataataataatgttctcactttttttcttgttgccctgtagtcttcttcccactcatgggcttcattgccttgaaaggagaacaagtagagcctgaatttcaaacaatttttttaattataataaaagcgatagagtctgaaagatggagtacttgtgcaaaaaccaggtgcttggaataaaagatacatgcatttttcttttttgattctt

SEQ ID NO: 316757 - DNA, 4001 bp, Homo sapiens
ggcagttttcacaaagactattctcagcccactgttcctagttttgtaacttcaaccttcagtagctggaaattgttatattttgggtaattccttgacacttatgttttattacagactcattttattctacttactatcaagggtaaggggaaaagtgtcactacattgattccattgattctaaagttttagtactaagaatcacgtttacgtttatttcgtgatatcatgtgatatgttcctattagggctttgtaatttgggttacatcaaactcatcaacatcaactttcaggtggaatcctccccaaatcagaactgccagccagtctcagcaaccacataaaccagaagaaaaggaatcaggaaacttagattctagtttcaagagccacgaacttgaccttgggcaatccacctcacttctgtaattcaaactgcaatgcctgcttccaaagtatgcttctagaaacagtttacgtgttttgggtttctcaaataaaatggaattttctaaacagacggtttgatacaacaatctattctctggtccaatttcccaaaccatccagtccataagatcataaaactgcatttcttcacaagttcttacttgcaccactatattaccaaacacgcccgaattccttttctagctttaaacagatagtaatatcgcatctacttattcttaaatgtgaaagaagagtaatctatagaaaaggaagtgaaaagtcttcatgaattaacgtcgggttatatgaaatctactggtagacagaagaattgcactgtctgtcgtgtactcaaaagaagctggaagattactattatgtcacgtgcatgatactctaaaacctccaaaatctatcatactgaaaaaggatggagaaaatgtaagtgcatatggggcagcgcgagaagccaagcctcccgcgtcaggatccgatgaaatgatacagccgacggtggcacgtctctagtccttactaactttgttccctctactgaaaagagaggtgaggtggcagctactaactgcactgcagcccctaggaggacaggttccctcctgattccagcgtcggccccagatcctgaagaagggaccggaagaggatgaagctaaactgtaagccgggttgagtggcccatttctcccgggcagcggccgcggtcatcctgggaacctcaccgccactgggatcccgggtcccgaccccctctggagaaggaggaagcagtgccaggcagggaggaaggtgcaccggcagcgtgcagcctcacctgacgctggacgggccccacccttgctctcaagtgtcccgcttccaaccaggacccagccagggcgcggcgtccgcctctctcggctccacttactttgtcgctggtgctctcggtttcgtggtcgccgccggccgcctctccctcgcggtgtggcggcgacaccgcttccctggggccggggcagcttccccggtgcctcagctccaacatcttccgctcccgcgctgccgtggcggcctcctcaagcaccccgaaacctgagctgcaagcagggttctgcaggcggggcgccccgccacctcgcagccgcgccctggagtcccgcggagccgcagccactaacgcggccccaccatagagcggccgccgcgccggtcacctccaaaacggcatcaacgagagagcgctcgaggccgcctgcagcgagcgcggctccggcggaggtcccgggcaggctccgggcgccaggcgcgagcagagaaggcggagacgcggcctccggttgccaggtgcgcgtctccacgcagaggcccaggtaggaggaggagaaggggcggggagaaaaggaggacgcttgacccgctttagcgcggctctgggctcccgccgccgcgcaggcccctcccgccccgccccccggagccggactcggagccggcttgtcccggccccgcacacttctccctgcccgggcctcccgcaccaggtctcgcgccgcaggccccgcccctctgcgctgcactgcggttcccacagccccgcctccccgtgaggtgacgtcaggagcccggcccgcgaccccgcccccgcctctgcgtgctggcaggtgggggcctgagaaaaggtgggagcggtggggcgggaggaggctgaggagctgggaggcggaggcggggccagcgcgggctggaagtgagcgttgagaacttgcaggctagtccctgggccgctgcgagggctggaggagctactcaaagacgcccgctaaatgttaacagcgctcaacactgctgcttcaaacgcctccccggccttgtcagcttgacacgcgcggcgggtcggaggctcactggaccagaaacttgtctggcaggacggactggttggccccgcggcattccagcccagtgtcatcaccttgaaaacaggagatgcttttgcctcactgggcgtccagaggtgcgtcggccaacaattccgatcacaaccgcagcgccgtctcccagaaactcagtactgaatctcacaaaggtcaccacctaggatcccaacacagtgtgagatgctatgggacgccgttgccctccagctagtctctgagcagtggtggaccttgggctgccaaagcgggaacaggaagggcacaagatctgcattaattctagtcttaatcctgttagaaggtgattagttttcttgacatgtatccgccacccggtcattactgacaagctaacaaatgaaaaaaagagagaaacaaagagaaaaaagaaaaaaggcgggccttcacacaggacaaggttcaggagagcacccttatagaaatagatcaactatgtaaattcctcaaggtctttactgacacggtaaaagtaagtaaagtgttgaaaatttactaacaaatgagcaaaaccaaaagtcaaattaggatgcattgaaaagcagaacacaaagacatcattttacctcaccaaacagatctttgaagctgtgcggttagtttgggttgcacgttttcaaaaggatgtcgagaaaccataatttgttccttatggggtggataactgaaatgacagagaagatttgaaaataagtccctactgaacagagaactatggggtgactacattaataaattgtccaattgtttggaggatcggaaatgaaggagtgcttgatagtgaagaagataatcagaataatggctgaagccagtagtagggtttccatctctggctactaccctaccctgcataaaggattagaagtgctccattctaactctctggaagtcaagaagcctgagttctagtgctgccaatgccactaattgcatggccttggtaagttattaaccctcagtgtcctcagctgtaaacggatagtaaggatggcctctgtggtcccttttagctcttagacgatcagaatccagcctttgctttcccccatggtccaagaaaaggagacctactacacaaggtacctgaacaacttcctgtttcccctttgcctagtcctctcatggcctctttgactttttccctttgctgcaggaggaaaaaagagagtgagaggagtgacagaggggaacaacagaggacagtagtgcgtgatagaagaaacagtattccccaacccaggaaaagtgggaccaatgcaaagactgccaaaatagaatgtgaggttctacttacctcaccttccttaagctctgctccttcttgtgttttagctaagagagcaatttctttcaatcttcttcattatagctattaccactagttgagtgaatagactgagtccagacagcagaaactggcttattcatctttacaggtctagctctttccacagtgccaaaaaccacccttctataggtaacaatgtttgctgaagaggtgaatgaagaaatgatgggatggcaaaggtatagcacaacaagggaaatttatacagtcatatgttgtttaacagtggggatacat

SEQ ID NO: 316758 - DNA, 4001 bp, Homo sapiens
aattgtttcacaaatgtacatatacattttcccaacagaaatctaagcttcttgtaaacaaaagaacatacttctgtgccccattggacctactaaaatcacagctcaataaacatgacgttattcataataacatcttcacttttaaaaacatgcttttcatcctattactagtaaatatttaactagaaaatttactttttacaggttttacaactaaaagaagaaccaaaacaacccaaacaagcactcaacaaatgcacgacagcatgtactatttttctttttgccccactgaataagctacatctttctaattttaccatttgattcattctacaaaatgcttttcccatggcagtcacttagtcagaactgagactccctcttcctggttccactattttatcaggtgaatttcttttttcacagccacaaagtcattgcactgcttgcattaacattcccgttagtataagatgactacccttaatcagtgggcacagaaatcattatattagtcagaggtgatagtttttcctttcttcatttaaaaatctattaacgatgagaataaaaataatcttaaaagcttaagtacgtaaatcacctggaaggtcgacaaaatcttcttctgtagccatttttgagatgatcctgaaagaaaagtaaatcatcaatttggtttctttaagatagagtcgagtaaaatttattttcaaagtaacttcatccagtatgggcatgctatacaccaaacatctcctaagggctcaaaacaattttgaggttatgttatgacataacataggttatgacaggcatttaaaaactgaactgcaggcatctggtaagctttattccgcttctctccccacagtgagaatggctttattgctttcttctgattatatataatgtaaacaatatatgtgctcatagtaaaaagtatagattatattattctttcatacaactctttatgtttatatgtataacgtcacataatgggagatcatcgaagctgaagattttcttagaaggggagataaattagaaaagaaatgatacggatttttatatagtaaccataaccaaagtatgaaatatagaatagtgaacaccaaagaagtccagaaatatgtaaacaaaatgagttgtcgcccccattagtcattcacagcttgtaccttttaactgatagctgtctttcagaagagtttgtcaataacatatgctccataaatcagcctcaagaactgcataaaaggccaccattttgacagaagaactgaaaacgtcaaattatttcgagacgtacttgttacataatctgtttctcccaactaccaagtgtgacgcaaagacacacttttaaggcgtttcaatacttctaccatggggagaaaagttatttggaggcctaggaactggagctagactaaaaagcagaagccaagatcgcgccactgcactccagcctgggggacagagcaagaccccgtctcaaaaacaaaaacaaaaaaaaacccagcagaaatcacaagcacctctcaagagtaagacgtaggcacagacgaaatgacgacatgaaaacttaagaaataataaaagtacagtaaattaactctggttatcgacacacgatcacacttgatttcaaaaattcctgcggctttcccactgaaatccctcagagatcacagcctcagcctagcatttccttctccccagcctcgggcgcccgtgccccagccagccgctcaaccactcgcctggagcggggggcctgcacttaccagaccggacgcagccatgttccggccccgctgagccagcgcaactgtctgaggtggaagcccacacggaccacagctccaggaagccgagcaagaaacgaatcgccggaataccaggccgcggccaagcaataaccttaagtctcaggcgactgccgcgagagctgcgatccggaaggcgcgcgctaacaacactcccccgccattggctccgccctcaacaaacaagaacgcttggcctgtgcctgggtttgaacccggagacacatgcgcaaaacgggccgcgccgtccaataggaagcaagccgttagtgggctcgccccttcatgctccaggccaacggccctccagcctgcagacccacccgcccgccctacctctagccgctctgctcttcccacctcccttcctcagcgccgcgcccgggacaggcgcgagactgggcttttattaggaaggcacgatcctgggaaccgctccttgtgcccaatgtaaaacttctcaacagttctattaaggaataataagtaatacttggaaggatgagaggtagaaattgcagacgactttttttttaatagaatctttttttgaagagatttttctaatgcagattcgtcagccacgcccagcccatctaaccatcatctctgaaaataattgaataattatgtataataatggtgatgatggcttgtattctttttcaagtatgtgggcgatatttttatgatgcattgccaacaaatgacccacgtaaatatctatcatttaagtatgatgcactgaaaagaattctatacagaatcctgaaacctgccagccattgactagctatgttatggagggcaaaattgcggcaccattctgggtgtttccatagtgatagaatggaagtctaaattagacgctctgaagacttctcacctgaccagtgtatgattctatgaagctgtatcttattttattatttaatttaaaattacaagaaaattctaatcagaaaatagtttactaattgaataaatacattaatcaggagttgagctaatagatttttaaaacatgtagtgctttaacaaatgctgtcaactatgaaggccaatttttttattttatttatttttttgatagaaaaaaaggaactatgatctctgactgaaattaggcctggattgcactccattccattaattctgccattatgggcaactaagttatctgttccttaattctcttgtctgcaaaatgagaatactattaaagtggttgagatgttgtaattgaataattcctgttaagatctaagcacaatgtttggaacatagtaagaattcaataataaagctattggaatcattatggagagttttttactatgtttggcagttttgccaatcagtccaacttataatttggtgctgtcacatttggaatagataatgataaacactaacatttattgactgcatactctatgcccagttctgaaatgctttgcatgcattgaagagaacaattaatattcctgttttataaacaagggcactgaaacacagagagctaagtgtcttacccaagatcacatcaccactaaatggtaggatgggttattatcccaagaattctcactccacaactgagctcttaatcactacactctttgcctctgggtaagaaattttagcaagcacgattatagatgtaaagtcccacatgtaaaattatatcctcctgcttccactggaaactaagtcccacacttattttgagaaatttggaatgcaatggcttgtgctgctgcagaaagcaggccacagagggcgttgaggattaactgttctaaagaaaatagagcagtactcttataaaaacagttgtggagactccacagtttccagagaaacgttttacttccatatgtacttgttgtagtacttaatagcccaccatggttttagtatcctaaaataggattgctaattaatggggggagtaatatttatttaaaaacccaagtttgtcgttataaatctccccccaaaatacatcaaagattacttcttatgaactgctaggacaatcttgaagttttctttcacaactacttacctagttaaggggtgtgtgtgcatgtgtgtatttacatatcagtatatggaagtattaacatatacataattagatgtgtatatgggaac

SEQ ID NO: 316759 - DNA, 4001 bp, Homo sapiens
ctgaaaatacccttccctaaggtaaaatgagttcattttcacacacaaaaaatacactacaagtcaacttttctatgttctttcaagaggcaataaggtatagtgtttgcacatgggggtctggaatctacctagatgcaaattagataactgtgattataactgttttaaatgccaattggttaccttacttaaatacatgatggataaacaattttgtttccagtgaagcagtttatagaaggcttagtctaatctttagtgacaaatctaatattattgataagccttttgtacttttaatagcaaaaggataacaaggtaacttttgatgctattataagcttaccaaaattgaaggatttacttccatcaacttgataaatgacattattgtcagttttccagtaaacttgggcagtttctccaagtgattcttctctaaaagaataaaaacaccgcattttaaccagtcataaaagtcatgtcataggaggaataattgaaaagatttcacctgctaaagaatattttgaaagatagtaacataagagaatgacagaaagtccatctttgaggattcaactcttaaatggagcttcagtgaccttctgccgcctcaaaagtgttttcttgtgaaggctttcattctcaccctctcccccagtactggtaaacaaagggatggattcaaaatgcaactctgattatgtctgtcttgcttaaaattcttaaaaccttttggaaacttatgaaatcctcagcagggcacgagtcctagatcatgtcatttctctcttccattttcctctgaattcctagatacatcctaagctctacctgaaggtcttccccaaatgacagatgtaacctctctgtgcctggaatactctgacttccctttccattaagtaacatagggattatttcactcatgaaaagcgtcaagacttttctgacaccagttcaccccacgggaagctttcgtctctgatgggctaataactcctctagcaaacattctctacctgcccatcataacacttgtcaaaaggtatcctaatggtttctttatgtagccgtttaaggcattagataatgagctcctcaaaaataggaaattcctgatcttggtatttgcatttattaaaccccgtgttcaataaaaatttctcacacacacaaagtgttagcatttcgggtcgagggccagaagctagtgaagcaaaccgatttcatttattcctcttcctgctttttctccctagcacttattacctacatatcaccacttaacatcctacattttcaactttactttctgtctcgtcccattagaatggaagagccactgggcaatgacgggagtgtctgtgttgtacaaagtcactaaaaaaaaattgataaatatttgtagaatgatcttgagtgacgattgaatgtaatgtgacaagacagactagcccttgtcttcagagggtctggagacagcagttaggtgtaaaatgactaactgtgatgagggccaggaaggcacggtcccatacgacttctctaggcggggaatggggcagggaggagcagatgccgcaaggcagagcagcacagaagggaaggtctgtatgtcagcgagactgagttaaatttaagtgaatctcgcagctggaaagtatcttctagatctccgatcctcccctgtcactttacagaccctgaaacgatggccagcagccgagtcactagacagcagagccgggaagcagcggctcctggaaacatcgtaggcctcgcccctccggctcagggcggcgccgcaggcccagcgggcaccgggccgtggtgtggcccccctacctgctgttcagcggccgcactcgcacgcagacggccacggctccttcctccgccatcctatcaggctgaactggtcccaggaaaatggccaggaccctccgcggccggcacttcagggctcacaggccgccccgcctttaaatttaaaatttcccaaacgccgcatctgattgagccgtggcctcgtgacgtcatgggccattccacgtgcggagcagcgcgggggacgcaaggcgggcggcgtgaccactgctaaacaggagaggggatttaaagggcccagcagagagtcggaggagagggccgaagggaggggctcccaggagtgggcagagagtggtggtcctggaataccagaatactattatctgccaaaagctagcgaacgtcatcctccaccccatccttaaaaagtttggaacctgtagacgaaactaggtagagatacatgtatttttcactacccaaacagaattgccgtcttttaaagaaactgcaccaacagtttaaaataaactttcaacagcaagagttgaaattcgctgtccagtccagaaacgtgacaagcctgttgtgcgccttagaaaatctgagtttaggcttttctcctgtttctctctctctgtaactcgtttccattagctgtggcttcctcagaggttgaattagggaaaataaataccgaggactgaaaaactcattgagtaatgggttgatactttttttttcttcttttttttggaaacggagtctcgctctgtcaccccaggctggagtgcagtggtgcttatctctgctcattgcagcctccacctcctgcattcaagtgattctcctgcctcagcctccccagtagctgggattacaaggtgcccgccaccacgcccaggtaatttttgtatttttagtagagacggggcttcgccatgttggcaaggctggtctcaaagtcctgacctcaggtgatccacttgcctcggtctccaaaagtgctgggattaaaggcgtgagccaccgctcctggcctggtttgttacttttattaactaagagggaaagctattctaaatacagtgattttttcccaaaaataatgcttattttccctttcttctctctctctcttttttttttttttttttttttaaataaacatgagttcttgctttgtcacctaggctagagtgcagtaggctgaacacagctcactgcaggctcaactcctggcctcagcccaagtggggttcccaccttaacctcctgagtagcttggattacaggcacatcacaagcccagataatttttaaatttttttgtagagacggggtggtggggggattagggtagggagtggggtctcacagtgttgcctaggcaggtcttgaactcctaggctcaagcaatcctccttgccttggcctcccaaagtgctgggattacaagcatgagccatcgtgcctggcctagctttttatgtgtactttagaaagctatccaagatgtttcatttattaagagaaattcaaggtgcacggttatgtacacagaatatgtctggatatacatacataatttttggaaagatacacagaatatgcctaatttccttgcagagtgaggactgagttagatggtagactgagttagatgaaagtagtttctttcaatttaaagaaactagtttatagataagaacagtaaagaaaaatgagtctattcattcaagatttgttttggttaactagctgtgaggtagtataaacaactcttttttattgctagactgtaaagatacttggttgtatctagtaagaaaatacagagttaaggaaggtatattttaactgttgtttttgttttaattgtgggcaaatatgagacagctgaaggcaaggaacctatgaagaagaagggagatgtgattaatcaaaatttctaatgagacaagaggagattggttcacgagtaaagagaagtcatcagcctttcatagttgtgcttatgatcgttgctatgactgtctttttttatcatcacagcaggtgacatttattgaagatttactatatgccaggctctctattatatgctctctatccaattttttcatctgactttccaaattgttcatcaagaaatattcatt

SEQ ID NO: 316760 - DNA, 4001 bp, Homo sapiens
ataaaatgaagcattgcactggatatactatgttcacaagccttttgttttatgtgtggatgtgtgcacacgtgtactaagtgtgatgtaaaacatcattactgtgaatcacagttaaaaaaaaaaagttagaaaactgttcagagcggtggttcccagacttgagtgtcatcaaaattctcaagagggcttgttgaacaggttgcttggcaccaccccaggagtgtctgattcagtccctctggggtgaggtctgggattctgcatttctaacaagttcacgatttatttatttaattcatgaaacctaaggaagcaggtaagacaagtattggttttatggcaattttatagatgatgattccgggattcagaaaatttaagtgacttatcaagggtcacatagccaggtaacagaaacccagctacacactagaccacataaacttcttaacctaaactctttgagctgtcttgtcctttcttgggggggaaaaaaagtcaaggttcctccttgccttacgctggagtcaaggtggggcttctgagagacagaaacctctgtgacaacccacaggtaaaatttctgggccaggcgcggtggctcatgcctgtaatctcagcgctttgggaaccccaggagggcggatcacgaggtgaggaaatcaagaccatcctggccaacatggtgaaaccccgtctttactaaaaatacaaaaattagctggacgtgggggcgagcgcctgtaatcccagctcctctggagtctgaggcaggaaaatcgcttgaacctgggaggcggagattgcgccactgcactccagcctgggccacagagtgagactccgtctcaaaaaaaaaaaaaaaaaaaaattctgttgtatgtgcgtaagtgtgttttgggaggaggcatgaacagatttcatgagtctcaaacccaaaaatgttaaaagataaaaataaaaaaagacaacaaaaaccactagcctttcagataaactcttttcagctgacattgaaggctgacattctcttctaatccttttttgcactgggggagtcttcattctcctccactggccacagaagtctggtctcggtttccccacccacctgcggtgtcctgctccagcttttccaccctaaccccgcatctaccagcacctcctcctccaggcagccttcccaggcccgggggaactcctgttctcttcagatcgtcttggcgtatggctttgtgcaccgtctgcagcaagccgagacccttcccgccagatccaggccgggccttggatggccattcgccaacgaatcagcgaccagcattctagagcgcgttttgcaaccgaccaaacgctcgctttctttggtaaacaaaaaccgctcgagccatcctggagaaccgcaagcggcagctcggtcccccagccggatttatgctccagtttacggtctgtggtttgcagtaagaaaacaccagggtcttcaaaataagaaaactgattcccagtcagagaataaaactccactaacaaagtctggcaaaccgcaggcaatacgtatttgctgaatattttgctttcaagctagcactttgagactcactactttggacggcactccccctccccacaaaacgacacgacactggctgacgtctctcccacccgccaggcagtgttaggccccgacaggcccgtgcaggtgggatcactgttatccccactagactgaggaggaagccggggacccgggcgattggccactcgggcgacctccacagtggagcaccaacagcgccgggaggcgcaaaccacggcaggcgaggaagcagttcaagctggtctccggccccgcgctcccgagggtcggcagtacttacccctcagacctgtgaggccgcggccgccgccgcccccgcggggccatggtgccgctctccgctctcgagcgactggaagctcccgccaagcccctcgccgctccgaacagccaatccgggccgagcacgcgcgcgtgcgcaggacttcctgagcggcccccgggctcctccctggcctggagcgtgagggaaaactgggtctggttattacagcgcaacggagctggagtccatgccgcacaaccagttacctacggtccaaaacatgccaaagttttccgggctttcgcgcccacccgcatcgccagttttccggcgccagaaagcccgggagccacgtgggacggccccttgtggggtggggaaaggggaggagctagtgtccctgagtcgtgggcaggtaagagggtgggtggagacccgtgttcgcagctgttgtcgctgaggccgcagtcgtctttccaggcctacaggatttggcttccagcccctgctgcctttatcagctgtctgagcttagcatgttactttaccgctatcccaataccttcatttgtaaatggacagggttccttttgttcttttattttgtttgtgtttaaaaatgtgtaatgcagaagaatgtaattgaacccttaccttacaccgcgtataaaaattaacgcaaaatgaatcaaagacctaactataaaggctaaaattaaaactcttagaagaaaacagagcaaaaacttcataacattggacttggtatgatttcttggatatgataccaaaagcagtttgggatgatgaaaacgttctggaaatagtggtggatggatgcacaaggtgaaggtacttaatgccacaatactgtaaagttaaaaacggttaaaatgctaaattttgttatgtatattttactacgacaaaaatattacgtttcatgcatatgaaagaatataacgtgtaatgtaaagataaaaacaaacatccgtgtaaccagcactacatggggatatggatcatttttatatataactcttgggtacccctctgaatggtatcctcctcctccaaagaataaccactcttctgattttatgtgtatcattcctgtggttttctaccttgatatagccccaaataatgtattgattattgtatgtttctaaactttatatgatatttggtaggtatgctgcaagtgccctttcttactaaagctattgcttttattttttatttattttatttttccataaattattggggtgcaggtgctatttggttacatgagtaagttctttttttttttttttttttttttttgagttggagttttgctctgtcgaccaggctggagtgcagtggcctgattttggctcactgcaagctctgcctcccgggttcatgccattctcctgcctcaacctccgaagtagctgggactacaggggcccgccaccacgcccggctaatttttttgtatttttagtagagacggggtttcaccgtgttagtcaggaaggtctcgatctcctgacctcgtgatctgcccacctcagcctcccaaagtgctgggatgacaggcgtgagccacggcgcccggcctatttatattttttattttaatttcttttttttttttcaagatggagtcttgctctgtcacccaggctggagtgcaatggcacaatcttggtgggggggactatcttttctggaattttaggatccctcctcagacaagcaggcctaacaaaagctattcctgaaggtatgctatgaggagcctcagaaattgtatccttcctattcatgtaagtgaagataaaaggtgtcactcttccagccttggacatcccttccctccctcagggtatggccctccacttcatttttggggcataacatctttataggacagggataaagtcccaatactaacaggagaatgcttaggacccttaacagtttttcgagaatgtgttggtaagggccactaaatccgaccttccttggtcctccatgtggtctgggaggaaaactagtgtttctgctgctgcgtcggtgagtgcaactattccgatcagcagggtccagggaccattgtgggttcttgggcagggggac

SEQ ID NO: 316761 - DNA, 4001 bp, Homo sapiens
taaactctatgcatttcatcatgtaaatttcacttcaattaaaaaaaaagacacacataagtacctctgttcaagtttttatctttgtctttttaaatatttatgaatatattcctatcaatctgccctaaaatggagttatccaaagagcatttcttttttttttttattttaattgttaccttttttagagacagggtcttgctatgtggcccaggctggtctccaactcctgagctcaaggtattctcccacctctacctcccaaagtgctaggtttacaggtgtgagccaatatgctcagcccaaagatcatttctttagaaactctgctcttttctaacctttgctaactaactgtagtcatggtactcgtatttctaagccaaataaaaattttgttttacatctgttgttcttcacaatatataaaaaatgcattacatgcatgagcatacatgtaaaagtcgatcctcacagctaccctgtgagggagaaagaccaatgatattatccctacttaaacatgaggaaaggctgcctcaagaaagtaactcttccaaaaccacggggccacaaagtaggtgggcagtcatcagagaccaggtctcctgagtctctccttggtcactcctttctgtatatctttctctttgctcttgttaactttttttgaatggcttcctcatagatttcctaggttctttccacaagagacacctaagtgatgcagggtttttagggaaattcctgcagacatcagaaatacacctgacaaatccaggtgtattactagcagggtgtaaacttacaggcggtgcaccactcaaaacatttcccctctttgctaccaactccagttacccagagataatacctcctcacatcctgctttggaggggagagaatgagaatgaatatgaatcaataaatcatggccagggcctcaatacacaggacggattaaaatcctcccagatagaaacatgttaggccgtccccacccatgaactgttgtctttccccataacccccatccaaatatggtggctatactctaagtttctagcaaagcaacataaaaggttaggtttgggggtcccccatacatatatgtgtagaagtatccatctacttaactctgggggttggcgtctcaaaaccagtacatttaatgctgtatgtatgtgtgcacagggcttaagaagataaacaagaaaccccaaacgacaacaaagaaacccgttagctgtggttatctcagagtcctttcttattgaactcaaagtagtaaaggctggaaagcagtggagaggcttcaaaggagctgggcaaaggttaattaaaggctgtcgtcctacgctttgcgacatttttgttacaaagagcatggatgactgctacactgagaaggcattttaatgtttaaatctatccattggtcaacagcaagcctgtctgcacggcccacacagacgctccttgacgagtcggcccaagctctcctccacccaatctccggtttgcaactttaccgtcgggtgttgacgggaagggggtgtgggagcggggtgggtgggaagagtccccgcgcccctccccgcccggtctgacccggcctggcctcacttcctcccgcggccgcgcggcctcccggcagtgcccgagcccggcccgcgggtaccgcccagaaggcgaaggcgccaccaccgccgcagctggccctctggctcccacatccggactcaccggcagctccagccgccgttgcctccgcctccagccgcattgccctcaggcctcgagtcccccactagctccttccgtccaggcacgggctccggcgctagagcagtttgaaaatggcgcggagggacgatcggggccgacacggaggaggcgccgcggttgccccggtaacgggagcggcggacgattagcggctcgcggcggggacgcgcttggcgacgatggcggagccccagtgcccggaaatgcaacggcccggacagcgcgaggccacggcgccccctggaggtcggcgcccgcggccagcaaatgccaaacctcagctggtgcctgagctggcatcctcttcctcctgtcggcgggaggtgtggatcacctactgcgtgcggggaacaaacgccgccccagtaccggtccctgcagcggagtagccttcacctgcaaggtgaacgcctgctcaccacgtaatccccaaacgcagatatcacgttgtctctgcaactttccctgacaaccacccaatgcaattaattatcccacaatagtatctcccgcaggctctctgtagaaccatagaattcatccatcaaaatacaatcatttgttgatccgtctctctctgccgcccccaaatgtgaattccttgagtcagagactattctactcagcaaaacatttgtgagtggaattaaattgaaataaaccgttatagtccactcacagatggaaaacacatagtaaaatcctagaattccatttctcccctgaaaatttcccagacagtcagagggagtttcattctttcctgtttacttttctcccaaataggccttctgaggcagcagaatagggaaggaagtcagaagactgaccagctcatacctatggaatgcctatcatacatacacttaaaattatggcaagctcacgcaggcgcactaagagagaaaaaacaagaaaacagatatgacaattataggaaatcccctccctagagttaaagaagtgtaggaagtgggtataaaagaacaaaggctatattaatccagggctgacaccacttgaagataagcccgttcctctctctggtatattctttgcttaataaatcttgtggggtggttatttgtgtgtctcatccaattctttgttcataacaccaagaacctggaactcccaacttccaatctggtaacatattttggtgagccagccaggaggtaagcccagaagaactgggactttttattttctttcttttttgcttcagctctttcactttggtttaaagctgccttctgctggcacggattgggcagttaagaacgaaaaaggcactggccgcttgaagactcccattgttgcgggaaagcagaggaccagaaagaccaatgggtggagcaggaggattttattaaggtgtgcactggctccgtggatttgcatccaaaaagctgagccctgaacaaagacagagcttggcttatataggctaaattaaaaaagcagaaccaaggcagtaaatcacacagtgacaggttttgtaatctatagcataactgctgaaatttgcataacttttggctttgcttagctggtggccttgcagctgcgtcaaaagaaaaacaggaacctacaaatctttctaaacataggcaaaaataatcataattaatggtctaaggaaagagaaacagtaaaggaatttgtttttcttaaccattgctcaggggtgtttggagctcattcctggcttcttagactaggtcaccatgaccttcctatagccttgcttgttactatccttagagtgagtaaatgcagtacaaaactttctttaaattcctgcctcaacgtgacaggataacctgattggggaatggaacagatgggtcccacggggtacaagatcaatccctgcaacagtgaggtgcatgtttgtgtggctataattattacattatttgctgcttgtttttttgtttttgtttttgtttttgtttttgtttttgttttgagatggagtcttgctctgtcacccaggctggagtgcagtggcatgatctcggctcactgcaaccttcacctcccgggatcaagcaattctcctgcctcagcctcctgagtagctgggattacaggcacccaccaccatgcccggctaatttttgtatttttagtagagacagagtttcaccatgttggccagggtggtctcgaactcctgacctcaggtgatccgcccacctcgg

SEQ ID NO: 316762 - DNA, 4001 bp, Homo sapiens
attctatgtctttccagacttcctttagtccttccagatgtatattccattttcccagtgcaagtaattctgttttacgtaacactttatgatatcttctcacctttcctttttctgacattttggaaaacatttcagtgtctcttacatgatttctacctctgataatggaatttctgacaacaaagttatgtctctcttcagtaccagtgaataaatattttgaagagtaatacaagcagagctcgtgaacgaggtaagtgataggagacagaaaaataaagggatttaaaattgggattatcacagaataaaattacagctactgctctacattctcacaaagggctttactaagtctactataaaattcaaaagccttaaaaacaagacattaaaagaagccaatctattacttatgtacattttaacaccttactttcattaatgaaaaatacttttaaaaatttaacattttcaacttatagcactgatcaaaggcaaactaaggaaaaaaggagataccactcagcttgcagcatagattcaataataaagaagctctcaatattcctttctagcttccttccttgtctacaagtcagatctgcgcaattgaacttgtgggagaggttgtgaaaatagtgtactctagcagtttaggattttcaacatcgctcaatctcattgctgttagaggtcattaaaacaatgcctcccaatagaatgtcactggaccagagtgatttttgtttagaatgaagcaactacactgactctaataacagtcaatggctaagagtttgtgacatagcacataatgctcgatattatctaaaaacacgtatcaaaaacaaaaaagtaaagatgagaaaaacagtttatgaaactgcaaaagatattagggaaatacttctctaagagataggagaaaggtctgagaaaggcaaagcatcgagaaagctgggcgggagtggggaggagtaagggacaagtaaagagttcaacgggactgctgtgttcacacataaaattaaaaggtctgcagataattcgggaaaaaaacagtctagcatggccataattccagagtaaaagagaataacaacttcaagattaacttgttacagtgagggaaaaatctgtagccttcaataaaggtggagaaatatttgaaaagctggggaaatgccaacaaggaaaacacgaactgctgtcctgtcttccttatagtcaggagccgtttgtatcctcaccccagaggatccaataggaatcagtaagcctataactttccaaccctaagtcacaacctaattctgataggatgagctaccacgatacttcccacttcgttgtgactaaaagcatatactagttgggtatataagcaaggctcccctcccgccatttgatttaaaagaatgaaaaggcggatctggtcattcgtctccgcccggggtctctgtaaggacggcggagagaggcgacctccgcccaataccaggcgcagccttgccgtctcctcggggctcaccaagcagccaccagcaaagaagccggtttcaaaggcccagcacgacagggagaggaaaacggagcatatgcaaccatacacagtcaccagagtccagcctcccgcaaccagtcgctacagccaggcgcctgcgcccagaagcgcttctcgcgccgaccgtttgtatttggaattgtgggttcctgcccgccacgcaccaccgcaagaccttcaaagctgggagcttctctgtgctccaggattcctcgctgccgattccacaccgcgttcaagactcctgtgaagagcgactccgctgagagcctcctcaatggccagtccacttctaacttgcagctgagaagtttttctgatcttgatggtcagagtggctcgtgctacgaagtgagaaacaaggaatctatagcgaatcgtaaacaacagaaataaaaatgcgtctccgttaagagtcggagcctaacgtcacttccggcaacaataggaaacgtcaaaattgggatagtcggcagttctggcccctgcagctggaggtaccctgagttctgagggtcgtagtgctgtttctggtattctcatcgcggtcacctctaccggtgtggacaagtaaagtttgaatcagcttctccatggcctgggcaccagttcccggctgagccattttccttttggctaaaagtccccgcccagaggccaattcgtcgcggcggcggtggagatcgcaggtcgctcaggtacaggagtcaacctagatattttagatctcttgtctcttttccctgttcaccttcacttttctcgaaaataaagacaaccagtgcttgccagttggccgaaactggccgaccagcaagagtttgcgaccaatgacagtgcgaagcatcttgagtgacagtagtggtggctcattaaagtgaggaatcactgtcaggaggcggaactgggtgtgttccttctgtttctaggccattggggtgtagttcggtttaggactccaagtagtaacccagcgtcattgtgaaataaacctgagaaatgacaagggttactttcttcaggtccaagtgttggttttcgggtcgagtgttattttggttcctagacagtttttggttctttaccactttccagtaatatgaatgcaaacacaagtatagttaagatcacgatggattgctagctgctacagtagtcaaacttgggttataaaacttgtcaaacttgtcttttatttgtttctcagcgactgggttctaatctcttacgtagaaggttctcaatatttatttggcaaaatcacataaatggatcccaatcctcagtcatttaatttttttagttttatttttaggttctgtatgaatttactaataaaataattgattctacttgttttacaagtaaaatattcattttcaaggctcctaggtgtatatccacaaatgaatatatcatgatttttattacggtaaagtgaagacaatttatgttttctatttcagctttcctcttccttcttttaatgtttgaagtaatgtatttctgaggtaggagctctacacacttctcaactctacccttcacgaaaatgatatgtgaaacagagtaggtttcagaataaagaatgcataagttttattatttttttcatattgggtcagaaattcatctttagccaattaacctgacaatatgtctgatgaggtacttcattagttgtctattgctgggtaacaaattacccccaaatttaccccagcttaaaacaacaaatattatcagtttctgtacatcaggaattagggtgcagcgtaacttcatttaataataagttacagcaaattaactaatattacttggggcccttggatcaattacttccatccacaaaatattatagtaacttctagataagccaaaacattgatcataatttattacatatggtcactttaatggggaatgttttgtgtgtttactgttgctaggttaaaagatatcttcctcattttacaatataaaaacattgaattaccaaatctttaatcacagtgtgttgaaattagtcattcagatttgtaactttatggtttattatttaaccaactgctaatgtacaactaattttttcctcattttgattcagatttggaaactggcactattccattgactgacccatgataatgcatcaaaatcattaatactaaagtctaagaattatgcatttaatttctgtttctttttcttgaattattttacttaaataattttttaaacaatttaaatgaaatacatctatttctggaaatttatgttcactatttctttttcgttttgctctcattgttttgtttttctgacaaatttcttgacttagctctctaataaactaaaacatttttggctgacttgaataaatttatatcatatttggggcaagtatttttttgagacagatttttat

SEQ ID NO: 316763 - DNA, 4001 bp, Homo sapiens
ctgggggtagatggacacacggaagcctaaaagggatttcccaagataagcctttactttcctgaaaaacatgaagtgaggactactctggctttaaccgcaaaaaatgtattcttggattttgccactggccaatatagtaggtctgagcttctttcgggttccagacccatctatcgtaacacaattcttctagggataccttcttcccagtaactttaatgtaaattctatgtctttccagacttcctttagtccttccagatgtatattccattttcccagtgcaagtaattctgttttacgtaacactttatgatatcttctcacctttcctttttctgacattttggaaaacatttcagtgtctcttacatgatttctacctctgataatggaatttctgacaacaaagttatgtctctcttcagtaccagtgaataaatattttgaagagtaatacaagcagagctcgtgaacgaggtaagtgataggagacagaaaaataaagggatttaaaattgggattatcacagaataaaattacagctactgctctacattctcacaaagggctttactaagtctactataaaattcaaaagccttaaaaacaagacattaaaagaagccaatctattacttatgtacattttaacaccttactttcattaatgaaaaatacttttaaaaatttaacattttcaacttatagcactgatcaaaggcaaactaaggaaaaaaggagataccactcagcttgcagcatagattcaataataaagaagctctcaatattcctttctagcttccttccttgtctacaagtcagatctgcgcaattgaacttgtgggagaggttgtgaaaatagtgtactctagcagtttaggattttcaacatcgctcaatctcattgctgttagaggtcattaaaacaatgcctcccaatagaatgtcactggaccagagtgatttttgtttagaatgaagcaactacactgactctaataacagtcaatggctaagagtttgtgacatagcacataatgctcgatattatctaaaaacacgtatcaaaaacaaaaaagtaaagatgagaaaaacagtttatgaaactgcaaaagatattagggaaatacttctctaagagataggagaaaggtctgagaaaggcaaagcatcgagaaagctgggcgggagtggggaggagtaagggacaagtaaagagttcaacgggactgctgtgttcacacataaaattaaaaggtctgcagataattcgggaaaaaaacagtctagcatggccataattccagagtaaaagagaataacaacttcaagattaacttgttacagtgagggaaaaatctgtagccttcaataaaggtggagaaatatttgaaaagctggggaaatgccaacaaggaaaacacgaactgctgtcctgtcttccttatagtcaggagccgtttgtatcctcaccccagaggatccaataggaatcagtaagcctataactttccaaccctaagtcacaacctaattctgataggatgagctaccacgatacttcccacttcgttgtgactaaaagcatatactagttgggtatataagcaaggctcccctcccgccatttgatttaaaagaatgaaaaggcggatctggtcattcgtctccgcccggggtctctgtaaggacggcggagagaggcgacctccgcccaataccaggcgcagccttgccgtctcctcggggctcaccaagcagccaccagcaaagaagccggtttcaaaggcccagcacgacagggagaggaaaacggagcatatgcaaccatacacagtcaccagagtccagcctcccgcaaccagtcgctacagccaggcgcctgcgcccagaagcgcttctcgcgccgaccgtttgtatttggaattgtgggttcctgcccgccacgcaccaccgcaagaccttcaaagctgggagcttctctgtgctccaggattcctcgctgccgattccacaccgcgttcaagactcctgtgaagagcgactccgctgagagcctcctcaatggccagtccacttctaacttgcagctgagaagtttttctgatcttgatggtcagagtggctcgtgctacgaagtgagaaacaaggaatctatagcgaatcgtaaacaacagaaataaaaatgcgtctccgttaagagtcggagcctaacgtcacttccggcaacaataggaaacgtcaaaattgggatagtcggcagttctggcccctgcagctggaggtaccctgagttctgagggtcgtagtgctgtttctggtattctcatcgcggtcacctctaccggtgtggacaagtaaagtttgaatcagcttctccatggcctgggcaccagttcccggctgagccattttccttttggctaaaagtccccgcccagaggccaattcgtcgcggcggcggtggagatcgcaggtcgctcaggtacaggagtcaacctagatattttagatctcttgtctcttttccctgttcaccttcacttttctcgaaaataaagacaaccagtgcttgccagttggccgaaactggccgaccagcaagagtttgcgaccaatgacagtgcgaagcatcttgagtgacagtagtggtggctcattaaagtgaggaatcactgtcaggaggcggaactgggtgtgttccttctgtttctaggccattggggtgtagttcggtttaggactccaagtagtaacccagcgtcattgtgaaataaacctgagaaatgacaagggttactttcttcaggtccaagtgttggttttcgggtcgagtgttattttggttcctagacagtttttggttctttaccactttccagtaatatgaatgcaaacacaagtatagttaagatcacgatggattgctagctgctacagtagtcaaacttgggttataaaacttgtcaaacttgtcttttatttgtttctcagcgactgggttctaatctcttacgtagaaggttctcaatatttatttggcaaaatcacataaatggatcccaatcctcagtcatttaatttttttagttttatttttaggttctgtatgaatttactaataaaataattgattctacttgttttacaagtaaaatattcattttcaaggctcctaggtgtatatccacaaatgaatatatcatgatttttattacggtaaagtgaagacaatttatgttttctatttcagctttcctcttccttcttttaatgtttgaagtaatgtatttctgaggtaggagctctacacacttctcaactctacccttcacgaaaatgatatgtgaaacagagtaggtttcagaataaagaatgcataagttttattatttttttcatattgggtcagaaattcatctttagccaattaacctgacaatatgtctgatgaggtacttcattagttgtctattgctgggtaacaaattacccccaaatttaccccagcttaaaacaacaaatattatcagtttctgtacatcaggaattagggtgcagcgtaacttcatttaataataagttacagcaaattaactaatattacttggggcccttggatcaattacttccatccacaaaatattatagtaacttctagataagccaaaacattgatcataatttattacatatggtcactttaatggggaatgttttgtgtgtttactgttgctaggttaaaagatatcttcctcattttacaatataaaaacattgaattaccaaatctttaatcacagtgtgttgaaattagtcattcagatttgtaactttatggtttattatttaaccaactgctaatgtacaactaattttttcctcattttgattcagatttggaaactggcactattccattgactgacccatgataatgcatcaaaatcattaatactaaagtctaagaattatgcatttaatttctgtt

SEQ ID NO: 316764 - DNA, 4001 bp, Homo sapiens
ttttgtttttccccccatcccctacacttgtctccttgccagactgggagctcctcgtcacttcctcatctttataaccccagtacccaaaggagaacctgatgaatttagtcattcaaagaatgtttatcccacaaaggagtttggagttaggagatttaagattgagccatgctctttgctacccacgagggtagaaaaatcgccttgtatgtgtgtggctgggcatggaggctcatgtgcggtggctcatgttacagtctcatgcctgtaactttgggaggcccaggcaggcagaccacttgagcccaggagcttgagaccagcctggccaacatggccaaaccccacctctacaaaaaatacaaaaattagccgggcgttgtagctctcgcctgtagtcccagctactccggaggctgaggtgggagaatcgctggaacctgggagctgaggctgcagtgagccgagatcaggccactgcactccagcctaggcaacagagtgagatcctatctcaaaaaacaaacaaacaaaaaaaatcaccgggtttcaacccagtttccttgatagtttcctgccatcttcccccacccctccggaagcacaaaccacaactatgcctttatctgcatttccatgataaggtcatgcagtccccaagagctggaagccagctgcctccctaagtggtcacagttcatgcgccctggtgcatagtccggtgcctgtgagacttttcaggtttaaattttagttaataatatccaacagagttactgtaaagatttcgacactcatgtgacttaatttacaggaaaatttacccaacaatcccatccactgagcaattcttttgataacatttactacgaggtaagtgattcaatttaccagagaataagaaaaatgacttaataaagtagttaagattctctttacaacagactaggaaaggataaaattaaaggatagttcatcagaccataacaaccctttggtgctcaatcaagacagagttttgccaggaggggcatggctcacgcctgtaatccccggactttgggaggccaagacaggaggatcgcttgagcccaggagttgggaggctgcagtgagacatgatcgtgccactgcactccaccctgggccacagagcgagaccctgtctcaaaaaataaaaataaaaaaaagagacaggtaagtttttatcaaagctgcctgagagtcactgggcacgccccacttgccaggtcctacagaccagcaataacaagactaatgctttcaccaaacatcaggaaaatacacagaaaagcaccgggcactttttaaactgtcatcttgttactgtgacaatacatttctgtagttaaacagcacagtaggcctccaacaagatgcccaattgggtacatgaaaatcccggcccaaattaaacacctgtttccaggaacgctaggctcttgtctacatcccctaccgtccccggaaggcagataacccctcgggcctcgtgggttaggttcgagtccctacaagtaggaagaagtcgtcagggcccggcatgtggtcgcggcccaatctcaatttagggctgatcctgaccctcaaagccacccggaacgcgcgagagggcgggacccgccattctcacaggggaccggggtggaacggcgccgcgacccgccgccgcgggcgcccctgtcgtgggggcgcggtctcccaccgtccgcgcaggcttcgttaaacccaccccgagtactcgccgccgcctgggctccggagcggggagacggatgcgaacggaaaggagcgtggcgggcgccccgcgagcagggagccaggagccgctcgcgcgcccctcacctgagagccgcggccaccacagccccacgcgcggcgctggcgcactcccgcggccctgaacgggctcccggcgccgcgcgcccgcgcttccggaggcggagagagcggaaagggaaaggaggggcggcgtggggcccggcgcttcgggagaggcgggggcgcacgccgggcctcgtgcggccctcgcggcgggcgtcacagagcgcggcgggcaggcggccaggccggggctccacgcgggcggagtggaggccgggccagggacgcgcacactagaagagccgcggaagaaggcggtccagcccgcgtggttgccatggcgccctagaggcgttactgctgctcccggctgcctagggcggcgcgggtaggccccgttgttctcgtgcgttaatagggaaagctgccttgattatcttgtaattctctaccaaaccaagaataaaaaagaacggcggctgtgtgtttgtgatattttctatcagcaaatttcagttcataccactagttagttctgtggaccagaggctggtttcagaatggaaagacctttgccgagtggtaaacgaggtgggtagttaaaacaatctaaggtaaaaatgatctctgcagaatatattgaatacaataacttctcgttgaactctcaggtatggtaggatgatggcaccccaaaaatgtgcacctcctagtccccacaacacgtgaatatgtcaccttatgtggcagacaggatttagctgatgtgattaaggatcaaaatgggaagattaaccaggattatccagtgaaccccatggaatcacaaaggtccttataagatggagacaagaagttcaaagtcagtagtgggagctgtgagcacagaagctagaggttggagtgatgtcagaggcaatgagccaaggagtgcaggtagaagctgcaaaaggaggaaacggattctctcctgaaacctcaggaaggaactagagcctgcaaattttgattttagacttaataccttaagcactgtaagacaatacacctgtgttgttttaactactgaatttgtagtaatttgttatagcagcaatggtatacaatccagtagttaataaatattgttcacatctaagtgcaaagaagggtaggaaatatgggtcttaccctgcctgtcccggggagttccagtaaggattgtctattttcgtccttcacaatgcattttgtacttgttggtcttaattaccaaaagtataatcaattctctttttgttgcctaaaagacagcattggctgggcgcagtggctcacccctgtaatcccagcacttcgggaggccgaggcgggtggggccccctgagaggagttcaagaccagcctgactaatatggtgaaacactgtctctactaaaaatacaaaaattagctgggcgtggtgacgtgagcctgtagtcccagctactcggaaggctgagacaggagaatcgcttgaactccggaggtggaggttgcagcgagccgagatcgtgccactgcactccaacctaggcaacagagtaagactgtgtctcaaaaaaaaaaaaagcaagaatttcactttcttttaaagtgcttaataaaactgtgttggcaccactttccagggatagttgttaaactgtggttggcccggcgcggtggctcacgtttgtaattccgcactttgagaggctgaggtgggcggatcacctgaggtcaggagttccagaccagcctggccaacatggtgaaactccgtctctactaaaaatacaaaaattagccaggtgtggtggtgcacatctgtaatcccagctactcaggaggctgacgcagaagaatcgcttgaacccaggagggaaatgttgcagtaagctgagatcacgccattgtactccagcctgggcgacagagcaagcccctgtctctaaataaataaacaaactgtggtcaaaagtttatcttacaaaggacttgagtagatatttctccaaagaaaatataccaatggccaataaacacatgaaaagatactcaacaccactaattagggaaatgcaagtcaaaaacacaatgagataccgatggctttagtcaaaaaaatagaaaataaggattggcaagaatgt

SEQ ID NO: 316765 - DNA, 4001 bp, Homo sapiens
tcccaccaccttcaagaagtggaaaggtgtgagacttctggaaagtctccctgaacgagagaggcatatccatcttctcttttgcagctggttcctgggccgaggaggtgatggcaggaatgtgggcagccatcctggatcatgaagaaacgtgaatggcagatagaaaagctgatccttgaggactttagggctgccataccaaccacgattgcctctccatggacctcttttataaaaatatgagtaatattcttgtttaggccactgtgatgttgggatttttcaatacatgcagctaaacctaactgataccccacttccccaagttcagccttcatcccatgcacaatttcaaactataaaacacaggaagggagcctctgagcagatacaactgctccaggccttggagttggccaaggatagacccacagagaacagccattcactcagtggacaagcccatcaagtgtctaccccaagatcctgtgctgaagaaatgatggctttgggagcagcaggttttatgggggaagactgagagtgtggtttgggacacgttaaatttgagaggatctgttaggcgtccaaatggtgaagaacaggtaaacaggtctggagtttcagggttgaggctagagatataggttttgagaagtttgggagaaaatggttgtttataaaaccatgtaactgtaggaaatcccccagggagggagtggatagagtaggttccaaggactgagtccagggtctccagtgttgagaggtcggtgagcaggggaggcatccagccaaggagatcaagcaggagtggccaggagcgaggaggagaagtggacagtgggatctgtttcagccaagtgaggatgctgtgtcacggagagggcacagtcggctgggtcacgtggtagtgacagttcaaggaagagatgagcgctgaccccgatcatcggattttgcaacatcaaggtcaaggatgactttgataaagagcttcagaggagtggttgggtgaaaatctgatgggagtagtttccagaaagaacaagtgggaaggaattggagataaggggaaactccagaggggttttgcccttcagagggtcgactgggtggtaggaagaggagagtagggaaaatcaatcagttactcaaaaataaacatggaccctacccccaactaagagaaatcttagatgccagcgcgcctaggctcacatcgcgtctgttggaataaagtggtcatggagcccacggacctttctgagcacctggcactggccagtgaggacaagcaggaacaggtcagacttctcaattctgaaccgaggggggcatgacttccatctcctgtgtcttacatctgcacgtttcacaacaagccagagacgtggtggtggtgcggcagggaaaagtgcagcgctgtggggtcaggccgacccagatccgccgtgatctggatgcaacccccacagccagggcacgccggcctcgttgtgcctgcttctctggctgtcaatgggaagtttaagtgaggccacgtgtgggtttttagctctctgcttgacacatagcaggtactcagattgaggtgagcgttttaaggtacaaattagggcaccactggggggagtagcgagggcggaagagtatctttttagaacgcaccgctgatagtggtgatttaaaaaaaaaaaaagaggcaccgttcactttcatcggggagctgggaagaagacagaagaggtgtttgggagaagcaagatgagcagcgagcgagagggaaccggccggcaggtcatgaaaatcggcggcgcgtcgccccgcacctgtcccgcccccgtacctggcgggcgctcggggcagccgagccctcctgccgccgccacctgccaccgcagcagtttcctgggccagctggggctaaggtgttggcagtcgtcgtccgtcagctcccggtaggcaggacgccgcggctgtttggcgtcgtcacctagcaaccggcggcacgctccgccgccatcgggtggactacaactcccacaatacacagcgccgcggcgcggcccgggacgccaagccctgggcgccacctccccgccatgcctttcgggacttgtagtttcttggatacccgggcgcggcgggtcgccccgccggcagggagcgcgcctcgggcggggtgcggcgcccgcgcagggattgggccgcctccgccccgcccgccccgcccgcagcgcgcggtgggcccggggctcgcggcgccctaggcgcatgtgcggcgcggggcggccgtgaccagcggagcgctgggtgtcagtgagcagcgaggagccgcgcgcccccgtgcccgcgtctgtccgtgcgcccgagcgcccactcccgggtctgaggtctgcccggcgcgccgcttgcagagcatactcagggccgcgcacctgccccgcgcacctgcccgccgcccgctcggcgctccgggcttcgctagccagcctccctgcgacagcgcgggggctccggccgtgcctccgcgtccgccccgcgcctcagccgggcccgggcgcagcgctgcggagggcgagggccgcccggagtccggccagggccggcgcggcgatgatgaacaggttccgaaagtggctctacaaacccaaggtgagcggccccgctcgggccggacgccccccgcgtcgcggcctctcccttccccaggaccgcccgtccgccctacaagacggactccctttccctgtccgtggccggcctcttcccccaccgccgacatccttccctccactccaagacttggacagatcttcatcgccctgtctctgaggcggatccgaacctccctcccggcttcctaagcccgggtccaggactgaccctcctgctcctcctctcgggccggggcgcactttccctccccctctatccagggccacaacgggcccctctccctcctcatcccggtcctggacggtgccctcctacacttcgtggtccccagcccgcgggcccggagcagaccccctactacttctccgtctcccctccctgcaccaggaatgccccctcattcccgtcctgcccccacccccattgtcctgggcccggaatagatctccctccgcactccagaacagaccctctccccacttccccaggttctgagagaacccacatttcccaatccctgggtccagggcagacccgtccttccatgtccagagaggatcctgatggccctgccaacggcctcccttcccgaaccaggactgacccacacctcggcccagttcgcgtcccctcccttgtccctatccttgtcccttccccacccacgtcctctggaatccgggacaggtcctccgcccggcccttggggcgagcgcgcccgtggccagcagcctcggcggggcgggaggtgcggctctccagccggcgcccgcgcctctcctagcgccgcggggtcggggtccgggcggcgcgccccgtgcctcagcggctgcgccagtcgcactgcgggcgctgcgtccccgccgcccgcctggggctcgtgcccgctgcagccggagcagggccgggcgcgctcggcgcgggatgaaggcgcggcggtgttcaggatcccggcgcagggtccagggcgcatctgggcgtccgagggtggcaccctggggccggcgcagcggggaggcccgggccctgagatcttgggggaggtcacggctcgggtggggtcaccgcggcgaccaagggcgggagtggggccagcgcttcgtccgggcagctcggacgtccgaggccaccgcgttgccgacctacccctcctccctccactggccgcctttctccgtccagcgtcccaggcctccgcctccaccgtgggtgagctgtcacggcagaggtttcctgaaatccgtgcctcgcgtgcgcccattccaggaaggcgggaggtgggtttggaagatcggcacggaggtttgagggctcac

SEQ ID NO: 316766 - DNA, 4001 bp, Homo sapiens
ttctctctaaaatgccacccatatgtgcctgagtttgtaataaaattttagggtaaaataaaatttagggtatcagttggtgattacgtcacagcacaattatggtaggtaatcatgttgactgaaatatttggcttctctgttttttttttttttttttttttttttttgagacaggatcttgctgtgtcacccaggctggaatacagtggcatgatcagagctccccgcagcctcaaactcctgggctcaagcaatcctcttgcctcagcctcccaaagtactgggattacatgcgtgaacccccacacctagtcagcttccttgttgttgaacatcctctggttattccccccattagaaggccccagcagccactcccactgtgctatgggtttcttttccatcttttctgaatcccctagtttccttgtctgagtaggttcagtaaaaccgaaaacagaaaatagaatcaccagtaatcttattagccaatgatagcaactattaactgtttgatacatacactgtaagatcttttagtcatatatataagtaggtataagtatgcatttatatatatgcatataaacacacatacatatgtgtgtgtgtgtttttcttcaataaaaataaaattgtagtaaggactttttatttagataaatatgtcatttcaatggctatgtaatagttcaattttggatatacaataatttaaccagtgtcttattaataagcatttagttatttccatttattctctattataaacattgcaatgatggcaactattttagaagttacaagaatcttaaagtgtgttttcttaagtagttttctttaaatattttcttctacaagctggcactaagacaagatagttttggattgccaccaaagttggcaatcatcaataagtatccaaaatattttaaacatttttcaccttaatagatgacactctaacttcaataaaatatgtcatttcagtttcgagttcctttgtagcccacaaagccttcattctgatcaaatggattcatttatttggaggggcctagtgcattgctgccttcctatggtagcacttgctgcttttcctggctaaagaagctggaaatcactcctctttctcaccactgatcacatgtaatacagaattaaacgttcagctcaaatcctacttgatctataatctcttcatgacctctcagcatgaagtgatttgtcctctcattgaagtcctttaccacatatttgtatcacttttgacaattaaatatatactgtcttgtaacttgcacttttgtgttttcagatgtttcaaatttgcttattatttcccctttctataactatagagcgtactaagaggctgttgaaggaagagatcagtctcactgtcttcgtagcactgtaccttacacacaggaggagcctggtaaatatttttgatttactacaattacagtaaatcacagccttgtattagtaaaattcttgttcagttcaatgcctctgcatatataagcacataaaaagaactatttttaaaaaatcacttttatcaagatattaacataaaacatttgttgctgactatagagtggcattgttgtaactgaactatgtaatatttaaatcaaaattatatatttaagattattttctatgtttttacaacctttaaattatcaattaaaattgtttgcataaaggttgaattacttaccttgcaaaaccttaagtggaagcacagaaataacaggaaaacatgaagaagcttcatgttggaggtgttcggggtctttgtctctgctgagaactcttttccactccaggtattcttttgaaatttaatttttaacctctgaaaaaatgtttcaaaagaacaaacctcctaaagagctttgtacttttgaactctgaaagaatttggctgaaatccagagagatttaccgtaactgaaaccaaaaaatggccttcccattaaagagctgagggaggtgaccaataggaacttgtttccaccagaagagactgatttcctcccaccctgttaattgcaatgactcaattctgtattccagggaagacagaaattatattggaagcaattttttggttttttttttgtacagtaaaaatataattttttaaacttaaggttgaagactaggagacagtaagaataaaagtagaccatatagtgaaggctgcaaaatacatttaaaactctagaaaccagcttctttaccatgcatttgttgtgctgtgatcaaattgtatttttggagtacaagaaattttaaaaacaagtattcttgtgccagtaccaactatcatgcagggtttatctatttatgaaataaatctgtgatagcagaaatgctgacacagttgggttcatcagaagcagacttgagacagtgagtgtggggcacaagtgtttgttagggatcgatatccatacaaggaagggaggggaagcaggggtgaacagaggtagaagttgaactggagtgagtgtgacctgtcacagtgcccctgatttcagtataaatggctgggccattatattctgccttgcttggtcccctactatatattgcccaggaagggcatacacttaggtgagacagttttctgtagctaaggcagacacagaaggatctgacagttatgtgctatcaggaggaggtatcttctgactacactctttacagccaggtagcaagaccttccttgacaagggttctgggaaactcatctctgtgtctttcagagtacatacttgcacctcttagatctatgttccatatacactccaggagtggctccttaaacatttcagtgggtccctattcttgagagaaaacttagaagaggaagttaatgggaaaaactacagctcctacccttgcagttgatcttggggctgtagttgaaacttacccttggcccccttcctatccattttagattccctttaccttgacctcccacctctgctggtctcggtgacttactggatgacatgtcccacactctctttcaggagtggtctgagcccctggttaccttttgtttctcaggcaaaagttgccatttttatccctactgtcacaagaggcaggctggacatggtggctcactcctgtaatcccagcactttgggaggtcaaggcaggaggattgcttgaggccaggagtttgagatgagcctgggcaacacagggagaggttgaggctgcagttagccatgattgcaccactgcactctagcctaagtgacaaagagagaccctctcttaaaaaagaaaccaaaaaaagcaaaaaataagaggtaccccagtaggttatgtgggttctacacatcttcctccctgcccacattatagtaatagcagccctacttcctcggaatgatcagggccaattacccttgtggattctgactctttcttgctagttcctagacacaaagagcccagcgtaccccaggcaacagctctggtttataattccatgggactcttgcttgcccctggtgaaagtatagtcctttggagaccaagataacgaaccctgcagagtctacaactgtggagacaagatgcacaaagcccccagttggtcaatggtggtgatggtaagtgtggtaattcttgcctttattccttggttcccagacccaggtattcttcctattgggaacataatgctatatgaaagtctttgattgaatgtatatactgcttcctggaggatagcaccccattctcacaaagttttgcatttaactggcacctcagctctgtcctcagcagcccattataacattctgtaagtccaccagcttctgagtggtgtggtatgtgatatgaccaggggattgcatgatcacaggcccactcctgggcctgctttgctgtaaagtgggcacccttgtctggcaggatgtgatctttgctagataattaagcactctataatt

SEQ ID NO: 316767 - DNA, 4001 bp, Homo sapiens
cagcgtcgcctttttaaatgacaaaattctctagcttttctttgacatgaggaatgtagaaggagggatagatggcatgacaaagtttggaaatcacttctttaagcatccacatactccttaggcttaaaacagtgcaaaaaggtcctaaaagtcaaaataaaatcaaatggcaggttatgaattctgtgatatatgttaaaagtttaatatccatgatatttggttatacttcttaagctggtgacaacacttagaaagtattattgtggtgaattaaattccactgtcttgtcatggtgctgtgatggcaattatgcagtgtttttaccctgttaagtcacctgaacataaactaacaggtactaaagaaattaaagcattacataagcatactcaaacaacaatatggctggtcatacgagaaatgcaattattttgctgacaaacttatatgagaagtcttactgtttccctaagttattcacagcacatcccactcactcttcaccaaaatataatgaagactattccagacattctcagacttgctggctcttttgtttcactgaaaaggtgaagaagtacagagatacctgacaagtatggaagtctgatctattatttgaacaagagatctaaaatgagagagtatcaatgtaatacatcaagtggtacaaaactgtggacttcatagtgaaacattacaaaacttcctgcttccggacagctcattatttggttcaaggcttcacattcctttgtcatggtctttccgaaagctttcattccttattaatatcagacttttaatgttactagtgggactttccaaattaacaagccccaagttcgtgccccaaggaggagcttcaggactacaattttccctcagtaacctgagcagagtgtatgtccctcacgtagttgttgttgttgttgttgtaaacatatttctttctgtatatcttaaatttgtgttcaactatatatttttatcacgtacaattacaagaacttgcattagttctgcggaaattagtggaaaaactgggagacctgtgggtatgtgtgaaatagacacgaaacggagcttcgctgccaattgtcactggggtctcacacggcccagatctggcctctgagccatgtcactgggtgcaaaggcacagacaaccacagggtaactgggcgagaaaacaaggaggctccctgtcaatacacgtacttccaccctgaagaggaagggtggcccgcagggcagaccctaatgaaaacccgtgcctactgggatcgtcacatcgcccgggcctgtagggcctgctaaaggggtgtgtggaggaggaaggacagcgtccgtccccacttcggagacccaaacaaatgaaaataagccaagttctcacttcctggttgcctactctttcggaaggcccccgacaccagacggacacaggggaaacggggctcccgtggagtaacggggcccaccccagcccgcacctcccgccctcgccctcctccgggccttacacggtgacgtgaccggagccgcggacgaccaccgggtccggcgagtacttgagcagctgctcctccagggcccgctcctcgtcctcctcttcctcatagatttcgtcgaaatccgccatcctgagcctccgagctcccctgcccaaagggcctgactcccggggttggcgccggggtaccggcgggcgaggcggcggaggctgaggggagtcgccgctgccgccggctccgaggccgcggagttcgctgtcggctgtctcggctccggctacagaggggatggggtctggaccgtcgccgccaccgccgccgccattaccatcagcaataacaacaacacaatgtcaacatccgcccagaggccgacacctccacaagcacagacgccgctgccgccgccgcagcagcagcaactcaggaaaccacagcaacagcccgagccacccgcagcgggagcagccggctacggcatcgcgagacttcccgggccaacgggcgggcgggcgcgtgcgtgggcgcgtgggcgagcggactggctggcgggcgggcgggcgcgcgcacgtgcggcctcgcgcgctcccaggccaccgtctttcctctgcttctacccgcagacggcgaccggggcgcgcgctcccgccggcgggcccccctccgccgacttctgggtggcggaccctgggggcggcggctccgctgactggaggccgcgacccgcgactccgacaacgcagcttggaatgtccagtgggacatgcagttccccaaagtcatctctaaccaaaacaaacaactgaaaagaaaagccctggctggaatagacacatttttgtgcgtgtcattgccagtttatctaataatcgcatctcgcttttcctcaggttttgagtctatgatgagaaccagagtctcttttttcccaatttgaggagtccagcagagacactgcaaacatttgtgctcaccacaggatttttcaagacatctccaaattcaaacatcttatcccttgatccccttaagtataatccaatatatgaggccagcgatgctggtatttttttttttttcttacaagaaatctcaccgtagtcatgctatgaaaaaaaactgataaattacctggattccatattagaagatgcagtttcttgccccaactctctcaccaaacataacctggtttttgttgttgtttccttaaaatcttagggaattcctttccttttcttaccagttcctaccacaaaaaagacctgaaagaaagggcagaggagaggaagaaaaggaggcaggaaggaagaaaggatagaaggaaggacgagaagaatgaaagaagaatgggagagaaagaaagaaggggaggaaggaaggaaaaggtttaatggagtctacttagctgcctagtaacagttgaacggtcactttgggtacttggtttcattaagcatataaacagcacaggggaaggagtgggcttctgagaagagagtcctggacagtgaggatacaccatgggagaagaaaggatagttctactgagcccagcgctggtcaggctcttcaagtgcagtgttcatgtcacagtagtcggctttagatgggtcactgttgacgtggagaaagtgcaaaggaggtcaatgaggacagtgagagatgccaacctccttttggaaacaactgaaggaaatgagtgtggttagccaagaaaaaatgaaggaaaaatacagtagttgtatcagacttattgtatccctccctggagggtatttgttcattcaacaaatatctactgaactctagctatgtggcaggcactgtggacgtgtgtgaatgaggcacaggccctgacttctggtagcttatctattgttaaggcaagcaattgtcatctctgccaggggctcatggaggaggacacaggaagtgtcagtggggcacacaggaggcagcttggtctggtgtttaacaatgtgtgttctggaacctgactacctggccttgaatgtcagctctgccacttactgtgtgaccctagacaagccacttaacttccctgttcagtacctgccccattgggatgctcagcagattcaagggcttaagatcggtgaagtgcctagaagaaggcccagtacacaataaatacggggtaataggtgatgcttaaggctccctagcttatcaaccctgtgagggttaccacagcattatgtaatattttactgcttataaagcacgtacataatatatcatttaatattcccccaagaacctgtgaggtaagcaaagagggtgtatttattttcagatatgctatgtttcagagatgctatgatatgctatatttcagagatgctatgtggctttctcaaggccatgtgacgatttaagatttaatggtctaattgagtatactggtggtccaagctttcctgaatgtcttttttttttttttttttaagaca

SEQ ID NO: 316768 - DNA, 4001 bp, Homo sapiens
gtcactggggatcctgatggagtctaggccatcgtactgatctcggtcccacgtgagataggcatcgtgccagatttggcggatccacaaataagcagtcagaatttggtttctttcatcctacacaatgaatccagatgtcgctttacctagcagacacttgaaatgttttccactgataggacacttgttcttcacaataggaatttcacaaacactcatcaaatttcaataagtaaagtgagagctttattctttatttattctatccccttgattgactgccaagatcatattttttttcctcctagatttagtgttcagaatgtaaagtggacaaatattttagtattgatatctttgcatagatcaactgcctatatttcctgaaaattgatcaatgaatgatgtacttgaaagcaaaagtcaggaaataacaatgtgcagaaggaaaatctttcaagtttcataacattgtgtaattaaacatagataagcactaataagctatgccatcttaaaacactaccttttttaaaaaattgagattggccgggcgcggtggctcatgcctgtaatcccagcactttgggaggccgaggcgggcgaatcatgaggtcaggagattgagaccatcctgactaacacggtaaaaccctgtctctactaaaaatacaaaaaaaaaattagccgggtgtggtggcgggtgcctgtagtctcagctactcaggaggctgaggcaggagaatggtgtgaacccaggaggcagagcttacagtgagcggagatcatgccactgcactccagcctgggtgacagcaagactccgtctcaaaaaaaaaattaagatcaaattcacattaaaactcaccattttaatcattttcgaagggaacaatgcaccggcttccaatatattcacaacgttgtgcaaccatcaccactgcctaattcaagatcatttcttccccccgcaaagaaacgccgtaatcattaagaactcactggccgttttccccgtcctccccacagaccccggcaacctctatgccgttttctgtctctacggatttacctcttttggacattttatataaatggctgcatacagtatgtaaccccatctttctttagattatctaagactgttacagttaatgaccaggattaggtaacgtttcttgaaattaattagttttgtagaaagcttccttttcccgacattctcttctcccaccagcttgcttaaggagctatcattccctctcaaattcccagttaagacattctcttcagaaagcatggttgtttatcctctaagaatcattccacagagtcagcaccatgtgttactcaccatatccttaatctgagagagcgtaatctgcagggtcacattcaggactttatctgtatcttccactggacgaagagcattagaataatcttcaaaaaggtcattaaacaacttctgagcatattttccatctgccgtctctgcagctactcaacaagagggatctggattaacattcagagtgttgtgtgtatttcaagacaaacaacacaagactgaggtctaaaatgggggatggcccaacactggcgagggacaagctttgggtggatggatgagttgtttttctggcatgccctaccaagatcagagtcagtaggaagcacagaacacttccatgcggttgaatcatctgttttgtcttccctgtcctgccccacctcccaccaaagcaatagccccagatgagacaagataggttacgtgtcaccagcctctcacctctcagtctggaagcagcaaagtagatccagcaaaaggagatgcaggaatgggaccagttcatctttttcctgagcctctataataaagtctcagtcaggcagcgtggtcttccacttccccctatgaatacaaaggatctgggcacaaggagcccacaccgctgcagccttatggcgggagagctcaggcttgcattgcatgcaggaccgagatcctgagatccaggcctgccctccctcccctccggtaatttgagactggcagctccagtggctgagaagccgggaacccagggtgtgttaggtccaacagtgctgttgtggggggccatctcagttgagggtccctagccaccctcagcagaaacaaccagacagaaaaggaggtagatgcaggcaacaggggtatgcctgacaccccagagactccatctaagcagaatgggagatttctacacccaccatgagcagagtcagcctgagtccagggactaagggaagcctaaaagactgagccatgggacggctgtccagaaagactctacgtgcttttagcagcatttgaagagggaaagagacacggttctatgatctccagaatatattggcattttggttttttctctgcctcagcttctgatccctcctgcagctgtcccactgggcatggatcttgcatagtaaatgtttgtgagtatatatgtgagggggtgtgctggatgggcggataatcactcgcttaagaagcagcaacactgtgagttggatttggacttgaccacctgggtttgactgccagccaaaccctgacgagctctattattctgtaaaagtcacctaacctctctgagccttccagaactacagactggggaaaataatattttctctctctagagctactgagataactgtatgtgaaagcactttctaaatatcagtaattatcatctttgatcagctttgcatacccagaatttctatactcaccaagtcacccaggatttaccagctcgaaaaaaaaaaagaaaaactggttcaaaggctgaccaaatcagcatgagaataataaccaatggtgatattgctaatgatgacaccctttgcatttgaatgctacttcatataaagtttcagtcatttctcatatgtgatataattttactcctataaaaaaatgtcaattttcaattgctgcttagtctggaaactcatgtctgtctctcctcttgcctggggaaactgctttggaaaaccatattaagataatttggttgcctggaattggagcgaggaaattggatagctctgtttcatcaggttacagccgcctgatgagtcaccccatccctcttcgggaatgtatcctctgagtggaacagacactcaagccatcggcaaagtgtttcttaattgcctatcccattgtgttgattgtgaagacattatttttctgacgcccctagtctgactcattcatcaaatgacacaattccgggtgcccacgctcagtcctccttcagcaaaccatccgctccagaatctcagaggcagaaggtaattttgaaattgagtttaatgcctcacttctatatgaggaaactgaggcccagggatgcagagtggcttccctccagcagtgatcggccagagacaggatccaggccacctgccccaatccactgtgctccctgcaacactaacaatgcatctcttccttctcgttgtctttcatcaatatggcttttgatgccagctgggtggtgacttccttgtgtgtagaggatctttacctcatatgtcttggattccttacagcactcacagggttgaattgtagttgacacagggcctaccttgaatggtgtcccttcccttcctataccactcccctcccttcagggtcccttctcccctcaggggcctcttttaggttgaagctgctgagaacctttgcccattggggtccagtgtcctggggggcatccctgactccattccaggaggatgatggcagtgctcccattccttagaatagagtcctgtctgacaaagaatcctagtgaattctatggctaaaatatcctctgcccagcagcagagtggggatgggaagaacaaataccttcattctgctacatgtgttttttaaaacaaaaattacaagagtcaaacatcatgttttgcaaaggattttttcc

SEQ ID NO: 316769 - DNA, 4001 bp, Homo sapiens
tgctatttaagtgaagacatccaaaagggagaaatatgacaactggtatttgcttacttgccaatgaactattacataatgaattttaaaaaatagaaacatttctaatttccagttgtaagggaatgaatggttaggcccattgtgatgttaaaactaaaataagtatttagttgttagggaaaaaatgaggattatattaaaatatgtaaagtacttaagtaaaagaagtggggaaagccaaaattttatggaattgctgcaattctgtcagagtaaactggtaggatcaaaagatctgatgtttataaacacttgatgtgaaacgtttttcattttattttacttttgcattgcttctgatgtttaatgttcctttttaatgtttattattgttaccatgctttctattcaattgcatgttttctactaaaactcttaatatttaaaaaatattaaaatctcacaatccactcaacagagcgtctgtctgaccataattcaatgaatctctagatttggaagagaatttgtcatctagtttatcccttctaaatctatcgaccacccaccaccagagtctttttgtttgtttttttcatctttgagaggggctatcactgaagcaccacatttgtttggggaaagcattctttaatttaaaaaaaaatcttccttagactgaaattcacctcccaataaccttcactaatttggttaatttgttatcagttctatattttagtctacacaaatcttatttttcttctaccagacagctgtgcgattgctgtattttaggtcaggtactacagatctttagaacgttcccggcgaagcaaccctatttacctcagaattatcttaattcatgtttgcactccctgataacctaggacataggagttcaatacttgctgattccttcaccatcctactcggtctgagttccgtttagaaatatcccccttacaatgaaatgctcataactcaacacaatctcccaagtgttgactgcattctggagattttcatcctttagatgtgaaatcctcatgagttgtgtgggttaagtgagggtccttaagtatagaacgttacatatattcactaaatttcattttctaagatttcactcctcataccggccttcgaatactttcttgggtaaggtatctttcttccaacttaagttaccgcagcgggccccgggaccgtagaaacggagatgacctcaaatgccacctatgataggtcaattctaacctgagggaatggaggttatctcctaatttcgttactaaataaaacggtcatatacgtgttacgtgtaagtctatatttctctcccacacactcccacccacatgctgagggtacaacccagccggtagctggggctgcctgttacatgaggccttagataacgacgacttagcccgctttaaaataaacaagtacgctacagagagcgatgagcaggacaggagatgaaagagactggcctgttcccaactcagcaccttctctgcaaaaacctggtatcttgccacggaatgacaccggagacaactccgaggacaaaagaccctggggcatcaagcacccggagactgcctcacaggcgttccccaggcagctgcgtcggcgcgcgcccaccttcctctgcgcgcggggatcacgtgccaggcgccgagctccgtcccgccccttggccctaggatttttacgcctccttcccccgcttggcgaacgtgcaaggatggggactggctgatgggggaggattacctgtgagcctagcgaacccggtaatgctttcagggactgggagccgcttcagatatgcagggagctgcaccttcacgatacgggccacgctctccagcaccatcctggccagcggcgtccactcctctcccgagccccctccgctctggccaagctgccgcgcctgcgccgggagcggaagcggccggcgggcactggcggcctcggcctgggcggcgggcggggcggcgggccctgggaggagaggtgacctgccgggcgccgattggcggcgggcgagtgacgtacgctcgcggcggactgccgaggcgcgggaactggcgggtagcgaggccctcctcggaatctcgtgtgaaggtggccctcctcttgggcctttaacgtctgtagatgctggagaccagcagaaaggatactgtgtgcgatgagataagcatgtgagaatgctttctaaccgaaagtgcctttcaaaagtgagtctcttgctgtctctacttcgtcccctctcgccccgcctcttcccctacagtttgggtgctgtggccctagggttgcatactcgcccatgagtatcctccccctacccagaccccagtgcctaattttactccttcacccaaaggccaggcttaaaaaaataaaaattaaaatattttaactaaaccaggaactgtttacatctctgccccttggcaacttaactgcagccctagctccaaaaacctctggtttttgccactcagagaagattcgtagtagtccttccttagatattttcagttccttttccttcgggaaagtggtaaaagaatccaaagctggccgggcgcggtggctcacgtctgtaatcccagcacttagggaggccgaggcgggtggatcacgaggtcaggagttcgaggccagccaggtcaagatggtgaaaccccgtctctactaaaaatagaaaaattagccgggcgcggtggcaggtgcctgtcccagctactcgggagactgaggcaggagaatcgcttgaaccagggaggcggaggttgcagtgagccgagaatgtgccactgcactctagcctgggagacagagcaagactccgtcacaaaaaaaaaaaaaaaaaagaatctaaagccttatgtatggttttctttatgttacaaggcttctgctgaagtctagcgcagggggtccttatggcttccctaggccacactggaagaagaattgtcttgggccacacataaatacactaacactaatggtagctaatgagctaaaaaaaaattttttttcataaagttttaagaaagtttacagatttgcattgagtggcattcaaagccatcctgttgggcaagcttgatcttgaaggttttaattttgttgttgttgttgttgttacaaggtttcgctctatcgcccaggctgtagtgcagtggtcagatcatagctcaccgcagactctaactccggcttaagggatccttctgcctcagccttccaagtagctgggtttacaggcgtgtgctgccacacccaacgaattttaaaaatttttgtgtgtatgtagatggagtcccattatatcgcccaggctggatagttgtttttattaatatctctaaaagatttgaagggtaagaggagaaaatttcactcccttgaaataactttcttgctatgactttgtttcatattttggctgaagtcaaaatgtccgaagttgtgcacttgctgattggataatgtgtgtgatatcttaataatatgcctcattatttacagttctacacttaacaacatataataacgaactgctaatggtccagtatttcattgtgtatgacagtgtaacagccagttataataaatactttccatttttccccttggtatttttattttacagtgagaaaaggaaggaattttttaaagcaatctttcattctctggactgtataaatttagtgtttgtgattgtccttcactaaaaaagaatatcagtaatagagttgaccaaaatctagattaaataattttctatcattataattgttcaaaattgttaaagtaaaacttacaatggaaattctacaaacacgtttagatacaggttcatgtttttgagctagggcagtatagaagatggtgtatacaaagtgatgtttaaaaggttgatgggatttcctttagagagagtttggaggtaaaccctg

SEQ ID NO: 316770 - DNA, 4001 bp, Homo sapiens
agtttgactaccaaactaagttggaagttctacaaaacagcgatagtggccaaaccccacaggatactgctttgatataagacccaccacagagatcaaatctggcttcctgagccgtctgaaaattatgaccaacatgtcacaacaggaaatggaaagcctaccactaacatgacctggaaaatagccaatttactaacacaaacccacaacatcaacaaatctgttcccctgaaccacatctatccaaaagtagtttaaatatttacattcttaatgagctatgtatgactgataacacatactgaagtacaatttccaagtaaaaatgtaggtactatacattcatattgacttcttaaaataatgtgactcatcattcaagtaaagcagcaaagttttcgaggtgctgaggggagtaaggggtgggaagggtatgcaatctgtgatgaattctgccaacagtggctgtctgtattaaccagaggccatatacgcatattcaagttgagaaaatatctgtaggtcacacacatggtttttaaagccatattatagaacaagacactgaatagcagcagcaccttttaagatgaaagtcaacaatttatacacaagcactttaactcccatatgtactcctgaactgaacaaatattattttgtagtgactcacaaagggacgcagttatttccataccgacctcataaaaaaaaatcttctaaattaactctttaaagatgaaagtaaaagcatttctggaaagattcaacaattatacaagccacaatgatgctgcagtaactgaactgcatagctccaaaagtttacgtttgtagaactgaacttttgaattatatatctgtgtaaaaggtatggtcgctgttgattcaattccatgaacaggaatttctttctaaaggaaacagaaatctcagtttctaatatgcacaatgcatatgtaattatcttctatatgctccgcagttttaaaatgccatacaaacaaagcataccacatgcaaagtcaatttctgagattctaaggcagtttctggtcaagtttaagatcaaaccacaaatatatatacacaaaaaatattttacatacatatatatctaaagatagaaaaactgaatattatttttaaattggggaaaatttagcgaaagtaaaacccactcctctaagtttaaagttaatcttctcctggaacccacttccattttattcagaggtccttcgacggttcctgaagcagatgtgtgaaattttaaagaatgtctgagggtatatacctaatcaggatgggttagcatcccaattcacgatgtacctttcaacattatgtaggtacattgtaagagaaaccaagatgagcgctgtggcctcacagttgacccaaaatctgtgaacaggagagctgacaactcttcgctcatacaatgcaactcacctcgcagctcagagacatagcaaaatcggtggctgttttttgcgctgcctttggattctgcatctgtttcaaacctagaacctagctaccctcggagctccaccgaagaaagcctgacacagcgaaaactatcgcgatttaaaagatacctgacgttttctaccgcagaggttacgaaaattttgcccggtgggacttttattgtcctccttcaaacacgggagcaacatgaagttaaatcctctcgctctggagatccctagagtcaacctgcttctgcccaaaattaaaaataaaaatctccaatctcacttcccccttaagactaaaactgaatccatgctctaactcgggagtaaagtaggatggctttcaacccaccacaccctccttgctcattattccgggtcacgggcgaactagaacactgggaaaggggctgcaggttccggaccggaccggccctgacccacggaaggggaagagaagcggcaggagtcaggagcccgaaaggtacgccccagcgtcgacgcgtgacgtcactacgttgacgtgaacggccgttcagcgtccggccgtcccaacacctcctcctccggccactcgctgagtagcgtcggcgcctattgggcggcgtgggaacggtgggcgggccgggactgggtctcgaggaggaggaggggtgcgaggtgcctggctctgagggccgccggggctgtgaagcctgtcattagcgattagctcacgtcagtcactcacgcatccctgtttgccctgctgctgacctcgcgcgaggcggccaccttgtgggagatgttttcgtgaggcaacagacgctggccgttcccagcgtcacgcagagttcggatccactctagcgagagaccacagcgtccgggagcagcttgtgaaactctggcgagcgtcagccttgaaaataaaaagtattggcagccgtcgacgagcacaggttcctaaaacttagatcgaagagaagtaccagccttcaaaaataaaccagcaccaaaagccccctgtgcttataggtgacgtgcgggctgggagtgcagtggtgtcacctcgccttgtatgtcatcgccggttgtgtgcctaacatacatacaaaaaggataactcgaatttagccatcacgcattttcaaaaatactgcttggaaattgaatgtttggagaaaagatataatctggggtttctacacggtctgaattgggttcatttccgtttagcaaacatttattgagctcccagcgtgggtcacagaattcagtaaacctgatcccgtgttcaaggtgctatattccgatgcagggcagggcgatgcagtgaaagaatggtggccacagcagtagcatgctaatagcctggtgggcaggtacaggttttgcatttctttggcgagatcacttttgagtgtctccactgggtggcagaattaagacccgtgaacgtttaatatctcctgtatatttagtatattatgaatatatactgattaatgaatattaagtgcgtgttgtatatcttgtgcctcatgaatattaaatatgacctggtcttgccagccttttctatttttacatatacgtgctccaccgactgttttgcaggctaggaacacgtgagttttgttctcctatttcttctagggcagcattgaatattctcaaagacagttctgggcttcagagctggtatagtgcccatggtggtgatcacagtgcggtcaagcttcttaggacctctttcattacttttatccaggtagagtttgtagaactatggaaatacccaagcacgattttctcttacctgggacactgttggccaagatctttagattcttcttagaaaatgtggaaaagcaggcaaaaatttttccaaaccaagtggaatttttcacaagacatttactcacatttttttttctctctcactgtagttacgtagctaattttggaaaggcacatggattttgagaatgtagacagtagttgtggtctattagtcaatcttacctgctttctataaggatgaaaaattatttcatggtagtgtcgtagtttcttaatggaggattgttccaaggatctctcttaagtgtgcaagaacaagtctatttgtacgtttggttttttgtaatattatccctattatgtactaccttattcctttataagaacttaaagtcatggtctctggcatacataatcatcgcaccagtagttctcaatcttcactttgcatcagagccatctagggagcttcagaaaaatatccttgcttaggtcccactcccagaaatcctgtcttaattgtttcaatgttggacctaagcattcctgtgtttaactcttcccagttgatccaaggtgctcagtcagaaacactgtgttacatatggggcaatatatttaaacaatgtggtatgtgattgcttggtgataaaacaatagatcgcatctgggaaaaaacgttctctgtaattcctctggtgtttttgtcagagaatctggtgatgttga

SEQ ID NO: 316771 - DNA, 4001 bp, Homo sapiens
aagactgttaagcttcacaaaaggaatttaaatttctgaagcccaggtattctgatctatcatcattaacaaccaaatgttgtaatagcatgaggaaaatacagtctgtcttgttttacagtttaattactgattagcaaataatgtgacatttgaacagtcactattcattcaccttgcttcctgtttaaagaactccttaccagaaaactgataatcagaacataggaaatagaagaatttatgatcgtaacattaagaaaaaaaatttaaaaagctctgggtggtgtgattacaagaaattattttcttctttatgcttttagatatttcttccaaatgttctaacatatacatatacacatatatcaaaattttattaagaaggtaactctgtaagagaaagcacaatgtatgtaacatgatccttacacagcttttctcaaaatgtaaaaagcaagtttttactaactacagaatactgcaagataaataatgctacaactgttcagaccctaaaatagtgtgtagcagacacaatgcaaccaacagacatttgttgaatacattataatgtttaaattatagtggaacttaatactaaaaaaaaagtgttatcagaacacaaagtatattttaaataaagcaggctaattatattagaaaaacattattacttccttatatacttacaaataaaagtttgggttaaatcataaggtgagtttataatatcatgcagtaattcaaactaatgtggctcaaaaatgaagtcacataagctaagagatttttcttgaagttcaatttttttctaggacaacaaatgtcgaccagtctgtttttcgaataagcaattaaacaaaaatgaaaaaaagggtagtaattaacatgcaattaattttaaggagactgaggaagtgcctgccaaaagatttacaggcatgctgggtgctcttctgcttttcacaaaccaatattattttttctgacatttagtcaaatgtgttttatcatatcaaatttcacaagatacctgtggaagacaatgtagtatgttactcagccgaaatacatattaaataaaaagtattaatatagaaattattcatctttactatcattttaaaatgttctaaaatgtaggtaaagcttttgctataaatttactttgtggtgtaaaatctacatggtaattggcagcagctaaaatataatggtacataggcacctgatttctctgtgtaaattaaaggaaatgtaagttttctgaaggaagaaaaacattactttttagatgccaaccaacacgactttagttggctgtaaaagcagattaattcattttcagagttagaaagaagattttcatgcagaagatggagtcggagcccgacgtgatctgaagcagtactaatctgcacagagaaaacaatcagggatggctacacaaccattcagaaggttgcattttccccttactaacaacccagggcaactaaacaacgtactgcagtatttaaaggacaaacgagaaccagtttaagctagaggaccgcccagccgcatgcaaaacataccaacagagaattcacagcaaggggatagtattacctcttttatgtaattccctcaggggaatactgtctcctcccccgtcataaggcaaataagggtcggaagaagcatccatgattagaatttttaaatagaagaagaaaaagaaaaagaaaaagcttgctagcttaaaaagaaagtgacatttcttccatccctgctgcagcaagcaagggagatgccatatttgatgaggttaaaactgtagttcgactcgctgaagcaactgggttcttccacagtggatgatgtcatcaaagggaaattattgcagcctggttgctagtggctacaatctagcaaggcttagaggcggcacagccttcttaatcaggtcctgctacgtatgacaatgactaagctccaagtacaacacacaaaactggtttgagaattttgaaacactcacaatacagcttcggtagcatcagtggtaactacagtaaaacaatagaaacattatttcttttggttttaagataaatataaaggggaaaaagtaatacagagatgtaaaaaggaaattttgaatgcagacaatgccctttttcatttctaatgtagaaaaatgagagcagcactctagtaagtttgtgtggttttacgagagaatgtactagttttatacagtaatgtcatgtgagtcatagccataaaaaaactacaatatgccaaaggtttctcaagaaacttggttctaagtctattaaaaataaaaaaaaaatactctataatacagcagcctttcattgaggatttaaaaaccgaataactgaagagttgaatagtgttttatcccactcaccaatctcctccagcggcttcttgtttcctttcttgaaggaactagctagtaagacattgtagcttttgaggagaaagaaaactatcaacgtactaagtaactttactattgtatgtgtctaaactacgcaaaaaagaggtttactaagcagagggctttcctatctctactagcttcctattttatctcataagggttttgtgtttttaacttttagcaaaaatgtgtctcaaagtgaggtactcaactgttctagaaattgttataaaattcagaaattgtctctttaatagaaatttttatgaagttcagaaataaagcaactttcttgtttaaaactgtcattaaaaacaaaaacaaaaaccgcacaatgcttattgaagatcagagttcaatattttatagctacctctgagaggattcctctagactgggagattctcctcctgaaatgcctgttacacagtgtcactaaacaacaacaacaacaaaaggtgttgttcattagaagcaattccacagaactcaagggttctataaaatttgttttcctaaagtattgaatgagacaatctctaaggtccactcgaactgaaagtgtttacatgaaaattggaggtgagagaaggaaagagaaaactcagagggcagtaaagagaagagagaaattctcttcaatttgtggagtactaaattttacttatttagggtctttttaaaaaactgtataggttaaatcaagtttttatattttaaatctcagataaacagagcttcttataaaatctcacctgaaatttgggagacagggttccaggaaaggaatatagactagaattactgccacaggaatattctatcttatcctgattctagctattaaaatttttgataggatagtaggtgatttttttctttattttctgtatttttcaaatattcttggcaattttttctcctatgctccttcctgcacactgagccaatagtttttttaaacaaggaaagctttgacaaaggctaactgtactaaattagctcaatgtaaatttgggagtgtgtggttcttttatatgttttaccaccatataatttttctaaatatataattgtatggcatttataaaggattttgtttttataccattcatgttcttatatgtctttacataaaaaatgaaaatctatccacaagttttcccggtatttgtaggcactctcttaacttgtttttcctgatctacaacttgatcataaagaatgaaaatgacagtcagcactcactgatgggggaaatcctcccggtaaaataaatactgacaatgcttcatattgtaaaagttttgtagccatatttgaattatttttaaagataaacaattgtgtgtatatataatatatatctatataattatatttgtatagaattaagtttagaataaaacacatcaagcccttagcaattgttatcactgagacataaggtagagaggttgaggagtacattcagtgtttatataattccacactgtttaaacaaatatattacttttgtaataataaacctaaaaatctttaa

SEQ ID NO: 316772 - DNA, 4001 bp, Homo sapiens
tgggctggcagtgtgctccacagagaggcagccgtcccaggaggttatctacccacacaccccagtcctgccctgccgtgccccccacaggctgctcagtgcctgggaagccagaaacgctgcccgtgaaatacagaacacaggatgcagaagcacgtttgtgtggcagagtctacttgaatcatccaaaacccaagatcgccctcctgcctctgacagtatagaaggcgtgactgaatgtggctgccttttgaaaaaggttccatagagacactgaggtctctgattcagaaggagatgatgtgtctacacctttcacctctgaagcttctaaagagctagtaattattttatataataagacgtcatgcattttaaataaatatgcaacaagacctcaggcttattatactaggttatcttaaacacctgaaataagtaaatgatttgccaaatgattccgctccatatgaataataccttcaaagatacatagagattaatgttttatttaccacttctgtgcaatcgctattttaaaattgagaaaactcatccacagtaatgggtgtcattactattcagtcttgattgattttggtctcagactagaagataaaaatggtttaccagtcttggaaagaaactatagtttaatagccacaggaaaagatgcattttcaaaaatcaaaagcacagtgagatgactagagcgggacatcctaccaaatccagtgttgagcaagcgtctcctgaacagcagacgcttgtcctttctggcttagtgtttcaggttggtgtttctcgtctccagttcttgatgatgatcttgtgtttgtgccactgcgtagtggcccgaagctaggggagcgtggctggagcaggctgcacagtggagcagacaccctcctagcagaagagaaagtccagcaaaccagcccagaaacagggcctccccaaactcccacctggggacaaagtctgggacgttctcatcccagaactcctgaaccgtcttgtgggcaacccaagagacgggaaccagggctgtgactcccgaggcccaggacagaattcctcccaggatcagcagtcgcctcttgagatctctctgactctctccaattctcaaacagtccaggccaaacccagagaccagcaggcccagaaatcccagcccatttgacagaaacattaagatcctggagaccctgagttcagcaggcaaagccaggaaggagtcaaagtccttgcattgcatccccacttcctcttggatgacacaggtttgccagagtcccatggtccagttttccatttcatttaagtccaggttgaggttcttccagtgtggcaggtagtttgtaagacaggataaaacccatcccagcaaagataatgaaactccagctagttgagctacagttctaaatactaaagccattataatgtcctgagagctttagccaaactaactcctgcccttcggttgctgtgaaaagaagtgtgacacttgtgttataacttatgaaactcagaaatatttcttcattgtgtatataggaggattcttgccagagttgctattgtttgattccatgttgaatgggtttcacaaaaggatagggaaataatgccgccaaccagtaatgccaaggtgtggccaagattgtgtttgtgtcctgtgggctggatttgacagaaagcagtttgtcactgaaatataattaagtgataatctcctttcattgtcaaggttaaaatggctttcatgttattcccaacctttctaacaaagaattaagtctaaatgcaaaatgtttaactgatggttttggttcaactcctcctgctttgtgtttcactaactgcacctgtcagattttcatctcttatagttctcacatttcaaatgtgcatgttatggtaatactgagtgttattttttaaaaataggtttaagaaaagtatttcttaaccaaataaatcaatcttatcagaaatctctctacaccttaactcactcctgcgtttcagaaattcctcaggctacatataccacatggcatatgaagcaatactgaactacagatctagtttatttatctgcatgcctttctgtcaaattcacgcttgtgtgcataaacacttttttttcttatatatgctttctgtgccgaggaaagttcagcatttggactctgcaggttggagtcagcatttctgtttattcaccactaaagtagatatccccatgttagcgatttttcattgaacaaaggaaaggttttattcaaatgacctgacaatatcaggatatcaagaaaaatgtctttggaattgtttttctttttttaatacgaaggttttgagggaaaggatgagagaagagattggccaccattttaaatctgagaggatcacaaggtactgaaaactcttcagcctcataaaatcttgccgcactgagtgcctggtaatatcctaaaaacaaaccacttctgttcaaagaagaaaaaggtcattgttgtggaaataacactttgaggttggcttagcatgtggttttgctaaagtagaacacttaaaattttcagattgttagtttttttctttaggaaacagaaactaaagatcatttctgactaccaacagcaacaacaaaaaaaagaaaaacagaaaaaagctttctaatatgaaatttacacattaaagcttgaaactgactgtattggacagccaccacattaatttcaataaccagatcaatgaagcttgtttcacttctacctgtataatgcttaccataatcattttcttttagataaaagatttttccttcattattcagattttagagggaagtgggtctacctactgtagaaaaatagtgaatgagaaaacgtgagcatcacaggtttagctacaaaacaaagaggtctttgtcatcacagttgatacaggatacatctctggccttgtcggagtcttacacttgaggatctgctgtcccatcttccaggtagggacactgagtttgcatttgcgccactgcatagtggcccaaagctaggggagcgtggctggagcaggctgcgcagttgagcagacaccctcctagcagaagagaaagtccagcaaaccagcccagaaacagggcctccccaaactcccacctggggacaaagtctgggacgttctcatcccagaactcctgaaccgtcttgtgggcaacccaagagacgggaaccagggctgtgattcccgaggcccaggacagaattcctcccagaatgagcagtcgcctcttgagatctctctgactctctccaattctcaaacagtccaggccaaacccagagaccagcaggcccagaaatcccagcccatttgacagaaacattaagatcctggagaccctgagttcagcaggcaaagccaggaaggagtcaaagtccttgcattgcatccccacttcctcttggatgacacaggtttgccagagtcccatggtccagttttccatttcatttaagtccaggttgaggttcttccagtgtggcaaataagttgtaataatggataaaatccatcccaggagagatagtaaaagtccaacagattgcattgctgttctaaagattaaagccattgcgacaggtcttaggactttgccacccctataggatctgctgtcctttgtggttgacggtaatgtgacaatcttggttctatgctgcctggaatataagctgtggtcattaactctttgggcactctgaaatgcgtttttgttcttcttgaatataatgtttcacgtaaaggacgaaggactctgttaaaactatgagttgggctttctgataaggacttgatctgttaccttccaatttggtaaaattatatccccaatgcttgatgattataagtctaaggatgaacaaagagggctctatgacccctcaccctaaaatacaacagaaatctttgtgcttcagtat

SEQ ID NO: 316773 - DNA, 4001 bp, Homo sapiens
ccaaggtgtggccaagattgtgtttgtgtcctgtgggctggatttgacagaaagcagtttgtcactgaaatataattaagtgataatctcctttcattgtcaaggttaaaatggctttcatgttattcccaacctttctaacaaagaattaagtctaaatgcaaaatgtttaactgatggttttggttcaactcctcctgctttgtgtttcactaactgcacctgtcagattttcatctcttatagttctcacatttcaaatgtgcatgttatggtaatactgagtgttattttttaaaaataggtttaagaaaagtatttcttaaccaaataaatcaatcttatcagaaatctctctacaccttaactcactcctgcgtttcagaaattcctcaggctacatataccacatggcatatgaagcaatactgaactacagatctagtttatttatctgcatgcctttctgtcaaattcacgcttgtgtgcataaacacttttttttcttatatatgctttctgtgccgaggaaagttcagcatttggactctgcaggttggagtcagcatttctgtttattcaccactaaagtagatatccccatgttagcgatttttcattgaacaaaggaaaggttttattcaaatgacctgacaatatcaggatatcaagaaaaatgtctttggaattgtttttctttttttaatacgaaggttttgagggaaaggatgagagaagagattggccaccattttaaatctgagaggatcacaaggtactgaaaactcttcagcctcataaaatcttgccgcactgagtgcctggtaatatcctaaaaacaaaccacttctgttcaaagaagaaaaaggtcattgttgtggaaataacactttgaggttggcttagcatgtggttttgctaaagtagaacacttaaaattttcagattgttagtttttttctttaggaaacagaaactaaagatcatttctgactaccaacagcaacaacaaaaaaaagaaaaacagaaaaaagctttctaatatgaaatttacacattaaagcttgaaactgactgtattggacagccaccacattaatttcaataaccagatcaatgaagcttgtttcacttctacctgtataatgcttaccataatcattttcttttagataaaagatttttccttcattattcagattttagagggaagtgggtctacctactgtagaaaaatagtgaatgagaaaacgtgagcatcacaggtttagctacaaaacaaagaggtctttgtcatcacagttgatacaggatacatctctggccttgtcggagtcttacacttgaggatctgctgtcccatcttccaggtagggacactgagtttgcatttgcgccactgcatagtggcccaaagctaggggagcgtggctggagcaggctgcgcagttgagcagacaccctcctagcagaagagaaagtccagcaaaccagcccagaaacagggcctccccaaactcccacctggggacaaagtctgggacgttctcatcccagaactcctgaaccgtcttgtgggcaacccaagagacgggaaccagggctgtgattcccgaggcccaggacagaattcctcccagaatgagcagtcgcctcttgagatctctctgactctctccaattctcaaacagtccaggccaaacccagagaccagcaggcccagaaatcccagcccatttgacagaaacattaagatcctggagaccctgagttcagcaggcaaagccaggaaggagtcaaagtccttgcattgcatccccacttcctcttggatgacacaggtttgccagagtcccatggtccagttttccatttcatttaagtccaggttgaggttcttccagtgtggcaaataagttgtaataatggataaaatccatcccaggagagatagtaaaagtccaacagattgcattgctgttctaaagattaaagccattgcgacaggtcttaggactttgccacccctataggatctgctgtcctttgtggttgacggtaatgtgacaatcttggttctatgctgcctggaatataagctgtggtcattaactctttgggcactctgaaatgcgtttttgttcttcttgaatataatgtttcacgtaaaggacgaaggactctgttaaaactatgagttgggctttctgataaggacttgatctgttaccttccaatttggtaaaattatatccccaatgcttgatgattataagtctaaggatgaacaaagagggctctatgacccctcaccctaaaatacaacagaaatctttgtgcttcagtatggattaattagattttaagtggtgataaaaggccagctctttctacaacaggacttcattgtaagagctgaatctgaaatttcagggatgcaaaacaaggtcttgtaaagaaaggtagactgtttcctataatctctattcttctcagacttccttaacctacacaagagcctggcccacatcctcgagtgtcgcaggagctcagagttggcaggaaggttcctcggattcctttgaaaggtagaggctggcttacgggactgattaaaatgaaaaggactgaggctgatgctgggggctactgagtgcggaagggaacgtcccgggcagttccagcattcactctgtggttttctccatcctcgttaaggacttgggggtaaagcatgatatcttagcgtccagggaggtgttttttgtccagagctgagctgtccccttgtcatttcagcagcttacgcagagcaacaccaggcttcaagactcctgccagctcccagacaaaagtctctggtacaaacacaatagccacaatggagctgaacttcgaggcttcatcttgtttatttttttggttgaggccacaccttgagagcatacttacgcagagggttgacccctcagagaacacaggaccggcctcacaggccaggacaagaggtcacctgccccagattcccagggctgcaccgtctcctctccacatggcccctgggcatcctgcacctgctcagaggagataaaatcagatgggcccacaggacagaaaagtccctaaaggtggagccactcccctgagaggttctaacctggagaagtagaaccactgcccatcacgttgcaacagtggagtgtagcccaggatcagaaattatcttctattgtgtctctaaataggagatcggagagacagaacatggatcccgatgtatccaaattactttggataagattgcataagatgtagatttgaggtggtactttcttcagcttttcctatcatcttaagtttaaaaagaaaaaactatgcaccagatgaactcttccttaatttttacaaattttcagaattcctgaggatgtattggtgcccccaccatcctgaaataagtcattccagggtgcttaaaggtacctggatccagagggccggagacctgtctggggcctcatcaccagtgcacaggatatggcaagcttgagctctcttccaggaggcagtcggggtggtgaaggcctggagagcaagtgggaaagatcatagggagatgattcttaatatcacagtgaaacgctttttaaaaacctaatggaataggctgctccgtgacgtagtgagctctccctgctgcaggcatctaagccaaaggttatcacctgccaaggttatcacggaggggatttctgctgtggtgggtgttggacctgcataacctctgagcaccttcccaattcatttattctgtcagcattaaaaaaatatgttgtgggctgggcgcggtggctcatgcctgtaaccccaagacttttggaggtcgaggcaggcggatcacaaggtcaggagtttgagaccagcctgaccaacatggtgaaaccccgtttctactaaaaatacaaaaattagccaggcatggtggcgggcgcctgtaatc

SEQ ID NO: 316774 - DNA, 4001 bp, Homo sapiens
tctgtcacccaggctggagtgcagtggcacaatctcggctcactgcaacctctgcctccttggttcaagcgattctcctgtctcagcctcccgagtagctgggattataggcgcgcgccactatgcccggctaatttttgtatttttagtagagacggggtttcaccatattggtcaggctggtctccaactcctaacctcaggtgatccgcccgcctcggcctcccaaagtgctgggattacaagcgtgagccaccgcgccgggccttctttcactctcaacacacctatttaacacactttttgtacatgctatttcttataactgcgatgcctttctgctgttattcagttttaatggctgactgaggatccgaccaacactggtatattccagaagtggtgtttgacaatcacctattacttaaagttttagttgtcatgtggcttcaggaatgcaatgtagaatgatataataaaaagtacacccaacatggcacaatcgcaccaagtttctagttttattattaaaaagacaagtgataaaaactgctgtgggcctgttttctcatttgtgacgtgaactagacaatccaaagattctttaaagttcataattctagttttctatttaaaaacaccagtatttattaggtacttaaaaagtactacagctaacttacaacacttcaatttctagacaaatgcatcaacatacttacatcatttacacacaataattaaccttatcaactagctaagacagagagtacagaatatcttgttctgaggatttggagatgagatctaaatgttactggaagatcaaaccaataagacgtgaaggcaaaactccaaactgaaaacaggtcaaacttacaatgacccaaaggagggctacctcgagtgatgtcgacatttgtaaaacaagcaaaatcatcagatgagatcgggattttgcctgcttttaagcaacaaaaagtttatacgttaatgaactcttttctaatttgagacttcttcctgtggccacgttatttaccttttctctcccagtcctgagctttggttgccatttgcttttaactcccaagcaaacacctcctctttgttgcttgggcagatgctataaataaaatcagcgaaagtgtctgattgatggtaaacaggcctggggcgataatgagtctagtaattagggcctctctggattcaacccagccctttcgcccgccccccggcggcgcacaatgggctctgcgcgggtatcgagggagcggccaacagtccctggccccaccgccgtgaagtggggtcccttcgcttccacataggtggagactgagacagccgagcctattttgatctcgtttgggtttctgtaaggagcagtcagcagagtgagcagcgcccagacgcgccccgggccccctctacaaccattgggagagcgccccgggctcaagcgtggaacggggctgcaatggcaaccgctggaataacggcctcggctcccggtggctcctcaagcccgcaggggaggccggccgggctaggcacctagctgtccccgtgctcgtccgccccagcccgggcgcagcaggtggatgcggcggtgctgaagacacaaagggtcccaggtggcaccacctcctgcgtccacccacggggccgccagagcccagtcaagaccctagctcgctgcagccccatcgccagactcaacatccaccctcacttggccccgaccggttcagccctctggcggcaaagtaacggggtgcctgggggaagcagcaacgactccgcttcctcaccccaatctgcgcgcaaagggcagcgggacagcgggaacgcggcctgctgctcacgcacctctcttgcggcctgttttcggcagtgacagctcagatgtccaagtcgttgccacttggtccccgcgtctcttcagaccagtcccgccggcggccgcgcagcagcgactactaaccgcgcgtgcgcgtgcggtggcgggcgggaggcggtggcggcccgaggtgtgtgctacgcgctcctgctccgaggggctcaaccgcctccagggggagccgcacatggagcctgtgccgccgccggccggttgtggcctggaccccgctcccgggttagcccaggaggaattccccctgcaagtccgaagacttttcctcctctgagctcccgccctctctgcagaccgtgctacctcctgttgcgcaatgattgggtcctgaattttatgtaaatcatatttatgaacaacgtccagtaataagtgcagcaagattagggctctaggttttctccagagttctagatgttaacagatctgcagtcatggtgattaataaggagctttcctgtctggtgtgtgtatatgacaaatacagatgcgttaagtgttaataaatacattgtatataaaacaatatgttctttttctctcgaacaacactattaataagagctgctaacatttattgtgttcattgtgctctaaggggcttacattcattgtttaaccttcgtggcaacccaggtgatgaaactgatggcaacttgctcgaagttacacaacatgtaaacagtggaaacgggatgtaaatcaggcctgtctctctcagagcctgtagtttcaaacacattgaaataaatcttagcataaacgtagtttatgctatgattatgcaatcacaagctgctttgccttttatatattggatcaatattaattttactacttaatattttatagtaaatcttgactttgaatttggtataacaatttaattttattggaagattaattaacaacatttaattgacttgtgagtctaagacccttgttgaagagtttcaatcttaagggtttggtggcattccgtgcacaacgtatcattattggctaggggtcaagatcactgagttttttcacattgcttcactaattaagaccagcatttctaaacttttgactttgtcatctctgggagagtgtttggatagtgttaaaatttactggttaaaaagacattttgtttgagatactttgtaacaatattataccctttatttctttcttccgtccttctgacttctattattcaacatacttctgtggcccataacaaatacacttgaactgctagagagggattttttaaaggatccattcaaagtttgcagtgaggaagctgaaaactaaaaatgtaagaatagtgaatttttgcaagatttagtagtatcttcttggtcacatagtactcaaaaccttgagaacatttttttactctttggctgctacattcactgcctccataaattaaactctaactccataaaatcatctaaaagaggtcctcaccccctccagtccctgtgccatttctctagtttagattctcactactttagaaactgttgttcagagttacctaactagttgccccccttcagagcctcccacctacacttcgtagtttaatcctcagctcattcaatagtttccaatgacccttcattacccacagcatgaaatctaatctctaaccttgaaatttaaggccttaacatatctccaaaattatttgccacttattgaaaggatgattgaatataatatttataatttgtttaataggcaacttttcatcagaataatacaatgtgataatgtcagaggagaaagaataatctgcaaataagacaaggggtatggcttttgagagtgatgtagtgtttaataatacaagcggaggagtcccagaatgtaatgctgaatggtagagtcgtgaagtgttctgacacatcaaagttgaagagagatttgggaagagaccaaggcaatgtaatcaagattggagggactagagtaatcagaaatctagaaaaacataaaaagcaggaaaggtgacctggcatggtggctcatgcatgtaatcccagctctttgagaggctgaggcaggtagatcacttgagccg

SEQ ID NO: 316775 - DNA, 4001 bp, Homo sapiens
ctaatacgtgctctgcctacttcattaagctgttaagatcattcaagaagaaaatatgtattcaaaggcctacattacatagggctatacaactgtggaatattaccattctctaatgagattattaaaatacaatatttgtaaacttatgtgtattaatcaattctatgttgattgtggtcatgttttaagaataaaatcagaactgatttggagtgaggaaaggaaagtaatggagaaagaagtcaacacttactgaatacttgctaagtgttaagaatgcaccatatttcacgtaatataaatattatattattgaggctaaataattgtcaatacaagtcttatgagatcttactttattaaaaagggggaggaaatgaggatcatatatgaaacaacatccctggtccaagtggcagagtcaggatcctcaccattttgatcaggcgtcaaatcctacagtctttctaagacagcacctgactcatggcaaagtgatcgagaaacagaatcccctggtgttcaggccagagctggccagatggtacagaagattataagcactggctttcaaatggtcttgcctatacagtcatctgagagggcttgttgggaataacaaagaaatactaccatttagatggttggtgtcagagaccacccaggagtgagtttagggatgagctctgtgaaactgcaaactaacactgttcaccattccaatcagtcagccaggaaaatcagtttccttctgaattctgttactgacattagtgactgaacaaccttgcacatattacttagagaactcaagttcttcacctgtaaaccagggaaagtaatagccagctctctaggtcagcaggagctgaaggtaagtaaatgccagttgccattcctacttctctagggcatactgtatcttaagcttcttagaggatttctgaagcgctgtcatttctctggtaggccttcaattaaccagctctaccatcgtcttcttgatatttgaaatgattattcctggtggtttgggaggcccctggaaatccaaagaacaacactattgaggagctgcgccacagtatagacagagacagccagagaaatagccatgtaggtaatagacaagtaatactcataacagagaagccaaatgagtaacactggtgtaaagtaataaaaacagtattgataaaaagttcaggcatatcgacaccttttaaaatcaaagtatccatattttgatgatagttattttcttttctgtctcattccagtttgtttgctttatccaataaaagcctggtagagatgactcccggcacttttcaagagtaagaatttaaccccaactttaacctcacttttgagctccttactcttgtgagtggaaggatgtctgcgtgattccaaagtctaagtctcctctacaccaaagcagaaagaaaatcgtattactttagaaaatgttaaaaatatatttccacagggctccaggagttaacttatactttgaatgacctactttgaatggaggctttctttctagagggcttacttaatgaaggtcagccaggaaagccagccatggggcctggtctttagatttcagttgcaaacagtcggggagtccaagctccaggaaaagaagattgaaaacatttagtcttttaattttctgtgggtaggtatcctgattctttctcccaaaagaatgaaaggatctttaacaattgagttaagggctttcttcttgctcctttgatgctatatataaggcccagacttccactttagaaacacatttttacttgctgctcaggtctttcctgatgatcatttatgacaaggagatgaccatgagatcctcactcagaagaactggcctaatgagtttacctgaacagcgtggagagcaccaagggatctaggctgaggtgtccgtctcctgtgaggaggggcggcagtgcagagaccttggggcactggaaattagtaaggcggtgggttgaattcttctcgatgctaagcagtgcccttcagcagaaaacctcctgataggtccgttttagacttggtttcctgtgaaatgcagccacagacctgagaggtctgacctgagggctggcaggacttcctcttcttaggctggagtgcaatacgtgaagctttcagaggctgaaatcttccaatgcaaagggtgtttttaaagacacacggtgtccttatgtggcacttcatagttaccagaacacaataaaaggaactgctgggcaacactcaagcatggaaggtgggttttgcgagtctcactttatatgaatagtggacattaactatcatcttttggcttaattttgcaatggcttcctgagaccatcccagacacatggaccaggtgttaaggaaagaacctgggaactaaaggagaaatgcctgcctcttattcttgctgtattaattattagctataggatcttgggcactttgaagtttatttctcaagtagtttgagtgataataatatttgtattttagaaacttttttaaaaaatgagggataattgaggattatatttccttcattgaggaaatgatatttcctcaattgtgatggaaggataatatttatattttagaagtatttcaataaataaacaaaatattgtaaataaaggcatgcagtaatgtttgggcacatatcagttgcttaatacattttctttcggccttaatcttggtccatttaagctgatcttgccgagtgcctgtttcctcttctggagacttgacattctagttttatataaattgatgttgaattccataacaaactccaacattatttacaataaattcaaaggtagaagtttatattttcttgggtaaataactctggttttgacttaacagacaccccaaggaaaacatgaaaataagcactctttgaatgctaattgtgagtcagttacattgctaagcaacttgcaagcattatcctccttaatcttactaataaccatgtaaggaacatatgtaaaatcccattttgtaattgtgaaaactgaagactagggagactcgagtagtttaaccactttattaattagcttttgctgcattaggggcttaaagcagtaaccactttatttagttcataattgtgtgtgtcacttgctcacttcttttggtctggacccatattaattttctggggttttcataacaaaggactgagccctgagtggctaacaaaacagaaggtcaaattgtattgtctcacagtctggcctctggaagtctgagatcaaggagtcggcaaggttggatcctcctgagagccatgaggagaagatctgttccaggcctttatccccggcttgtgggtgtctttgtatccttgtttttgtgtttacatggcattctccctgtgtctttgtccaaatttccccttcttatcaggagaggagtcacagtgaatgatggctcaccctaattacccaattttaacttgattacctctttaaagacccagtctccatgtcagaaggcattccaaggtagtggggggttaggactttaacaaatgaattttagctgggacgtattcgacccataacaagacctgatcatctggtctgtgctagtgggttgagaggcagttggatgatctaagattatcacactcatgaatctgtttgttggcaatcatgtcagccaggtgcctctgttctcctctgcatagcttcctgttatctagtggccagctaggcccatgtacacggtgggtttggggcactaagggcagtgggagaggggaaactccagcctccagccttttccaggcctctgcttgcatcctagatgccatggtcccattggccaaagcaagtcacatggccaagttcagagtaaatgtgggagaagactattcaaggggtgaatgaagaaaagtgaattattgtggtcttcattggcaaataatctaaaaatgc

SEQ ID NO: 316776 - DNA, 4001 bp, Homo sapiens
aaaaaggaatactggtaatattacaaaaatgcccacagcaactgcaatccattactcactattcactactttcattacacaatattagtcaccagggggagtttgagggtcccctcccaaaattatatctcatctaacagctgcctgtgcagtcttaacctcattaaacaggttttcaacaatccagtcctaaaaaaatgttcattttgtacactttcatgagaaacaaccagacacacacacacacacacacacacacacacacaccccaatttacctttcactggggttcatgtttgatttcctcaaaagaaagaaaagtttcccaacctgaaaagcaaactaacctagacaatcaagtttactagcactttaagggaatgttcacatcctcctcataattgtttgtcatgaaactttggggttaagtaaaattttacccatctatgactcctgaaaaaaagaggagggggaaacacaaactacactctgaaagcagcataatccagccataatgccaaatgtaaacagtcatatattttagcaaggcaagatataactaaacatctttaaaagataaatgcctgtgacctctgcaatcttaaaaattaaagtgtaaatagtcataaaaggtatcccaaacttcctttttagttgattttcctaaaaaatatgaaaagcaatcatattgaaaatgactcaaatcaccataaattaggcaacaaaaatcacacaaattatttgggggaggaggatttttgtttaatccagtttatgagtccataatacacacaaaaatttgaaaacatgaagacatacacataatacatctcatttcccaccattccctcagactatttctccctctcctctattgttagttttctaaatcctcccataatttctttatataaagagcaaacataaacttgtattattacacctcgcccttaagatgtaacacactattcacaaagtaccgctacaccttgcttttttcacttcatagcaaatttttgcaatctttgcatgttagtacgtagaaagcttccttattcttttttcataactgattacgcctagctttagaacattttcagtctgctttcttcaggctaactttttttttttttactttttttattattatactttaagttctagggtacatgtgcacaacgtgcaggtttgtcacatatgtataaatgtgccacgctggtgtgctgcacccattaactcgtcgtttacattaggtatttctcctaatgctacaggctaacctttcaagacattctgttcagccaaccacttatcacaggaattaatttccttcccccaagctttgaaaaccaatcagatttgaggtgtcccaagggataagtttcagagaaagcaattcattatctaaattacatccttttaagaatgtttattttcaaacaggtagaggggaatattgcacaattttctctaatcgcttaaagctacaaatcagaacgcaatcttcaaagtgaaattacctttgatttggggggatcagcgttatagtcaaatcaacgactgtaaaagtttacttcttgtgcttttcttccactgtaaaaatttttttattttttaaagaaggctaaaaagccttaaagtctaatagcacggcattctaatagcaggaaaccacaatctgatttgatctttcatctgccaggtcagagactaggcttttatcttgcagaattaggctcacctaccatcaacaagaggacctctacaaagctacaaacactttcaaagaatataaactctgcggcgctgcgtgtaggaaattacactccaggggccagagcgccagagccaactccagaaaacccagcttcactggcggaaagaaatctacaaacgccagcggcggtgacggggaacgggaagcgcgggtggacggaagaagagaaaccgagcgcctcgccgccaaccctcgaacccgcgcgcggtcgctggagtcagacgctaatagccgcgcgctgcctaggaacggaaccccggaaccaccaccactaacggaaccagcccgcggccggcaacggcggccgttcggactgcggactgcggcacgcgggccgggcgccgggagggcgggggttccccggaggagctggccgccccggcgccccattgggcgctgctccaaacgtgcccgagtggtgacaggaataaagtgggtcacaaggcctagcgggtccccagcgaaagctctctcggcacccggtccccgtctttccccgcctcccagctgctggaatcggccgcagctccgggcgccctcaagccgcccggccccgccgtgcaccccactcccgcccctgccccgcaggtaaccccagctgccccagagggcctctcaggcagggcgggcctcggcccgaagtcccgggaaaagacacactagaacgacacgccaaacttgggcttcagctcccgccttccccacccttggccgccgccccccggccccacacacgccgccccccgctccctccccttccccgcgccctcaccgtgtggcttgcggcggctccggcttcttccctcccccacccaggtctcccgctgcggtgactcggaaccactaccccgcctgtgtccaggaggcgccgcggctcccacctccagcagcacctggggctgtgagtggcgccccccacccacccccccaaaaattcgccgctcctgtggccagctcctcctccccctcccttcccttcccctcctccaccagcccaggagcgcgcatgcgccgccaaggaagccaaccggcactcggcaggccctgggcccaccgggcgggcgcctctcaccgggagcgctcgcggcggcggcggccagatttccttcgcgctctcgctctccggggtttccttttttaaaccggcagccgcaagccgagtccgtgattgcgccccctcccggcgcatgcgtcgtcagcgaccccgcgggctcagacggccggcggaggctctgcgctcgcccctcccctcactctccctttccccagcgcggctcggtgcgcatgcgacttgccccgttaggcagcacggagccgcgccaggggatcccggacgcccgaagagactcccgcgccccttgggccgaaatctggctctgcaggcgcaccgttccctgccccggccgggaacggcgccggttactagaaagccggggaggcggggcctggtcgggtggagggcgcggccggccggcagagcgctagccttaggtcctggaggctctttggctttccccccgtatgccgggggctaggaggaggaagaagagcttcctgccggatgagggatccagaggccagaaaaggaacccgctctcccttccaaagcaaaacactgccgacgccagcttagatttttcgggtgttggcaggagactttttcccccagtggcatcattcgtgtttcctctcctggtgctgggagagaagagttgcaaaggcgcctggaccgccagtaacatcttctcccatctcctgagggagcgcggcttgggttgcttcttcttggtgggtgggcctggggagacagggcatgcgccctcggccagaggagggaagcgaaaggaggtcgggatttatttgctcatttggagatttttcccttgcccttttattaaaaatcaagtgacagtgtaatggaagatggagaatgaagcatcagaaataaaccaggaccctaatttgcatggatttcctcgttggaacaacgtgtgactactacttatcttcgggaaattacttatcttgatgcgttaaggcacatttggtccacatgagaaagcacatttcagtgcttctactggaaaagagatctttacagtcttaattcctagtaattcctatgttttaatgaatatcttttggatttgaaataaaagccatctttttctttcaaaaaatgcacttttctggccgtaaaatcctccctttaaagtaacagtca

SEQ ID NO: 316777 - DNA, 4001 bp, Homo sapiens
taccgctacaccttgcttttttcacttcatagcaaatttttgcaatctttgcatgttagtacgtagaaagcttccttattcttttttcataactgattacgcctagctttagaacattttcagtctgctttcttcaggctaactttttttttttttactttttttattattatactttaagttctagggtacatgtgcacaacgtgcaggtttgtcacatatgtataaatgtgccacgctggtgtgctgcacccattaactcgtcgtttacattaggtatttctcctaatgctacaggctaacctttcaagacattctgttcagccaaccacttatcacaggaattaatttccttcccccaagctttgaaaaccaatcagatttgaggtgtcccaagggataagtttcagagaaagcaattcattatctaaattacatccttttaagaatgtttattttcaaacaggtagaggggaatattgcacaattttctctaatcgcttaaagctacaaatcagaacgcaatcttcaaagtgaaattacctttgatttggggggatcagcgttatagtcaaatcaacgactgtaaaagtttacttcttgtgcttttcttccactgtaaaaatttttttattttttaaagaaggctaaaaagccttaaagtctaatagcacggcattctaatagcaggaaaccacaatctgatttgatctttcatctgccaggtcagagactaggcttttatcttgcagaattaggctcacctaccatcaacaagaggacctctacaaagctacaaacactttcaaagaatataaactctgcggcgctgcgtgtaggaaattacactccaggggccagagcgccagagccaactccagaaaacccagcttcactggcggaaagaaatctacaaacgccagcggcggtgacggggaacgggaagcgcgggtggacggaagaagagaaaccgagcgcctcgccgccaaccctcgaacccgcgcgcggtcgctggagtcagacgctaatagccgcgcgctgcctaggaacggaaccccggaaccaccaccactaacggaaccagcccgcggccggcaacggcggccgttcggactgcggactgcggcacgcgggccgggcgccgggagggcgggggttccccggaggagctggccgccccggcgccccattgggcgctgctccaaacgtgcccgagtggtgacaggaataaagtgggtcacaaggcctagcgggtccccagcgaaagctctctcggcacccggtccccgtctttccccgcctcccagctgctggaatcggccgcagctccgggcgccctcaagccgcccggccccgccgtgcaccccactcccgcccctgccccgcaggtaaccccagctgccccagagggcctctcaggcagggcgggcctcggcccgaagtcccgggaaaagacacactagaacgacacgccaaacttgggcttcagctcccgccttccccacccttggccgccgccccccggccccacacacgccgccccccgctccctccccttccccgcgccctcaccgtgtggcttgcggcggctccggcttcttccctcccccacccaggtctcccgctgcggtgactcggaaccactaccccgcctgtgtccaggaggcgccgcggctcccacctccagcagcacctggggctgtgagtggcgccccccacccacccccccaaaaattcgccgctcctgtggccagctcctcctccccctcccttcccttcccctcctccaccagcccaggagcgcgcatgcgccgccaaggaagccaaccggcactcggcaggccctgggcccaccgggcgggcgcctctcaccgggagcgctcgcggcggcggcggccagatttccttcgcgctctcgctctccggggtttccttttttaaaccggcagccgcaagccgagtccgtgattgcgccccctcccggcgcatgcgtcgtcagcgaccccgcgggctcagacggccggcggaggctctgcgctcgcccctcccctcactctccctttccccagcgcggctcggtgcgcatgcgacttgccccgttaggcagcacggagccgcgccaggggatcccggacgcccgaagagactcccgcgccccttgggccgaaatctggctctgcaggcgcaccgttccctgccccggccgggaacggcgccggttactagaaagccggggaggcggggcctggtcgggtggagggcgcggccggccggcagagcgctagccttaggtcctggaggctctttggctttccccccgtatgccgggggctaggaggaggaagaagagcttcctgccggatgagggatccagaggccagaaaaggaacccgctctcccttccaaagcaaaacactgccgacgccagcttagatttttcgggtgttggcaggagactttttcccccagtggcatcattcgtgtttcctctcctggtgctgggagagaagagttgcaaaggcgcctggaccgccagtaacatcttctcccatctcctgagggagcgcggcttgggttgcttcttcttggtgggtgggcctggggagacagggcatgcgccctcggccagaggagggaagcgaaaggaggtcgggatttatttgctcatttggagatttttcccttgcccttttattaaaaatcaagtgacagtgtaatggaagatggagaatgaagcatcagaaataaaccaggaccctaatttgcatggatttcctcgttggaacaacgtgtgactactacttatcttcgggaaattacttatcttgatgcgttaaggcacatttggtccacatgagaaagcacatttcagtgcttctactggaaaagagatctttacagtcttaattcctagtaattcctatgttttaatgaatatcttttggatttgaaataaaagccatctttttctttcaaaaaatgcacttttctggccgtaaaatcctccctttaaagtaacagtcacctcagtaaacattttcaattcttgctgtatgctctgggcaaaagaacatcaaactgaagcacttattcagatccttgatcctgcacctaaggatttttctttcaggagtgggaaaacatgatttgttaatttaccccatcatatagcagaagatattttggtcgacatttttgcctgttcagcattcattccctattctgataatttcttttgaagaactatcatttatccactctcagtccatatggtctgagcaggacacaaggggaaggcatatttgagtttaatcctcggttgcaaactacggttcctaagaagggtgttacgtctttaccaatgggtttaaatctgggagaatggagacctggagccatctttccacacgtgaattctgagaaagaaggcaacacggaaaaaaagcagatttgaagacaggtttggcctaaagacatgtttgaggcctggaaacaaatgtagattagattcctctggaaatttcgttaaaccagtcagtaaattcttgcatctgttttattgcttaaaccagtgagaggttttctttcacatgtaatcaagagtcccgactgacaagaggtaggtagcaagacggaggcaaagttattaatactgataaggtaggttgcagccagacaagagagggcttgaatgctttccctaggatggatttttgaattttattctagagacactgatccctccttatattccccatcatctagaacatattatcttcaaaatacctttgccctttttaatgatttcattgtcctctcagtcaccaagatcaaaccatgtccatctttgactcctccctctttcactgtatttaattatttaccaagacctgttgataatcccccgtttttctgctcagtcctctctcactgcttgaacatttcccatggttcagttcacagcttctcctttctcccacattctctccaagaaaagaaaa

SEQ ID NO: 316778 - DNA, 4001 bp, Homo sapiens
gctggacagacttttgtcacaaaccaatgtctgctctgtgggctcaacagactttgtcccagctcactgtatgttctttaagcccattgaatttccctaaaaataatttactagtcccctaaaatcatccacacttccccatctctctttcccctaagatgaagaggatacaaccacctgtaccccattgagatagcggacaatcactctgtgatttttcccctatgcatgctaataaatgtgtaagccattttccctattaatctgccttttgtcagtagattgtttagagaaccttcagagtgcaaaggggaagttttcttgacccctaaagtcccgaagacatcctttatagcaaagcatctagttcagaatcgagtagtccatgtagttgtcatggttagcttttagcatttcttttttttatttgtttatgtgtgtgtgttttcaagttttatgttataattttgatggagctatttgttcaatatccagggtctaatctaattgctaggtaaatataaatatgcccagacatattgatcttgaatatacataacaaatgtaaatttttgtgtgtttaaatgatgacaatttgtattatatttgtcaacggttccagctttttgtccttataaatttaatacgacatttaccttggccagatttctataaactactacaatactgaaatatagaaatcaaggaatgaatacaattctgtatcaccctacattggcatggtattgattaattacggttttgtgcagacacttttcaccagtgatctcatcgattcaaaaggcttgcagaatattgcctgttttgttttttcctttccagaagcccgttcctaagtccagcttggattcctgtttgtgcagactgctctgcttacatcctgggcagctctgatgctacactgaatgccagccaaagtcggtgcccgctcacgttcacagagaacaggcaagtgccttgcttgaggtctccccaccagtaaactttccagtaggggtttcagccagggtagtctgattccagaacccaagcacagtgcccctttgcattttctcagactatgaagcttttacaaaagtagatgtggaaagggtcatcatgcttcccaaaggttcagttctgcaggcagcctccacccacttgttgtggtcatgtggcatgggtctggagtccggctctactgtttcctggctgggtgacctcaggtaagttatgtaacctctccaagcctcagtgtactcctctggaaaatgggaacattaacaattccttctgtataactttgttgtaaggctttaaggagacaagtggcgtgaggtgcttacaatgtctgacacgtgtaaactctcaatattttaatagtcataattaatagaggtaaactgcaaaaatgcacaaatccttatttctaatgtttctatacatctctacagaaaaagaaaaggaagcaaggaaggaaggaaagatctttttgatgtggatccagaacccttggctcactgtggactttgacattatgcctgacgttgaggcagcagccaaattccacaatgagacataagcactcttacacattaacaaaaatgagtgcctagaatcagctttcatgctcccaatatactcactcgtgaattgggattggcggcccccaagcccacactgccgcactttacaccctcggaagagcccgtagtaaatgtccccaatgaacttgaccagctctctgtctgtggcgttgaccagatccactccagtctgacaaaggattttcccactcagccagtggggcactaccagggcaacgatgatcaggatgaaggaggagaagctgagtaaagacgccagcccataccacgcctttttgaaccatccaggcatgctagtgggtgcaggtcatccccaaggtctccgagcagcagcgagggtcattgacatctttcagatactcggcaatgctctgctccaaggtcagctcttccaaacactctgtttcaaggttgtaggtccatcctctcgtcctccttcagcgcaagcttgcacagtccatgcttcctacaaccacatccagaagcctctacagagacaatcttcacctgactatgtagcggagtgtgttactgaaggaagtaaccttatatctcctcctagactaatgtttcagcagactgtttaactgttcctcgtttcaagtatttaaatagccctggtgtggacctcgtaatgataaaggagttagtaataagcaaaatcaggtagctctgaagattaagagacgcaaaccaatctcaaaaaatgcatgtgttagaaggaaaacaaaaacagaatgattagcacttgaatattgccaacaatgcgcagtatcaaatgtcgatctcgctgatgcatgggtgccctggcatttctttctctgaaatgtcactgctgtcagaatctttaggactgttattaataccatcaaatgaccccggttcttggggctttaatattgaaatgtgtaaatagggccttatgaatttctcactgtgtgaatctgctgggggtaaactgtgactagaattactttgtggctgttggggtagcctggaatccaacacttaacattgctctcacccgtccctccttctacgttatctgaaatgggagagaaaagtgtttttctagtgtattagcaaatagtagccacactgctggggtattcatctcttctaatagtggaagatctaggctttccttttaatctgtagatactaggaatgaaatattctttcctttctatcttatactgtggactttgacattttgacttttaccttattcctgaatatcaacttaacatcatgtgagactggcaacagtcactctatccatatctctggggagcaaagttgggcaaaagtggagcagtaaaatttcttagttggtcacagaagcctgaaggggggttcaggaagttgcactgttaaccaataggggtcccaggaatctcacttggagagtgtcaaggaagcagagggacacattaatggaaatgtcagtttccttcctcgcaactggggctcacttcagtggccactccacaatgaaaataaaaatgagaatttctgagcctgggcaatgtagtgagaccttatctctacaaaaaataaaaaaaaaaaatagttgggcctgatggcgtgtatttgtagtcccagctactggaggctgaggctggaagactgctccagcccaggagctcaaggctgtagtgagctatgatcatgccactctgagtaacagagtgagatcctgtctcttactatatatacagatgagtggcactttaccatgtacaaaatgcaaaatgctttgaccatatgcttgctcacctctgatgctccagcaaccctttaaggtaaacaggagatgcacgatttcagccatttctctcatgaaaaactggatgtcagtgctggggctgaaattcaggtctttgaattacaacagctcatcttcatcccagtgactttgaaacagcaaatgtttttctggtaaaaaataacagaatacatataaaaggctcagaagactgcttggcacattaagtgatcaataatgttagttcacgttcttattttaacattaagcatgctttgacaagtcaggacttgcgtaaatatcattgagtcatatttctgccgtcagtgagggacctgtgtcaacttttggtgttttgagggttaagcaattgttttcagaaaaactctaagggaaacacttgattcccaacaagcctttgtcttgctgaacaaaggtgtggttaagtggaactctagctattgaagacctgtgttcaaattcccactcttccagacaagtgtctgtgactctcatgcctcagctttctaatctgcataggattatcgtgtggagtaaagtgaaatagcacaggcagatcacttagcgcagtgccttggatataaggagcactaaatagatggtgc

SEQ ID NO: 316779 - DNA, 4001 bp, Homo sapiens
aacacagtgaaaacagagctcccgtacaaagggaggggacccaaagggggttgccattgctggctcgaatgcctgggtttatatcctgatcattgtccctcctgctgtgctctcaggcagcagatggctatttctttacctcctgtttttgcctaattagcattttagtgagctctccttactatctgattggtcgggtgtgagctaagttgcaagtcccatgtttaaaggtggaagcggtcactttcccagctaggcttggggattccttagtcggcctaggaaatccagctagtcgtgtctctcagttgcaatagatattaatgaagaacacagaattcagtcaactaagaagaaaaaaaattactaaaaaaaaaaaagacaaggtcctgggagagaaaaaaaacaaaacaaaacatgaaggtcttttaaatacacacatgcacacatgcacacacatgcacacatacacacacacacacacacatcttggatgttagcttttaattaagctgacttttaaccattgagttccttttttaaaaaaatcttttaaaatctcattactattgtcagtgaaaagagttgaactctaaaatatttgaagagctttattctgagccaaatatgactgatcatggcgcatgacacagccctcaggaggtcctgagaacgtgtgcccaaggtggtcagggtgaggcttggttttacacgttttagagaggcacaagacatcaattaaatacatttaagaaatatattggtttggtccagaaaggtgggacaatttaaaaccaggtgggtgtggggggcttccaggctgtaggcaaatttaaacattttctggttgacaattggttgagtttgcctaaagacacgggattcatagaaagggaatgttcggattaagataaagattgtggagaccaaagttcttttgaagtcttaatagtggcggcccttaaagacaatagatgaaaatgtttcctattcagatcttagttaatcgctttaggattgggaggatctggaagaaaaagatctagctatgttaacagagattctttaaagatgcaaattctcccctacaaagaacagctttgcagggccacttcaagatatggcaaagaaacatgttttagggtaaaataattttgcttttcttccttgtctcataatgctatgtcagagtcaagttggaaaataactcatgatatattggcttaaataaaacccttctgatgagaatttatgatttgtagggcatgactccccagacaccttagataggaatttgggcaagataaaaaaatcagtttagtccttactatatttcagctaggacaaattgctgctatttcagaagtaccaagtatcaaaccagaaagggcttgatttaggaaccaaacccagggctgttttggtaggaaaaaaaacaaaggcacaaccttagctatcgggtgggaccttagcagtgtgggaggacagccattgctttcagtttggcctaacaaaaagggtggtgttatgtaaacaaagcccctttagtagtcaaaatcaaaaatccttcctctttttccttttgctggccattttcctccccaccacaccatctttttttttttttttttttttttttttttttttagaatttagccacttctcaggccttcttccccataatttggaactttcctttggatttgatcaagttggatagagttgatcaaaccctgatcaagttggatagagttgatcaaacccaatgggaaaaagaccaaaacaacaataaaaaacagacaacaacaacaaaaaacagttaggcaaaacaaacaatggcacaatttatatgataactgagtgctctaatggtaaggagaaattaagaccagttggtcgttaatcttaactttaaccaagacaaaccccaattcagttacttacctagggacgagtctctggctatagactgctctctaccattcaagaagcaggaaaaacaaaacaaaacaaaaaaaaaaacactccttttccctgttggaagtgagccaaactccaacgtcatggaaacagaaaatttgtctttcttgatagaagcaagtaaaactccaaaaaagagaagttgtacagcaaaataaactttagatcttgaccaaatttggggaaatcagggattctctggagggggtgctctcagacctcagcaaattgtcctattggtttgagctgtaaaattagctcatgctggtaccaagcactgataagaggtttgccaaaggtcaggggcatctccactcagaatccctctgtggttaccaaaatgtgaaccccaaaaatttgagacaggtctcagtgaatttacagtttattttgccaaggttgataacacaaccccatgacacagcctcaggaggtcctgatgacatgtgcccaaggtggtcagagcacagttgggttttatacattctagggacacatgagacatcaatcaacatatgcaagatgaacattggttctgtctggaaagacgggacaactcaaagcaaaggcaggaatactggaaccagggacggggctttccaggtcataggtagataagagacaaatggttgcattattttgagtttctgactagcctctccaaaggaggcgatcagatatgtcagtgagcagaggtgtgagtttgaatagaatgggaggcaggttggccctaagcagttccaagcttcacttttccctttagcttagtgatttgggggctccactattgattttctttcacaactcaataacccaggaataattaagggaaaggcaagatggaggatgaattactcagcttactgttaaaattttctcagtgatataatttttgcaaaggtggtttctactccccagctaccacccctcttgtctagtcatcttattccttgccccagaaaccacagacctccctacaatgtagcaactcaggggttaaccttgacacaccaggaaccctcccagacctccccaagctcgaaagacctgtggccttgtcccttgaggccctaaggctctactaatcattatttattttgaccatcacccctgggtctaagtgtcctagcacaaagaccaataaaacagaagttggcattttagagggtctcagttattatcgcattctaatttttgagtcagaagagtaattttcctagaatcaaagaatgggctagttggagatttttttaatgctcttcttttagttaaacaaacaacatgattttgcgggggaataaatatcccccaactttatgtcattaaagacagtgtgtggtactataacggtattccccaaagtcatctagaaattatcaatgaaggaaaatacatattataaatttctgctaggcaacatttaaactggaaaagcagtggtcttaaatgagtttaaatattttttttctgaattttttctctttattttcagaattgaaaagcaagaactacaacaaaatgcctcttacctaaagtagaccttaatatgcaactgaaattcaataaagatacattttttaaagtctgttttgttttttaatgtccaattaccaaatgggttaagagcacatacttgaagcccagctttcttggttagcatcttggttccacacttactggttatgtgtgcataggccagttactcaatctttgtgtgcctccatttcctcagctgtaaagtgggggtagtagtatctaccttacaggattttcatgaagatttataaagcaaatatttacaaagagattagaatagtgcttgccacatagtaaatgctatccaagtgtttgttaaataaaaaataagcaccatagatcacgtttaccatcattactaatttttgataaagacaaaattttaagttggaaatccaaagaaaacgtttaaatagaagtctaagttttgggccgggctaggtggctcacgcctgtaatcccagccctttgggaggccgaggtag

SEQ ID NO: 316780 - DNA, 4001 bp, Homo sapiens
tattgatggggatatagtagaaaacaaaggaaagtttctgcctaggaaaatgcctagcgttagagtaggaactaaataaatatttgttgaataaattaataagtaaaaaatatttaggatgcagtagcttttttggaggtagttcttagacactttttaaaattttgctcatgatttgtagtcaacttaactcttgattcttaatttaaatttgacatttgtttttctacaaaataatttattttacccaaactttttagttttcaacacattaactttctaacttaaaaaattacctccaagaaaaagagagtgatctgcaatggctgttttgttgatatcttcaattaaagaggtttcttttcctttttgaaaaaatttttttctctaaggactagggtctgttatttacactttcctcattaatttctaactttgactgtggcctgtatagttttttgctttactgagattatttttgttaacaatgtttgtaaatgattccagaatggagaaaagagggcgtattctctaggggacataaggtacaacaggtaaataataggccttttaatttcattgacaccctaatacttcactccctaccctcttttatttgctgagtgggaaaatgacaatgaaatgagtgattggtgtttatgggtgttagccaagtgaaagaatgagtgtaattgaacaaactgattaaaggatatataaacaaaaagtcaaaatgtaaaaagcccgttttaagaggtatctttattgatagaaacattttaaaatcttgttttaagactgttcaactttccaatatagaatgaaatcactgatattttgaaacatgtaatcttattacatgatgaatgcagtacgcattttttaattaaagaaaaacatgacagtaattgataacagttttttatttttctttctttcttttttttttttttttttttgatacagcgtctctctctttcactcaggctggagtgcagtggtgtgatctcggctcactgcaacctcaacctcctgggctcaagtgatcctcccacctcagcctcctgagtagctgggactacaaacacatgccaccacacctgggctaatttttgcatttttttagagacaaggttttgccatattgcccaggctggtctccaactgttgggctcaaggatctacctactccagcctcccagagtgctgggattacaggtgtgagctaccaggcccagccaataactgttttttctgattaaaatatacacgcttatcacagttatttaaaagaaggcaaggtgatttaaattctagctccttcatagagtagtattgtatcctcgggcgaggcacttaatctcttcagaccacttattcatctctgaaaggggatatgcaggttgttataataatgttgataaagtatctgatacttaagtttccagtgagttggagctcttatttttaggagtgaattctttaagatttacatgagtttgatagtgtcctatctccaaattttagaaagaaaaatcagtatatgacacttcctttggggaaaaacatacctgtcaaaggtattgtttttgacttctaaaaataaaactaaaatttgtgaaaagcaggtagcatttactattttgtgatattcagattagcagaatcatattgccaggtagagtattcacttatctgtcaaaaagacagagaagttaataaaaatacaatcatagctgtatctagagagcacatcacatgaaaagcaaagcaaaagctgaaactttaaagagtcaaaacagaagtataagcatttgtgaaaaatataactctaattatcgttatcactgggttcttacctttggttgtttaagtaatataactttgtcttctagaagtggacgtcactggtgtatccaaacaaacagggatatacggtaaatcttgacattgtcaaaatccaggccctaattttttaaaaataataaacatgctgattttttccctttcctcaaagatacacaaatggctagttttcaaaattattcccagggaaataaacagttcgtcgcattgtcaaagtaggattttcatgactcggcattggatttgcggatttacacatggatgaaaataacagcaacatcattatcctttgcttgagtctgagcctattaatatgaatgagagttagaaataaaagaggggttctcaaagctacatctctcaacaaatttgaaagtaaaccacatgtactattgcctgatgaattttattaaaattatacctccaacttcacccagggttatcatcttgaaaatagcgtctaggttttttacaaagtataattacattttcaaatacagtgccatgatattaaaagttatttaaaatattagtaggatgcacttcattagtcattgatcttttaattgtctattttatggaggaattgcatatttgacagatacctagtcaagaaataaaataggataaagctgagcttgcctgaaagaaaaattcatgctttagatgtataaaaatcatcacaatatttcagttagtgtctcagtgttactctaataacctaaaagtaaatttccctaagaactcttttatgcaatatatgacaggctacatactcacaaaacttttgcttatggctgaaaatcagaatgacatgaaataaatactgtttccatttagcaaaactgcctttatttccatctattagctccaaaaatacatcatgcattctccagtatttgcaatatttttcttgctgaacaatgaacaaccgagtaacacttattgcctcagttgaatggtttcagctccagtagcgtaggaggctctcaagagaggaggcacctcaagatgcctagcagagaaaattagaggagtactgtgtaccttaggaagattgacttctgagttccagaattgtaaaaattaaattcatatttctaatataaaacatgcttcataaaaagatattacagaaagaaagaaaagaaaatggaaacatagtcttactattttggcataaccaatattaacattttccttatacctaccattatattcttaaattaaaattattctgattttatgtaatattatattatgataatatttatatcgctaaatatctatctaatgcgttctttttaagattacataatcttctattgtatttcattataccataattcattgattcattttcctattattggatattttttcctctggtctaaaacatttcaaaatgaacattcttttttttaagatggagtctcgctctttcgcccaggctggagtgcagtggtgccatcgcggctcactgcagcctccatctcccaggttcaagcaattctcctgcctcagcctcccaagtagctgggattacagatgtgtgctaccaagcccagaaatttttgtatttttagtagagatggggtttcgccatgttggccaggctggtctcaaactcctggcctcaaatgatccgcccacctgggcctcccaaagtgctaggattacaggcgtgagccactgagcccagcctcaaaatgaatattcttactcttcattatgtacctctgtgattagtgtttacttagaaattagatcactggatctaaaaaagtgtattaacacatgtggtctcttgtgccacaatttagctttatgctaaaatgttattgtgtccatccttttatatcatgcttctctctagactacctaatctgcttaagaaaataagccccttggcggggcgtcgtggctcacgcctgtaatcccagcactttgggaggctgaggcgggtagatcacaaagtcaggagtttgagaccagcctgaccaacatgaggaaaccctgtctctactaaaaatacaaaaactagctgggcgtggtggtacagtgcctgtaatcccagctactcaggaggctgaggtcggagaatcacttgaacccaggaggcagaggttgcagtg

SEQ ID NO: 316781 - DNA, 4001 bp, Homo sapiens
attgctctaaataattaatcatatttgtgtttgcaaaggttcttcaatgcccatagtcagggctgcaggaggcagaactaaaatttaactaagcatctactacatgccaaacatatgttttctcattctattctcaaaacgaccttactataaaggtattagctctctgtgactgataaaactgtggcttatagatatgttacctaaggtcaaacagctaaggaaaaatcacacagctgggaggctaactgaagtctgtaaaacaagtccttttcccactaactacgtatgttaaattgtttttccagtagtggtaatagagaacagctcttcgcccctccttctcttccctccacttccccgtgaacagcatacactatttctttgtgagaccaggtgcaaagagcaatctctggccatgacacagagtacggcctacaaggatcgaaactgtattatgcttttatccacagcacggttctagctaaatgatctaactacatacaaatgtaatgaggttggagtagaaaagcacattagcaaataattatccaaatgccatttgtatttggttctgaaatgtactgtagacctattggcagcaggtttatctttacaactgggttttgcttaggctattctcaaaatagctttccagcagcacatactgagtagacaacagaggttgcttgatctagtttttggagactgaggaaaacatgtttgttgagcctatcttgattgacaagataactagaggcaatacggtaaaatgtaacactgtgcttccaatgtgtacaaacggctcagctaaactccctgaacacaatccacctaaacagtctaagctcaatagccgaccgagttaagcaggatgacagctccagtaacttcctcttcctcacccagctcctcagctcggcggcgcgtacacgcctctccccctaggaggcaggataaaacaatttcaaatgcacaaaatccatccaatcccacaggccaggaaagccagtttccctttcttcctcagcccttccaagaaaatgtttgtctaattaaaaaaaaaaaaatcttaccaacggcaaagtatttgcaacaaaaatccaaaatatttactcagtccctccacacagccttaggggaaggatgaaaagaagggaacacgacaccgcgtattcccaagactgactgttctgattcactttcctccctcgggtcccacagccggccgggcgaaggcttgcagttggaacgccaaaataagccttcgcctctcaggagacgcggaggcggccacggcgacggcaatcggcgagtcccgcctccgaccctcacctgcccaggcccgaggcagcgccgtgggctcgcgcgggctcgccgtcccgggaggcgtccggggaggtgggcgggcgcccaggcagttaggccgcgctgcaggccggcgcgcttcctgccgcggccggggaacggcggccccgggatcagcggcgcggcaccgaccagcagctctcccagccccgctgccgcgcgtgtgccgcactcactcagccctccccggccggccccctaggagcagctctcacctgcgaggctcgggagccgcagccacaaagcgggagggacacgccactctggggtcccggccccgggccacccccgacacacacacacacacacacacacaccccggaaccttcgcccgcctctgaagagacgcgggtcagccccgccgccccctccagtcacccgacacacacccactcgccgtgggtcctcgggccgcctccccgcccgccaaagtcccaactcgcacacccacacgcacatttgtccctctcccacctcatttccccggggacgcgctcctcttcccaacactctcggtcctactcggaggcaaaagaacactctacctcattctcttcctctggcccagaagcaacagcagccatttccccgcggcaggggaaacacacacacaaacacgcgcgcgcgcgcgcaccaggcccccacagatgcttcccctccagagccgcggccgcagacgcagacgcaaacacaaacacccacggcgggcctcgctcccgcccgccccgaggggaagccgcggcggcacacagggcccgtaaccggggctcgcgggcgggcgcgcagggaacccgggcccggggtctcggggggcccgcgccccctcctcacctgcattcagcgcgccggggtccgggcggcggcggcggcggcggcgacggggcggctggtgctggtgctgcggcggcgggggaggcggcggcggcggtggcggcggggctgagggcagcaaagacatgcaggcagcccgccggaggggagaggcaccggccggaggggatgcggggcgggcgggccgggccgggccgcctgacgaacggcagaggcggcggcgcggaaggcggctgaagggagcgaggagacagaccgggggtcgggaagggggacgagggccgcgccgccgggcttcgaggacagtgaccccaggcgcgcaagagaggccccgcggccgcggccgccggcgcgaaggccccagccgaaggaagctgcgcccccgcagggccggagccgcggctactgctccgagagccacgcagagcctggccttggccttggcctcctggtgctggggctgccgccgctgcgggggttgccgctgcgccgggtgctgctggggccgaggttgaacagagacgccagctttcggtgccttcgctcccgctcacacacgttcacacccccgagggccgggggagaggcgtccgggcgatatcggtattgagattaataacaaggtgcagagagtgcgagaacgaggagggttgattgacgtggaggggctggcgggagtcagtcactccccggcgcggagggttggggtgaggggaaggaggcggggcggtgacggggcggagctcctacgcagcgccttggccccgccccccgtgcgccgcgttttgtcgcggtgagcgcgcggaggcccgggcttcttaatggttttctgttttgctctggctgttttctcactcttttttcctggcctgagcgaggagcggggctgagaagagtggtagagtttcagaaacccacatccacagagccttggcgaagagacgggaaaccgcctcaccccgggttcttgtgtgggcgctgtttactgcaccctcctcgcccgaggcgacctgacagcgaagcagagcgtaggtctaggtggctgagacgccaggggaggtgaagtgaccgaaggaaatgtttcctgacatattcggtggattttttttaaaaacatatagcatctgtaagttgtatcgtcaaaggtaaataaaagaacctgtgacgctcagcgataacccggtcctattttctaattctcccttctcgttgtagactttagtttgttgtttgtagcttatccatgccatctacagaatgaaaacatccaaatgcaaactagaaatagtagtgtttacttggtgaacctggctgtgatactttaagtttctggggtttgtttttgtttttgtgggccagcttcagcttttttgggccagcagtccaaaaagcaaattacaccggctgtggaggcagagtactgctgttgcagttttgcacaattttaatctctttctcaatgcatgcccgggctcgtgtatttaccagtgttggtcaagggtatattagcaatgttcagtattttttcccccacaggagtgtttagcacactaagcacgttgcgttggttgcaattcatcttaggccttattactgaatgtaaaatgccttcatctcttgggggaaaaggtgcggtgaaaatgcaaatcatcatttagctaaaactgaacagctgttacaagagtccataattgcagaactattgcaccactttcatcttggcaccaggatgggtgaatgagtgagtaaaaaagcccctcagttcacaagacgacagactattttcttttctacctatgtta

SEQ ID NO: 316782 - DNA, 4001 bp, Homo sapiens
ctttgctttcccataacaggccttggtatgctgcttaaaataatatttggggctttatttgccatccttttgaatgagacatgttgattttattaaagcaagttgggtctgcattctttctttactattattacaggtagacttgacagacacaggacctttgttttaaaatgctctgctctggaggaaaccttgttaaataagttccattttacctgctgggcagttacattctgaaggtgcttctcttgcgattcttattttagccatatgttcataggatttctgtaggaaaagaagagttattaataatcatcagtagcactgtagagggatggagtctttagggactctggccatacgcctgatttaccggcatttcataacctgcataactaacatttacatatgtacttggactctagtcaagaaagtaaccatgcctaagtcctaaaaaaagaaaatgaccactgatagggtatcaagattgctggacttgtataacatctttctccattcttctctaccaccactctctccctcagctcaagcatatgcagtcaatgtaaaaacctagcactaaaatgttgcagtattaggtaagctgtggcttaccaataacagccaatattttatacatgaaggtcaactgctttatttatcatgctaggctgcaactactgccaaataggctcccggctagggtaaggttccagaaaacccccttactctagtctaaaggtacccttacacataacatagattcctctcaactctcaattccaagggctctgcattcataaataccccggcactgcatcctttaccaaaaataaagctactttaaaaaaaaaaagtttaaacttttaatatgaaaagattcaacgtgtgaaattattgattttaaattatatatgacattattttacatttaagagtgattaccttttttatatattaataacatctatgaccctaaccatcttacaacatgtaaaagatttaacagatgctatctctgcaagaaatattctctccacaattgggtttgacttaggacaactaaaaagagataaaatgccctttccgaacccttttagaccttcctatgtgtttaacacgcaaacattaagagagagtgagggaagattagagatagggatggggacatcaagggatgtgcacatataaatatatgctacagtgagcatagatccttggccaacacatgcacgcgcgcgcacacacacagccacaccaagtatgggtacagtaagggtagcggctagtcatgcacacagagtcacgcttgtacaagatgttacccacgtgcaaaataccccagcctctcacacctgagccagaagtcgctccactttctcttgcaccatagtcttgaggtgatccagggtatcaggcagcagatgaatggaaggggcccctttggcggattcgagagcggcgatcctcgcctggaggtcgttggttttcacacccaggtacaggcaagacaccacggccaccactgacaggagggccgccaggacggcacacgggggcatggtccgggcacaatgctgttcggcaggggtcgggtcctcggatctgggctcccggccccctcctttccctgcgtgcttcttcagcagcatcgtggcggggtcggccgtctcggcttcgcttcccaccctctacacctcaaataatcctaaaaggaaagaaaaaggtcgattcctccaaagttcagtccctgtggctgcacaactagttggtggagtcaagcccacgagcggatacggacccctgccttgctcagcgtccagacccgcaggcgtgcaccatccccgctttcttctctcctcccagctggaagtgaaaagcaccctccgtccggggactgggtggcggtggggtaaaaagcaagacgaaacccacccagacagctcttccgactcccagaggaccgacacctctttcgagggccccaacagtggccgctcagggtccgagggcaacggccgaggcgccacgcggggccgcggctcgccctggccacggaggaccggacctgttgcgcctctgtgagtttgccttatttctacctactcggtgtctttcggcacgccgacctgtttcccacctgcattcagttcaaggcaaaaaggctgtgagagcacgctacagcgcagcgcgaaaggggcgactaaggtggagaagagagaggaaaacgaaataaacccaaggaaccaatgctactcgcgaagccgaagtcgcggctgcccgaaggatctccgcagccccgcgtgcgcgatccttaaatacccttcgcgatgctcgcgtgagtgtgtgtgtgagtgtgtgagtgcgcgcgcgctccgagcacgacgtccctcccccgaccccctcccggcgcccggcgtccggcctgccgctcccgctgctgcgcgccccccttccgaaggcaaagcaggagcccgccttattatcataatgtattcaccttggcccagcccgcgggccggcccggggaacccccaagggaggcgggaagcttgggtgggagcggggcaggaggtctgttattagcataatgtatgcaaatagctggagcggccaccgtgattggagaggagcctggcgacccctccccctgcgcggagtaacttcagcatctccgagggccacctctctggcctgggccggggccgaagcggggtcggctgcgcaagaggcggcaactttggcttatactgactcagcccagcgccccctttttatcccacataaaaatggagaaatggcctccgggaggaagatgtgaagcggcacgctctatctctactgatcttcactcaaaagcagccgcaggagctgttgctatctcgctgtggtgcagcgcttttccctcctccctcactttcccacatgcccagaggcaaagtgtctggccgacgtctgaggtacatttccccacttcccttctcttcccactgcagccctcagattgtccaacgaggggaagttttccttcccctcccccagtttccttgtcttgacggcactgagtctcctcccagctctgtattcctagtctgtactagggtgctaatgtgttttcctgattccctgttttgcgggattggaaaagggagtgttgaggtatacacatttctcaggatttaggaaaggaatgaagaatgaagtcagtttttccttttacctgactcttaatgctgttctctctggatcaaattacaaggtctctaatgggattttggaaagttggtaacaagtagcatttgacatctaattgactttggggaaaacagaaatcccacctcttattccaaagagttccttcttatctccctataaaaaaaaaaaccatatatttttcctattctccttaattaagctaacctgaagtcgttgcttactattgtaaacagtcaacaaaatacttcactaagttggtctttcacatgtgtaaacggatattgctaggtgtgaagcaaggtaaggaaataacagcattagaggaagaaagagactaacattggaggaaaactcaatgaatttggctataaagtcaaaaccataattcatttgtattacacagtggttctcaaaggatggtcctagaccaataacatcagcatcacctgagaacttggacattaaaattctaggttcctaccacagatctgaatcagaaactgctactaccactactgaaataataattttaaaaaaaacagcaatctgtgttttaacaagccctccaaatgattttgatatatactactaaagtttgagaaccactggtataatactttccaaaatattttcaaatactttttgtatttgaacctcataaccctgcgatgtgaggatttactgttcctcttttaaatataaacaacgtttttaaataaattttaaaacagataaatttcaagtcacatttaattgtgattaaacatgtttccaataacaggacc

SEQ ID NO: 316783 - DNA, 4001 bp, Homo sapiens
ataggatttctgtaggaaaagaagagttattaataatcatcagtagcactgtagagggatggagtctttagggactctggccatacgcctgatttaccggcatttcataacctgcataactaacatttacatatgtacttggactctagtcaagaaagtaaccatgcctaagtcctaaaaaaagaaaatgaccactgatagggtatcaagattgctggacttgtataacatctttctccattcttctctaccaccactctctccctcagctcaagcatatgcagtcaatgtaaaaacctagcactaaaatgttgcagtattaggtaagctgtggcttaccaataacagccaatattttatacatgaaggtcaactgctttatttatcatgctaggctgcaactactgccaaataggctcccggctagggtaaggttccagaaaacccccttactctagtctaaaggtacccttacacataacatagattcctctcaactctcaattccaagggctctgcattcataaataccccggcactgcatcctttaccaaaaataaagctactttaaaaaaaaaaagtttaaacttttaatatgaaaagattcaacgtgtgaaattattgattttaaattatatatgacattattttacatttaagagtgattaccttttttatatattaataacatctatgaccctaaccatcttacaacatgtaaaagatttaacagatgctatctctgcaagaaatattctctccacaattgggtttgacttaggacaactaaaaagagataaaatgccctttccgaacccttttagaccttcctatgtgtttaacacgcaaacattaagagagagtgagggaagattagagatagggatggggacatcaagggatgtgcacatataaatatatgctacagtgagcatagatccttggccaacacatgcacgcgcgcgcacacacacagccacaccaagtatgggtacagtaagggtagcggctagtcatgcacacagagtcacgcttgtacaagatgttacccacgtgcaaaataccccagcctctcacacctgagccagaagtcgctccactttctcttgcaccatagtcttgaggtgatccagggtatcaggcagcagatgaatggaaggggcccctttggcggattcgagagcggcgatcctcgcctggaggtcgttggttttcacacccaggtacaggcaagacaccacggccaccactgacaggagggccgccaggacggcacacgggggcatggtccgggcacaatgctgttcggcaggggtcgggtcctcggatctgggctcccggccccctcctttccctgcgtgcttcttcagcagcatcgtggcggggtcggccgtctcggcttcgcttcccaccctctacacctcaaataatcctaaaaggaaagaaaaaggtcgattcctccaaagttcagtccctgtggctgcacaactagttggtggagtcaagcccacgagcggatacggacccctgccttgctcagcgtccagacccgcaggcgtgcaccatccccgctttcttctctcctcccagctggaagtgaaaagcaccctccgtccggggactgggtggcggtggggtaaaaagcaagacgaaacccacccagacagctcttccgactcccagaggaccgacacctctttcgagggccccaacagtggccgctcagggtccgagggcaacggccgaggcgccacgcggggccgcggctcgccctggccacggaggaccggacctgttgcgcctctgtgagtttgccttatttctacctactcggtgtctttcggcacgccgacctgtttcccacctgcattcagttcaaggcaaaaaggctgtgagagcacgctacagcgcagcgcgaaaggggcgactaaggtggagaagagagaggaaaacgaaataaacccaaggaaccaatgctactcgcgaagccgaagtcgcggctgcccgaaggatctccgcagccccgcgtgcgcgatccttaaatacccttcgcgatgctcgcgtgagtgtgtgtgtgagtgtgtgagtgcgcgcgcgctccgagcacgacgtccctcccccgaccccctcccggcgcccggcgtccggcctgccgctcccgctgctgcgcgccccccttccgaaggcaaagcaggagcccgccttattatcataatgtattcaccttggcccagcccgcgggccggcccggggaacccccaagggaggcgggaagcttgggtgggagcggggcaggaggtctgttattagcataatgtatgcaaatagctggagcggccaccgtgattggagaggagcctggcgacccctccccctgcgcggagtaacttcagcatctccgagggccacctctctggcctgggccggggccgaagcggggtcggctgcgcaagaggcggcaactttggcttatactgactcagcccagcgccccctttttatcccacataaaaatggagaaatggcctccgggaggaagatgtgaagcggcacgctctatctctactgatcttcactcaaaagcagccgcaggagctgttgctatctcgctgtggtgcagcgcttttccctcctccctcactttcccacatgcccagaggcaaagtgtctggccgacgtctgaggtacatttccccacttcccttctcttcccactgcagccctcagattgtccaacgaggggaagttttccttcccctcccccagtttccttgtcttgacggcactgagtctcctcccagctctgtattcctagtctgtactagggtgctaatgtgttttcctgattccctgttttgcgggattggaaaagggagtgttgaggtatacacatttctcaggatttaggaaaggaatgaagaatgaagtcagtttttccttttacctgactcttaatgctgttctctctggatcaaattacaaggtctctaatgggattttggaaagttggtaacaagtagcatttgacatctaattgactttggggaaaacagaaatcccacctcttattccaaagagttccttcttatctccctataaaaaaaaaaaccatatatttttcctattctccttaattaagctaacctgaagtcgttgcttactattgtaaacagtcaacaaaatacttcactaagttggtctttcacatgtgtaaacggatattgctaggtgtgaagcaaggtaaggaaataacagcattagaggaagaaagagactaacattggaggaaaactcaatgaatttggctataaagtcaaaaccataattcatttgtattacacagtggttctcaaaggatggtcctagaccaataacatcagcatcacctgagaacttggacattaaaattctaggttcctaccacagatctgaatcagaaactgctactaccactactgaaataataattttaaaaaaaacagcaatctgtgttttaacaagccctccaaatgattttgatatatactactaaagtttgagaaccactggtataatactttccaaaatattttcaaatactttttgtatttgaacctcataaccctgcgatgtgaggatttactgttcctcttttaaatataaacaacgtttttaaataaattttaaaacagataaatttcaagtcacatttaattgtgattaaacatgtttccaataacaggacccaaataatgggtacaaatattttaatgtacaaactctttctgtaacctctagctgttccttagtctcatttgcaggcttttcctctttcatttctctgaaagttggtgctccttgggtctctgtctattccatcttctctgtatactctctccagtagagttcccattacactgatgagtcataaattcatatcaaaagcccaaacctctctcctgaacctcagatccatatagccagttgcctctttgtcatctccgtttggatgtctcactctc

SEQ ID NO: 316784 - DNA, 4001 bp, Homo sapiens
aaaggtcatggaaatgactttatttaatggcaaagaaactataatagctaccgttatggatccctaactaggtaccacactctggactgatcctcactacaactctgaagtaaccattgttattatttctattttacaaatgaggaaactgagaataaataaggccctaccataacagagctttagtccattcgaaaaaggcaaacatacaaatacatgtaatttagaatgatggggccataataaaaatatatacaaggtacgaaggagcacagagaggaagcaaggaaaagtccatcttaaaaggatgagtagttggccaagcaaaacaggagagaagaagtgcatttctagacacaagcaagttattttggggggtgcctagggggtgacaggagacaaggctggagaggtgggtggagccaaatcaaaaagggccttgtgtacaaagtaaaagagcctagacttcaatctgtgctcaaccgggaagcaacctattcacacatttgcattatttttccatatatttgctaacaggttggaagatgtaagagagagggtgagcccagatgcctcaattttcagttaaggagttaaagattaaggggcttaaattgttgaggacactcaaaatggaggcagtaaagaggtagaagagatgtgaaaagggggggccatggatgaaacctagaacgtcaggttgagaggggctgggtgaaagtggtggtgccacaaaccgaaaatgaggctacgggaggagtaggtccagggggaaagaagagctgaggcaagggcatactgaatttgaggtacctgtggcagaagcctgacactcagggaagagattttggtttggggtttttggggttttgttttgttttttacctggcattcttgaaccatagaggaagaaatttttggctggacctaaagatttagaagtcatcgacatatatggtaataaaggttatgggccttatctaaatgggtagagtgaagacaaggagagccaaaagccaataaaacactcagaatcaacagatctgagcataagttccagctctgccactaactggatgggcaatcctgggcaagttagccaaaatttctgctgacatttcaggttcctcacttgcaaaaacaaagaaaagaattaggtgtttttttttcttgaccctggcaggaggtaagttcattcctttctgtctcctccacactttctccagtataaatggaatagaggaaacaggaagccaaaattgagacttataaaaaagatgctccaccagggcacaggctgtgtctcactcaccatttacctcatcccatcggggcgctcaatctatggtagacttcaatgaaaaactggctgaacaaatgaatgtggttgctttttccagattcttacaagccaggttcttttacagactggaagtcaatgggtacatcacctcttgggacgatcctaactaaagtaactcgcccagttatttctcttcctaccaaccaccctcaaggggggaggcagggtccgcttcggtctttgtcacattgtattccagcacctagctctgtacctgctgtccggtaggtagggagcctttgggaggttatgtgttgaatgaattaagaaaacgtatactaagaggcagcaaacaccgacttaagctttcaaagcccagtctggtgtgggcgcttctgcgcgcaaagcccctggagctgcacctctaggctgggggtggcgccccaagctgtcctcctaggctccccagggaaggcggggaccaaccacccgaaatcacgccccttcctcctcccttccctagggagcttgcgaaggcgtccgggtcgcacccggcctgatccgcacgccgggctgtcgcgaatcccaggccccgcgccgcttcccccggtacccgccctcacctgcgggcccagctcggccggcagcttctgcagccgccacaagggcgtcccctcttccggctccatccctgcgcgaagctggggcttgggtcacgtgtcaaggctggccgcttgtctaaagctacgactcgcccacgtgactctcgccggcggggaggggcgtggacccaagaagtccctgtgcgcttgcgcagagaccgaactaccgctttccccgtaaccagggagactgcagtttgcagtgatgtggctaagatacccttgtgctattaaaggcacatttacgtatctttcaacgcagtttgtacctttgtttagggttctattgaactttctctgtgctctttagaaaaccgtcgaataaaggtaaccatctttttgggtgcctgggcatggtcattgtcccagagttttaacagaagtctctactaaagtatcctgatttgcaaggtaaattaaggttttgccatgagcaacgttctgtatatagatcatcctagggagaaggtactattttcagccctatttgcagaaagcaaacatgattagagaagtcactaaggttgtcagatttagcaaatgaaaataccaagcgtccagttaaatgtgaaatttcagataaacaataatattttgttgtaagtatcccctaaatattgtatgggatatatttatactgaaaattatttgtccatctgaaattcaaatttaactggtgtcctgtattttatctggcaacgctaaaaatcactgacctaagtaagaggcccagtctgaagttaaacaaaatcaatcagactcaagagccatgctattaatgttggactaagctcaaagtccaaatatcctttctgttatttcttattacagctgttactttaatcaggtgctgaagaattcagtggtggtaaaatgagcatgtcctgcaaaagcggataataataactagtagaccagaaacaggaattacaatctaatttataaatttaataataaaagtggtgcaaaatggtgaagcagaagagaaagtattcaatctatgggctacgcagagaaaaactactcattagcagcattctaggtttacctcctacgtcctttctctgtgtgcctcaactctaaaaggtgaagtcaatttctttctcccgtgagttttcatgatattttagctgtccctcacttatttaccactttctagttcttaatgcagatagatgcacaacactcattgccctatcttaaatgtaattgtcttaagatactttgtgaataggagctcccctagtaatagttaaaatgagaagtctggaaaactacttcacctgagtctttctgtaaatctaatgatgggtaaggtctattttgagaaaaaaacttaaattttatgtattataataattgggagaaaagtactttcaagcatctactatatgtcaaacccttcatatatttttatcttactaattcctgctacagccttgtacagtgggtattacagatgaggaaatgaacttgaagtaatatattttgtaaggtcacatagatagtagttacaaaatcactggtctgaggccagaaacggtgatctcagtttgcatgcttgactacccctgctgaggaactgaaatgatatggcttacctaaggccacgtaacatgactaaataaggtaaaatgacacacctaacagggcccaaggtttagtcagaggacagagaattaggtcctaactcatctttcaagcaacactgagtactaagaagaatttgatctttactcttgaatttggatgggacaaaatttagcctgcaacaaatatggtttccaaaatagttaacaacttgcaagagagacagcgcttaatatttgccctttgattagtaagaggatgttcttatgtgtgtaatccaagaggttttcaaaacatatgtctgtctcttgtagttccatctctatgaggtatattctggtctccatctcccaaatcttatttgtactatagcaatctttaaatgcatgaactctggagctaaacttcataagttcaaaccctggctctgcaaatgactatgtact

SEQ ID NO: 316785 - DNA, 4001 bp, Homo sapiens
atctgcatgagtgagcccagacaagaccagcaaagcagtccagtcaacccatagaatcctgagaaatcatagttgttttacactggttaagtttttggtttgttacaaagcaacagataactgaagcacgctttaagtactattgtttatctccaattcagacctgaagaagtaaatacttaagtttcagaattctgcaaatacttgcaaagctctatttcttttgataactaatgcacttattcttctttaacaaaataaaaagtaaaggaagcatggggaaaaatataagctgattttactttcatccatataaaaattacaagcagaaaggattgagccatgaagacatatttaacttatttccaacccatacaataagtgaatatatatttactgacagcttaatagtaacaacaacaatcttaccgcactttctatatgtcaggtactgttctacgtgatataagtgtggtaagtatatatgcacacacatactcatcttgtcctcagataatgtcagacaagaataagtcctattattatcttcattttcctgagtgggaaaatgcagcacaaagtagttaagcccaaaatatacggctgaatttcccactgataaaagtagattacgtttgccaccagagaaaaggcagcctagcctacttaaaacagtcagaatttcaatgaccaggttagaacaggtgtatcccattaatatacatcaaagtgatttcagctgtcaggatgtaaacattaagatcaacttgagaggcatactttatttacttatttatttacggagacgggtggcggcgggggggggggtctcactatgttgcccaggctggtctagaactcctgccctcaagtgatcctccctctcagatctctcaggcctcaagtgatctcagcctctcaaagtgctgggattacaggcgtgagccactgcacccggcctagagaggcatactttaaacagaaagcatgttcattacaaaagagaaatgctgtgacatctacaaagagaaaatgaacaatatacgtctacctacctatgcttaatactgttgacaactgcttgcagaacaggcacgtcacacattttaacttggagtgaacctaagcattctatataaatttcgacaaaattcagattcctgcaaacatcactactgtagacatcctgacccacgatatgagcacattccgcctatgtgccatcagagttggtggcagagaaaatacccgaaacacaaggacccacagaagacagtctgaatggtctggacgacatgacagcggccataccgcctcaacctcagccagccccaagaagccatctccccgaaaaacgcagcatcaaggccccagaatatacatttctctgaatcaaaaaaaaagaggaggaaggtccaaagagaggccagattcggtgtgaggccggccagcgatgggaagaggtaccagggaaggctactaaggccagggtagcagtcgtctctcagaccgctgttccaaaatcctaagggaccagaaagattctatcaagaactgaacaagctgacaatcatttcaagtctatagcctcgaaggcccctgcacaaggtcccctccagctttctgcttctcccaacatttgcctccccagccgacctcaggcccgcccccttggacgtcaggccggctcctagcttcacgcccaagagccgtggccaacctaaggagattaaggctgtggctttctttccccacctctgtactcccgcgttcctgggaaatactcacttgccagccagatctttatgagagccgctcgaattcatgagctgggccaaatcctgtcgcacggctgccgccatctttctcccagctcagcggtggatgcgggggcctctggcagccaaaaagaaaacgagtgtggtcctccagagtgcagccagagggaacctgagatgctacagagtagcgtctgtgtgggccagagcgtcgggtgtgggagcctgggctagctccgcccccagggttgagtgatgcggagctccactcctcaggtctgaggcctgcccaggtctctcctacaggctctggctctcacgcttggactttggattggctgatgaactccagtagtgagtctctggtgtaactccaatgagtagccggtacataaaacgactgcgttttcgcaaagttccgtttctcacgtctgtggtttaccgtccttcgatctttcaggcagcgcttaaactgcctgtggtaaagaatgagttttgtttccgattcaccacagaagatactttttagaaatacaattaaaatgtccctattcctcctcccactccgtgcactttataatggttggtcagacattccagtttgtccagtacaaagcgattttccctctgtcgtcctggagtaatgattaatatcccccctttcggccgggcgcggtggctcacgcctgtaatcccagcactttgggcagccgaggcgggcggatcacgaggtcaagagatcgaggccatcctggctaacacggtgaaaccccgttctctactaaaaatacaaaaaaattagccgggcgtaggtggtgcacccctgtagtcccagcaactcgggaggctgaggcaggagaatggcgtgaacccgggaggcggagtttgcagtgagccgagatcgcgccactgcactccagcctgggagacacagcgagactcggtctcaaaaaataataataataataataacatcctccctttcattctagaaaccgttccatttcaatggaagattatatggtcgcctgcgtttgtataacattcaatactcatgtattcttatagaatttctgcaaatacaagcaaatattaataaaataaaattttacctctcacaagcaacaccacataattgttctgccttggttttttttttttgcacttttcctggtactgtggtttgaaataattgtcttctccaaaactcatgttgagggctggcgccgtggctcacgtctgtaatcccagcactttgggaggccgaggtggacggatcacctgaggtcgggagttcgagaccagcctgaccaacatggagaaaccccgtctcaactaaaaatacaaaaattagctgggtgtggtggcacgtgcctgtaatctcagctactcgggaggctgaggcacgagaatcacttgaagctggaaggcgaaggttacggtgagccaagattgcaccactgcactccagcctgggcaacaagagggaaattccgtctcaaaaaaaaaaaaaaaaacaaacaactcatgttgaaacttcatctttaatgtggcagtatttagaggtgggccttaaataggtgattggatcatgagggcaaaacccttgatctattcatggattaatgggttgtcatgggagagaacatgtggctttattagaagaggaagagacctgagctagcatgttaggaaggtcactcccttgccatgtgataccctgtgctgcttctgaactctagcaagtccccaccagcaagaagggtctcattagatgtggccccttgaccttagacttcttggccttcataactctaagatataaattccttttctttataaattacccagtttcaggtattctggtataagcaacagaaaacagactaagacagctggacatcttaccagctgtccagtctttcaaaatcactctttttggagctagaggatattacacagtgagagtatgccttagtttatttaatccttataggacatgttatttttaatcaatgcgatgaataacctttgcatacattatatatgtacaggtagaacacattaccagaaatgaggcaaaggatagacatacaattttggtagatattgccaaattgcattttataggaatggtatcattttgccttcctaccagaaatatataggggtgcagcttcctacagccttgactacaaaggatgtcaaacttttggatttttg

SEQ ID NO: 316786 - DNA, 4001 bp, Homo sapiens
actggggaaatgggaataatggcagatgttcatctataaggctacactgccactccatgccacagactccaagaacagaattacagccaggcttcagattggaactgggcttggaaatgcatgcctctcaacgtgaatgtggccccaaaactcatgggggtcatacacagcttcccaatgatggcagggctgtacctatcattcagtaggcttttatgctttgatagctgattgttataacttagtgctctaatcccaaataggtcgtgcataaatctagaataccaaaagcaaggcctaattcgggtcttgtacgggcaaaagtggagtaaatgtacctaggcctttgactacatctccatacactgcaatggcaaatgtcatcatctagattggctggagttcatccttcacttcttcctccacgctatccagcttcttcagatatgttcttgtctagtctcgtttcccattttccacacccacttggtgttccaggtcaggctcgtattcttagtgttctaacactccacccttgggtctttgcaaaagtacttcccgcactaagatctcttccctcctctgcaaaatcaacttgtcctttggagtataatttcttctcgaaactttccagcaagggatccacagtaatttctctttttcctgtagcacttgcttttgtatcactcatatttgatccatattttcctagctcaccaaatagtctttttcaactagaccagagttccttgaaagcaaagggtttccatagctttttctatctctatggccggacaacgtagtaggaacttattaattcacttaacactactggagaagccaatcaatcaacaagcgcataaggttagttagtggtgagtgctattaagaaaaattgcggataaagcgatagaaagtgaggttggtaggtgttaattaagataggaaggtcaggaaaatctttctgtcgggggcgattgtaagctgacaggcagtccgtaagcgctgtccctgctgcgttcaaatgaattaaatctttgccttatgggtgatgcaggtaaaagagctccgactcagcatcaaaacacagagttcttctggtctggctctgacgaggagccttagtttcctcagcgtcttaactgtcttaaggattgtctttgtgggccttacaagattgcggggaggatcaaacattctaataaatgaaggagggccacgagaacggaaccttccgcttgagtcaccatttaaacaagtgtttgtggaatgagaattatcttgcccgcttcaggtgctcaggatgcagacagacgtgaaactggcgggtcctttaggagactgtcccgactgcgtgtcctgaggtgactcgccccagggcgcacggcagccggcagccaagctcaagctttcaggctctcatttcaaagtgtcccgaggtgattcgccccagggcgcacggcacccggcagccaagcccaagctttcaggttctcatttccatcacgccccggccggccgccgcggacagctccgcggagccgactcggaggctgctacttgcaaattcccgggctgcccgcccgcccgcactcaccaatgggcttgtccaaccgcatgaggcgcaagtacggctgcagggggcggggcgcagagtccaccaccgccgccgcggacaaactgagctggcgcccgcgcggctcgggacaggcggggggctgcaagtcaccaccgtggggcgcgcctgccgcacgcgccagggcgaaggagcggccccgccagcccggcagccacgccagtgccacagcccgcaggccccgcgcgaaccccgcggctcgcgagcccagcatggcgctggtgaggccgggacgagctcggattgacgtcattccccggcaggcatgcgcagtggcacccgcaggatgcaatcctagtctgccaggctgggcggcggtgtgggcagaacctttcctcatccttacttgtgaaattggggtcatcgtggtcgcttactctagggaggaatacttaatgaaaaagggatttctattggcaaaaggcaaaaaaattacaataaatttagttgtaattttttacaactcgatcttgattgactttgtggttccattatcgggcaacactcagaacggggtctctgaggaaacaaacaaaaaatagaatcgggcaacaccttattctgtaaaatagaataagtgttccaaagagtcgagcggaggaagttggctttatagacagaaaaagggctgaagaaagcagaagcagagaacaaaaagcggattggtcacttcaaattactttcattgcgaggcggggacagggaaacaacaacagagaaataacggattggttaacattaggttacaccaggttaaggactaaaacaggaaacttaattgtcatgacgattgcattttgaaatggcctggttggaaaattggctgttgtctctctttcctgacttctcagaatgtcagatacaacttagttttagtttggtgacttggaactttagcatgggtgactcttgattcttagtctgatctgttgggacctagtgcaggaacttagttcaaaacaatggccccctataatttaaccctattatcagctttctccataaaatgaaaaggatagtgtttattcatatggaacagttgtaccaggaaaaaaaaaaaaaagctttgaaaaacctactgaatccaaaagaagaatttgcgtacacgtttagccataaaaaaaaaaaagggcaccaagtggccacatacaagactgtaaattaaaatcgcattcagggttaagggatgttcattacacaagtgaaaattttaaatttgacagcccttcaaaggagtttttgtaatcagtagacaaccagcatgtgtgatgctaagaacctgaagctgaaaagtctggtcagcagagtcttgctctgtcatccaggctggagaccagtggagggatcatggctcactgcagcctccacctcttgggctcaatcgatcctcccatctcagcattctaaatatctgggaccacagacacgagccaccgtggctggctaatttttaatttttcatagagaggaggtctcactatattgcccaggttggtcttgaacagctgggctaaagagatcctcctgcctcagatggtcagtactcttattcataagcaactctgtatatcgctgtgtgccaggcactttacatgtatcaactcatttaacctctcactgagtaaccctaggcaagtcactcatctggattttaatattctaggaagttgacttagtctttaggctcctttctgtaaaacatgtacaatgattctgtgacttcttgcatggctcaagtacagcaagttggatgcctggccactttggtgcaatgaggcagggggtacctagcctttctcctgcctgcaaagaataaaggccagcaggcaatttagtaacactcctagttgttagattggagatgatttagatctgactcaaacctgaaaagggtgtaatatcagtcatgtattgcatccatgactttccaatataggtccaaactctttgtttaaaaaaatatattaagaatttcaagatggcaacagcaggacattaaaccaagtacaaggtccttcttagcgtaggccctgggtgactgcacatgtacccatgatgctgaccctgcccagaggtgattcaatcctaagatatttggtccaattaaagtgcacaggaaactgagatgggtacccacatgtcactctgctaatttgtaggacaagagaacagtcacatagagtagagccctaactttcaggagtctcctctagactaatgccaaggcacagtatgcccttgggaaagccatttaactgctgcaaactcttcagaaaaggaagggactaggctttctctaaaagggcctgtaaggctccgattcctcattttgttttttgttttttttgaagtgactttctttttt

SEQ ID NO: 316787 - DNA, 4001 bp, Homo sapiens
tggaaagcattctatggaaaacctgcctggtcagccaagcccacacgtgagtctatgcagacatctcctctaacctcgcaagccccaggaacctcctctaacctctcaagtcccaggatctgaggaccaatttttagcacaatctcacacaacaaacctattgggcacctaataatagaaacaagctaatgaatgttttgactgtgacaaaaaaaaatggtttaataactttttataaatgcattgtttcttctcattgtctcagggttatgccaaaattaatttcaaaactatctgcttaaatgtgtccttggacaataatcaccagtaagtcctgacttcaccccctttctggtagcggtctgacgttcctttgcagagtttcgcttccatcgataagttactttaaataaaaagttaaaataaaaactagaagccacaattgtgcctatgtcagtcatcgaagtcttgtacaggagtccgtcttcgcagcgcatcgttctcagaagtttcccgcgggaggaaagctccactttatgaattactcgaacagcttccctgggaatgcccagccccgaagcttccctgctgaattcaaagtcagagctcccagggctcggtcccaggaaccgggagccgtgcaaaaagcgcgtacactgccatccactggccccgagcaggtagtagcaggagtgaggcgcctgccacgggagctcaggaactgggtcccagtaagatccgacaagacaccacctcccttccgcccgcacagcctgccctctctgcctgcagctagcgtcaccggtcggtccccgattcggagcagctgggaccctcgcggtagcaagcggattccggggccctaatgacaccgaaggagaggggcagccgcaaattagaccttcttcctgggggctcaggccagtagggactgtccgtggtgcccttccctttctttctcctcctgaacgagagccaacgctgccccttcccaggactggatctgagccaaccaaatcctacagcgcagagcctgcgcccccggcggccagccctcctgtgcctaggcaggttcacgccggagaaagtttgcacgcagggacctacaagttcccagcactctgcaagagggccagttctgggatgccagcacttaggacgggcgagtgatccccaggcaccaactgggggccggggaaccaagcgcgagcccgggctgtggagggaccgacacccaggcgctcgcagctggggaagggggcttacgtctggggcaggcaagactgctgcacagtccctccagccacccggcgcccgagacgccggcgcagacaggaagctgtagatccccgaggggctggctccgacagctccacctgcagcctcccctgccgccagtgtgcagccaagtccactagatgcttggagggcaccgtgcggaggagggactctgcaggaaaggtggcatcacccccggcatggagaccggggtctccggatcgagccgactcgaacactgaaggaaaccctgcccatgaccctgggagggtctcggacgccgggcgaccggggtggtggtcgggaccagggccgtgcgcctgggaactgggtgcagggcgctgagcgcggaactgtcagagcgggagctcaccggcggctggggaaggaggtggcatcgggcggaggagaggacgggggcgggaggggctgaccctgaattcaccgggactaagaggccatcacacctggctgcggtaggacagcgaatcatcgatcttaccggctttggggacccggctctgcggcagcgctcttccggagcgagggcaggagactgtttcatggataaaaagtctcgcttattcttctgtccacttttatcttggtcgcttttctctcctctacgtgtcccccggggaggcactacggatgattttctccaagctcaagagagacaaactgaactttaagcgccaggggccccatattttgtctgctctacagatcccacccgcgggccacaccctcccttcactcccgtctctgggtcccacccataataacccgtaatgacagatcctccgtgtccccacctctttgcattcaaagaagttattcttcaggggcatatggaaagtcagtttctgctggtctccctcaaaaacttacactccacgagggcagcagaaaaggacaggacgattaagtttaagttgtggaagactggttgggagcaaaagagttacttttctccaaatttgccatatcacatcgaaagcattttcttttaaccagagtgtagccaatcaaaattaactgcaggcgctggcaattaaagaacaagtttatctcaaaaaaggtttaacgtttggaggccattatttgcatcaggcatatggaaacttgcgttctgttaggtatgctgaagaaactgcttttgccagactgcctgagtctttgctgaggctgcagggacaagggagaaccccaccctgactgcttccaaaaccctagttcctgatttcctgcagagggcacctacaggctgaacctaaaaggcgaacaaattcctgcctgtcattcaaaagcagctaccttttctaaggcagcgtcaaggagggcactggaggtactcaacacagtaatgattactttaccaagtccaaggcaattgtcaaatgtggcaaagaaaaacacttcattgggtttttcttagaaatgatttttcatccaatttcaatcaagatcttaatggaaattttgaaaattactcatgaggttatttaataaatccatccccattatttaaagaaagccatgtaaagacaacaaaatatgggccaagcacttgttcttgaacattattgctgagaaaaaaatatgcatttgtaaaatggggggggcagtattttgtttctgaagtgagatcaaatgtagaaaatattgcatatgtatagtaaaatgactgaaacactgattccatgttattctaacatccgatttgtaaaccagtatctgacaaatttatcataattcacaataattcagttcatattatgtggcaggtgtcatactaagcactttacatgtattctttcagttccaccaactactctgaggaagaagctattatttttattttagagataagaaagcagattcagggagctgaagtgaagtaaccagcctacgcaagctagcaagaagctgagctgggattcccccgaggcagtgacttctggattgtgttcttactaagatactacctcatcacacaccatcaccgcagtgccagtctgggaatcaagaactgtgagcaaatcacatagtctttctgggccacagttaactcagcctataacataagggctggattcaattgctaaggtttctacaggcattctgaggccaagtacaagtttctatttcatcttctttctcttccactttctgccctctggtggaggtgctacagggactatgaaattaaagtagctacgtcagtggatttgagatagggtcgatcagtctccctcacttttccacttttagttcctctgagaactaaagctaattgcattaatggtgtaaaataaacattttttaaacttccttttagcaagaaaacccaaccagttctagttaccaacagcaccagaattaatacctgaggtattctttgcatgaaggtaatgacataaaaaatgagggtaaagatgttttatattctttataataaacttttaaaatgtcaagaatcataaactattagaagtctcaaaacatattcaaactgatttgaatatgcagtgtgctcattaaaatgtcaagaatcataaactattagaagtctcaaaacatattcaaactgatttgaatatgcagtgtgctcatagtaatctttaatgacctatttgaattattctttaaaaaaaactagctacatttgcatttcagcttcaagtgacaaccatcatctagtttcttaaaataattttaca

SEQ ID NO: 316788 - DNA, 4001 bp, Homo sapiens
gaacctgggaggcagaggttgtgatgagccgagatcacaccattgcactccagactgggcaccaagagcaaaactccgtctcaaaaaaaaaaaaaaaaaaaaaaaatatatatatatatatatataaaaaaagaaatactttactgccaaaactacagaatactcaaacttataattaacatcacaatttatgtatgtgtgtgtgtgtgtgtgtgtgtgtgtgtgtgtgtatgtgtgcgtatggtcttacgtggatataattagcttacctggcatctcttttggaccaccccaactgatttgcacgaactgcaacttcttggttaagatgcctggcaatagtttttatttctggctgcaaattttccacctagctaaaaaataggttttgttatgagcacataaaggatctttattcataatgactcataatctttcacattattccctcgagtcatttaaaaatgtagtttactgatcatatcaagaaatcttaattctaagcacaagatgttaatttgcttaaaatgtcctcagtcacaaccaaattcacaatgcatacttatccatgtgatcctgtgcaagtaacttaacctctaaaatcatgttccctcacatataaaatatataacagcacctacttcacagggttacaaatattagataagaactgcaccctgggctttactgttccatctctacatttcctagtaacgtaagcggagaaaacagcagtttgttaagaacctttaatacactgtgatagccacaaatcaaaagtaaaaatagcatttattcctgccctgtgctcattcttcctgtaaaatggctcactgccttaatgttgctgctgattccgttcctgttttgtttccggttttttttccccatgctcacaacctgaaaacaagaaagccactatttttgaaatatcccatttgaataatcaagcactttaacccgtattatctgacttgctctgataacgctgtgaagtaggcaaggaaggtactgctagcctgattcctcagaaaaaaggattcagcattaaaaggtcaagtaactgcgaccaaccagacacagtcttagtcgggtctggagaggaaacaagttcgcaaactgttagtctagtagtttcttcctaataagaaagaccagctggaatactttgggacgaaagacactgcagacatactggctattaaaacttttaagacataaattttgtaggtttcgccaacacaatttcttctgcgactgatttctttgtctccgttccccgagagcaagtatagtaaccacttgtgcttggagcacaaatccagtaagacaaaagaaatgacaggtacacgtgtcacaaagtatcttatttaacacacctaatgctagttcaattttttttaacgctaaaatggtcacaatgaaatggtcacgatgattaaacactaagcactgcagaaggcaacatcgtgcgatcgaaaaccctgagtgaatgtcggccttcctccgccgcaggggttgcagcgcagggtacgcgcacggctcggcgcccctcaccttggccaggatgtagtgctggtaggctgccaaaggcagcgtgacagcaccccgtaaggccacggtggagagcagaatgctgccccaccagggcaggcccgtggcggcgtgcacgccgagcagtacttcctccgcaacccgcaccggcgaagacgcggccagggcctcgtaccagccgttcgcatgtactgcagagactggtgccactgcccacactgggagagtggggcgcttggcgccgctcgtaggaaccggcgcaagcggcaggtccctagcccaaagctgcagggcagggagcggccgcagccaccgaccgccgagccggcacagcatttctgcaccacggcggagcccagatcccgggcctcacaatccagcggacatacaccggccagccaaggctgatacgcgcacgcgccagcaacagcgggcataaagcgcatgcgcgcctgcctgcagccgcgattgaccttcccagtcaagccggtgacgtcttgcgtcgcagtggatgtgacgcaagagataggaaagtcccgcctttcccacgcggcactggacaggcctactgcgcacacgcgaaagtttcccgctgctagggtgtagttagtccgaggccggaccaaaactgcagagacatgggtggagcctgctgccctccgccaggctgggtgttctttagggagctctcgccttgtaaagttcatctacaccgtgtaacttaccattctttttcactaaagctaatagtcatttgtagtggaattatccttgctcggttttttgtgaccagaagctgatccccaacctctttacgtgcacctgattgcttccgttagcgattacgatagattatcatactcaagagtcacacgttgctaaagtacctgcttgtagagagacgcatgtttcttgctgactctgagtgttaagcacgagggatagttcagtctcttgtagatttaattggcccatctgttccagttagtatttggaccaccaactgcaaactgaatttcttcggtgttttgtcttccatgataaatagcagcaaaaatcttatagtaaaagtatcatctctttatttaagggaaactatcactggcagtacggtgaattccttgagtttacttgtatcctatataagctttaaagagcctgaacagcagcactggctgtcttctggtttaaaggaatacgttgaatctacatggactatatagttttaacttttgtgttcctggaaacaacaaaatggaatgttgtggaggagtttcctcaccgaagggtcacccctagactacagactaaaatatgttgtgaggagtaaaccttgatttttatttatttatttatttacttacttaggaaaagaagcctccaacaatgttgggtaatgtcaaacgccagctattgtttgcccttcactgtgcacctaaccaagggtaccctacgataactttctcaggattctggaattcatctgctttccaaactgactgataaatctatacatgaatttttaaatgtgtttaaacacacagcacaacacacactatatataaactttttctaaaagaaaaacctaccaatctatttctttatccatttattaagctaacaaaaaagccatcagttgctactgactactgttcagctgttcataatctgaacagaattttaaagttatttttgctagacacagtggatcacgcctgtaatcccagcactttgggaggccaagatgggaggataccttaagggcagaagttagagatcagccttggcaacatggcaagacctcatctctacaacaaatacaaaaatcatccagatgtggtggcttgcatctgtggtctcagctaccaggaggctaaggcgggagaattgcttgagccccccggagtccaaggctgcagcgagcaatgatcgagccagtgcactccagcctgggtagcaacaagattcccatctctttaaaaaaaaaaaaaaaaagcaagaaaagaaaaaaaaaaagctgtaagctgttcttcaattcctaagatttaattttgtggagttctatcggggtcacaaatgagatttcagtgttggaacacattttttgctatacattgtgttcatatattacattcttattttaaaaagtatttccttaagtttgaatattgatctaaataaaatttatgaatatttagtttctgctaatttcatatatgtgtataaacacatttcttaatctatataacagggatgactagaacttgctatctacttggtagaggatgttgggggaagtagttgtcaattttaaagcccaatgcaaaagaaaagtgttactactaatgtataggtactgtttatacaacattgtgattattttgtatcttttgtttcagagtacagtacaaaatgatctacaactattgagtggaccaactgaaatc

SEQ ID NO: 316789 - DNA, 4001 bp, Homo sapiens
ttgaacttcaaatctcattttctatgtcatttctcttaagctggtgtcctaatttcccaaatttgctcctaaaaacttttctttttctccagctctaacttattttattcttgcttccatttttccattgctctctattaacaatgaagcataaattttaaactacgctagcacctaaaatcctaagcaaaaatgatttttagaaccagatattccaatcatgagactttttaattgctttctcagtcactgtttttgcaataattgtattgaatggtttctcatcctcaatttatgaagatttatgaaaatctatatggtctttacaagaagggttcccattgctttttaatttaatatccaactccgtaatttgatatccatatgcacctcctatgggtggagtcacagtgtgaatctcaaagatcaaaagttatgaccagagtacacagaattgttaaattcaaagccactgtgagataaaaaaaaaaataggaacaactattaaatcgatggccaagtcagataactccaagacttgtcacaccaaacttccatctcttgtctctgaagaggagtcaaaacaatataaaagatcagaatttgagcagacttttttttttttttttttttttttgagacggagtctctctctgtttccaggctggagtgaaatgagacgatctcagctcactgcaacctccgcctcccgggttcaagcgattctcccggctcagcctccctagtagctgggactacaggcgcgtgcgaccacgcctggctaatttttgtatttttagtagagatgcgtttcaccctgttggccaggatggtctcgatctcttgatctcgtgatcctcccgcctcggcctcccaaactgctgggattacaggtgtcagccactgcacccagccagaatttgagcagactatctatgccccctatgtaggcctggcactaaacatttcctgcaaataccactggccatcctagaaccactttgagatctgtaaggctcgtacacaaaaagactataatcatacccttctctcagtcaaggctacttagaaaaaactgcctctacagatttcaaagccaagcagcaataatcacgtgaccaacacccgtttaatagggatgcctcaacactcctggtcagattttgtttgctgagtccctcaaagcttattggcttttgctcacagcccaaggtatgcaaacctgcttatatacaaacagctactctcctgtgggcaaaattgccactacagctgaacatatatgatcggtacctagaccagttctgccagagtgcaacacttcccactttagccatgccagaagatacaactacacaaatcgctctgcaacatgcaattcctttccttttaattttccttttactcccatcctatgtcctagatgtcagagtgagaggaaggtccaaaatataacgtctttccattccctctgggagaaatgaaacaaaaaaggaaagtggcaaaaaaaaaaaaaaaaaatctggccgggcgcagtggctcacgcctgtaatcccaacactttgggaggccgaggcgggtggatcacgaggtcaggagatcgagaccatcctggctaacatggtgaaaccccgtctctactaaaaatacaaaaaaaaattagccaggcgtggtggcgggcccctgtagtcccagctactcgggaggctgaggcaggagaatggcgtgaacccgggaggcggagcttgcagtgagccgagatggcgtcactgcactccagcctggggtgacagagtgagactccgtctcaaaaaaaaaaaaaaatttcaaaatatttcctgataactgttagagcaatgaatgaagaccatgtcttataactgtcagcttactgacaacgaaccccagaatgagacaaacttaccaaggacgtcacaggtaacaggcaaaaaaagacggcgcagaggcaaattccgaacctttccgttttacagcctggaggggtcgggtaaaacaggtacttcctgtgagcagtttccgccttaggtgaaaggaagaggcggtcacatgaaggactgcgcgttccaaactgaccaatcagatagatgattgctatctccacgggaggaactaaaaagacagccattaggagagttcttctaatataagtccctctgtaatgaatcaaacaaaagaattgagatgggtgttcctacctaccaacataattcctagtgacacctgttgggatcttttccttccatgtcgcagctatctcttggcaagccccctggctccgtgttacttctttatcccacttggtgattaggaaagtttgagattgcctgtaacccaaagcaagtcataaatcccgtgtagcccatctgatctctcctaagcatactaggatgctaattatgatgaccacataatattttgcccaaactgagacccttgagagtgaaagagggcaatgtaattaattaaaattatacgttttcttattttttgagattttgagactttatattggtgggccaataaagtgcaattcaaaattcattttggaaaggaaattagttctaaaaattaaaatgatataattacatattaaagctaaaactttttgtaaagtctgtattgataatatgaacataataaaatggcactttgggaggccaaggcaggtggatcacctgaggtcagcagtttgagatcagcctggccaacgtggtgaaaccctgtctctactaaaaatacaaaaattagctgggcgtggggtcggatgcctgtaatcccaactacttctggaggctgaggcaggacaatggcttgaatcacagtggcggaggttgcagtgagccgagatcgagccgttgcactccagctgggcaacaagagtgaaactccatctcaaaatatatatatgtataataaaatgatcattcttgctgtatgctgatgtattttaattagtgttttggtctataagactgggtcactgatattttctaaagaatatattttaatatggtattattacttgtcaactttttaaatcgcctatactcttctaaaacatgtactttatgggtgatatatgtcaaattgttgacatcttcacttaactgttcaccatgtattatagtattttaaattgagaaaataagctcatagaaattctgctaaacagaaaataccctttctatttttttcattttgaaatatgtaattttttcagtccaaatattttcgcaagtaccttcttctggcctgtaaggtaacctatcttcagcacatatttgtatgagacaaatttcattaattttgttgttatttatattcttttgaggtttttttgtttttttgtttttgatggagtcttgttctgtctcccaggctggagtgcagtggcaccctcttggctcactgcaacctctgccttcccgggttcacgcgattctcctgcctcagcctcctgagtagatgggattacaggtgcacaccaccacacccagctaattttttgtgtatttttaataaagacagggtttcactatgttggccagactggtctcgaactcctgacctcgtgatccgcccacctcggcctcccaaagtgctgggattacaggcatgagccacggcgcccggcctcttttgaaggtttaacaaatttagatcctgcaaattggaaagccttttaaattttatgtctctaaaaatgtgaatttatactacttatagtagaaatcccatgaaaaaaattatataaatttaaaatattccaaagcacaattatagaatgtgaaagttaaatattatataagatttaagatccaattaaatttgttcatattatcccttggttttgaatgagtattttaaatattttcctgtgtcatgggctttgtttttaataactacagtctgctacattttcaaaacccgtattttattggcaaaacaattgaattctttgaaaattttcaaatgatttt

SEQ ID NO: 316790 - DNA, 4001 bp, Homo sapiens
acattttaaatttttccctgtcttcagataacagtatgaaactaagtttcaaaatgtccaatcctacatgctgaatcctggtagataagagtagttaatattaaatgttttctaggatctgatcttagaattttgacagcaaacttacatgaacctttttttcttatattatttgaaggtaagaaatatttcctgaagatttattcttgatcaacccacctactatatatttgaagatcaaaatgtctattgatcacttattttaatctcttctcagtttggttcttacgtatcattataaaactatactggccctgcactgagaatttttagcctacttttcttgcttgctttgtcattaaacaaaaattaagcatccatcccatgctgatattattagcacagattactttagctgtaccttgattatcagaagaccaggcccaaattatttcctaagcagaaacataacgaaaaaagtcccaagaacatttttaaatacctctttattaatactaaatgcatcacaattaacataaaccaaaaggtgctttaatatactcctaggaaagacgaatacagatggttatttgggaacatcagttggaataaagaccccatcacaaactattcatctcaaatggttatagcagagaaaatggaatactcctttttccttggaaaggccttgtgcagtttcaaaatctggtttcaaaagtcagaaaccacttttcaccctggtaggaggaggggcaccaacgtatctttatacaccaccaccccagattggcaatatccctaagattccccaagcatccacagcagcgagtgtacctaatacgtatacacacacaggtagagatgggtacacagagccaataaactggtcctctggaaattagagaaaacatgataaatgactctttctccctcgttctcctttcctctcaatcactgccttctgcaccttatctttctactcttgtcagcaaggaagaccaaccccccttgcgggggactcgcaatcattcctttgggtttttcacacagcaaagtgagagcgaccgctggggttgcgtgcgtcaggatttgttttttctgtattgctatcccccccatcccccgccaccccagcctcccaagcctatacttactagagggtggcctaaggtctggggagatgggattggtgctggggggatgggacgggaaagcagaaattgggccactggcgctctaagtcgggttcttccccatttccatccctccctccacttcccaccttccaccttagataccttttaccaagaggcacccctgggcccatccctccctccttcccccaccgccaccagtcccaccctctgccgcccccctccgggatgcccccagggctgtcagggggcagcgcccttaccaggctcatggacgccagggttgtcggacagctcgatgaccaggagctcccggccctcgaagctgcgccccaccgtgtaaatcctgctgatggcggtgcactgcagccacacggacacgagcgcctcgcgcagctcggggtagcggtggtactcgaaggagatgccgtcctcttgctgcagccgccggcgccgcctcatgcccgccgcgggcgccccgggctcctgggcttcggcgcccaggagccacccgcaggcagccagtgccccgcacagagccagcagcgcgctgccccctcgcccggccatcgctgcgctccgccgccgccggccgtgccttcctacgcgggcggcctcttttgtctgcccggccctgggcttagcccgccggcgctgctgggggcggcaagttccgcaccagcctctactcgcctcaccttccccggctgaatgagtgtcagcccgcgcactggggccacccagaggagacgggcaaagccgcggctccacgggctgcactactggccgcggagcccaggggagctgcaggagaaaccactgcgaggagggggccggcggagagacgggccggcgtggatctgggagggctgctggcgttatttgctggctcggaaccacgtcaacagccaaatggcgtccgggacgacgcaggtgaaatgacagctaaggtccggggttcgggaacgttactgtcattgagacacccatgacccacccacgtcactgcgtatggaaaaaatattcttgtattgttagtggagccttttaaagggacatctattccaagcctaccagtttccatcttgatccaccaagaattagagaatattccagaaaaaaggaagtactggcagccacttgccatctcctgatgcgtctttcataattgtatcaagagtcaaaacacaaacccaagggttgggttttcatttattagaaggtcttgctggaaatcagaacattaagtgctttgatttagaggtttaagagaatagaaatgctttcttccaatttgtagatactgtccttaattgtatttatgcacattcctagattcttccagaaaacaaacagacaaaataaataaggcaatgtcatatggctgtgcctgcaccagccctcctctttaatactatggggaaaataagtacaactctgctgatgctttagacaaaggatttagtttggcattaagattaaatcctgttaagaaaactctgatgatgacatgacacctccgttccttttgcaaagctattgtaaaaataaaaaatcatttacagctttaaatatccaccccttagtcgggatttatattcctggagcaatgtctggagcagatgttactctaaagaggctgctgtttggattcagggacagcacaaatctaaattaataaataatccattgggtattgcaaccgagcaggaaaagtggacaccatgcgggtaattttccatgttaagcttctttgtttttctaaacttgttcattcttcacctgtttaacaatgcattgcacataataaaaacttttacgtggaaaaggagttagatatttaagtcatcttattggatcaataaataaaagcacagacatggttggtaaggtgctgctggaggggctggctttaaacacccctatgtacatatactacagcagcatggatcttctttttttttttttttttttttttgcgttttcggggagaaactgtcactgtaaacacatggcactcaagttgaattgatgtggatccagccatttttttttttgtcaatgtaggcagagctaaaaattgtatattttccactatgaccagtctgtgcttgattacatggtccagaagtttgaaatcaaacttataattatatttctaaaaccatgcccaaaacagcaaccttggaagcctagaaaaaaaaattgagtagctaaaaccaaataacttcagaagtaggaggttaagattttcatgttagcaatttagagtaaccacactaatttgtggctaggtggggcatactgactagtaactacacacataaacaacatatttttcattgaagtcctgtgttgttccttagctgtctctttgaacaaaggatatgcgttctattttctccaaaataaaaaattttggaatgaaaacttggtctttgaatttctgggctatttttaggtgtaggtcagctgtaccaactttactggcatatgtattacttgtttgtggcttcataggcaattatacaaaagattatatatccaccctgattgctggatttaaaaaattttattttggagaaaaaaaaattgtaatgtgtaaaatcatgcctactatgtggtctcacttgttgggcagggggttctcttttacagcttagttgtttgtttccctaatctataaaataaaaggtttggatttttcactctctaacgtttgcttgcaacagaatcatgtagagagtttatagaatgtgcagattcttaagcccctatgaattcatcaggtctggggtgggtttcaggtattaacaagcttctaggttttaaaaagaagaccagtca

SEQ ID NO: 316791 - DNA, 4001 bp, Homo sapiens
gccgcccgcggccccggcgctattcggcccctgccccagtccccactgctgcgccgggacgttcgagggggcgcccggccagccgcggctcccagcgcgaactcgtctcccacgcccccacagcccacggtggccactgccctcccaacccaccgggggctggggttccgagtcctgtcacggttgtccgccctcagttccactctcacttgggcgagtggcccccgtcgcggcttctctcggggctaaggtcgggtccccggctgccctgcccccgcctccgtcccccgcccatggtctcccggtcccgcggcgcggccaggccgccgcccgccgtacctggtggtggttataggagttcctctgctgcaggaaggcggcggccgccgcctggtgctgctgctggagctgcgggctgacgggcgacctccggctctgcggctgctgcggcgccgcgggcggcgggggctgctgttgaggtatattcatggcgggcggcggcggagggggcacagcggtagccgagaaggggccgccgaagccgccgccgccgccgccgctcgtcggaacgctgagcccagtgcagccgtgcggcgacacgggcgagaagctagggaagaaggccgggttcatggacgacggcagcccggggtagaagccgttctctgagtcggggctgggcggcggcatggcgctgagcgagccgccgctgccgccgcccggggtggtggcagacgagccgggcggctgcggctgcggctggggcggctgctggggtggcggcggctgctgctgcggctgggtcggcggcggctgctggggctggggtggcggcgacgcggtctgcaccgaccagggggtgccgaagccgggcagcggcggcggcgacgcggagccgcctccccctccgcctcctgggggccccccgcccccgccgccgccgccgccgcccgggtgtggaaggtccgggctctgcaggctgctgaaggcgcccgcgccaagcgcacctccgggcaggaggttactgggactgttgagcagagggtggttgggggactccatggagcccggcgcggggttcaccggcgtcgaggaggccaagcccgcattgggggactcggcggcgctgccctcgcccgcggctggggtcttgcgagggctgcccgcgcctccgtggcggcgccgcggggctgcaggcggcgagggagggagctgcgggagcgggggcaggtctgccggacgctgccgcggggcgaagtcctgcggcgagaggtgctgctgatgcaggaggctgaactgctgcggcggctgttgctgctggcgctgagcgagctgcgccggctggaggagcgggccggctggcggcggcggcgggctgaaccgaccggggcagtggagcggcggaggcggcggcggcggcttcgagtccggagggtggggaaggtggggagggctgaactctttcctcttctggctgctcagctgctgctgctgccgcttactgaagtcctgcggggaggaggtgcggcagcagcagcaggaggaggcggaggaggaggaggggtggtgcagactcggtttgaagtcctgggaggggaggaggtgggtcacacccgcgatcgtgccgccgccggggtggtggtcggggagtttctccgtggccgccgcccccgaaagcggccgcgccggctgctgtgtcagccccagaagcagctcatcctgcatggtctgctgatgcgccaggaacggggaggaagaggaagcggcggcggccgggctgcccgcgccgccgccgagggggacggagaagggggaggcggcctctaagaagccggtgacaggcaacggtggtggcgacagtgggccgaagggcgtggcggagggcagcgggttgacggaccccacggcgtaaggaccatacgcctcgccgcagaacaggggcccaggactgctacttcggagcggggcggtctgcagcaccccaaacccgaaatccctcatttatcaggccgccggcagcgggaggagacgctcctcgtcccctgccccacctaggaagccgccggcgctggggttgcgcggccgtggtggaaggagggggagtcagtgagagagggacaccgtgactgagccagggggcaccgacttcggccccaccacccctcgcggcgatcgccgccgccgccgccgtcgcagtcgccgtagccgccctggccgcttaagaaccccggaacgtgcgtcagcgccacctcacaatcgcgccgccccccgcggtgcgtcccggcacgcgcgggcgcgaggccaccgcgtccccgtcgcccctccccgcccctcattactatgcagacgcagccgagggcgcgctcgcgctcccgggagggcgggagcgagcggcgtgtcccgttgggtctctccgctcccggggaaatggacaggccggttggggtgggggtcggctggcaaacagtggtcgggagcattgggcgggcgcgcgcacgagggcaagcacgcgcgggagggagggacggttcctgggcaacggcccctccttggcgcgggatccgcgcagagtctgcctgggtcgcacgcgtctccgcccctcgcggtgcctcctccttcctgtcacctcggttccgccctgggtggggagaagccctgctgcaccactcgggcttcccagagcggggctggcccgcgggggaaactgaggcccgggaccccgaccggcgcctgcactgtgcgacccgcgtagaaataggcgcccgaggggcccccagcgcaacgcgggagcccggcccagcccgggggtcctgtggtgaactagcgtctgggctctgccggcttgaagtccgctgagcgcctcgccgcgcacctctagaccccgagtccccgatctagggcctccttgtagccctaggtagcgccctctaagcttgtttctgtttttaggcgctggtaggagtgctgtcaccgacgtcgtagagccgccgagggtgtttctgtagggtaaacatgaagcctcggctatattccaggcattttcacttgggtaagaaggaacaaagtccctggaacaaacacgctccgcgtggttatttacacactcggatgcgtggaacgggttccacggcgagctcccatagtaaccccgggccagctccgcttcataaaagcctttcgtgtgccatcagggctgcagcgtgggactcctccccaccacattcattccggcgtccccgccccttccccccagggagactctaatttattcctaagctttatgaattttcaagggagaaatagttcttacatcagggaaaaaaggaggttctgactcagcagcagacttgttgagacttgcaaaatggaagggagagagctttccatggtagagctctttagaagcattagaggaggaactaatcctgtgtttccttttgtatagaaacattttacataaagtatttgaaggtctagataaagaataacagagtgatccatactacatgatgaggtgaactttatgtttctgttttgtaattttaactgttttgcttgatgcttagagaaatgaaactattaaatgaatcctagaatatagactcaaacccccaaagcaatagaaggtggattcagactttacttgattttggtttacaagtgaactaagattaaatatttaattttataaattagcatactcttactgatgtaggcagagtgtacatttttataagtcctcattctctatttgaattctacttctgttcagtgtctcaaatttatataaatcgaaataaacatggtagaaagagagcaacattgccccagggaactatacttcatgtataatgtttatctctgctatcctgtccaatgaaccaagttttatgttgcctttacaataaggaaaaagtactttttaaaaaactcaaatggttcagaatttggtcaggtgaatagaaaattggttcaacttattaatctcaaaatcattttta

SEQ ID NO: 316792 - DNA, 4001 bp, Homo sapiens
aaagcctacgccagagtgtgcaccctcccccaggacgtgcatcagcatggtccatgggctctgccccgaccacagcagtggggcagagtgagcttacagggcagcccctgtcccgccaggaacaccagttctggctcggggcctcgaaaagggccgggctgggggcgctgctgggcacggtccttgctcctctgccccaggctcctgtgcagggctgcgtgggtggccgtgtggctgcaggggcgctgctgcggtgggccagatgaggagcagctgctgtggtggtctctccatgtcccctcagcccctccccaccccacctcccgcttcctacctcctagagcctgcttcatcacaaactccatggcgattgctctgcttccacagtggctcctccaggggtcagaactcacacgcaagtatggccgggagcgagtgttcttcctgggggagagtgaagtggtcacaggtcaccctaagcaggcccctgcctggccttccccagagaccatcattccttacccgcaataccttgtgggctggaccctcccccacctggagcggctgcctgggaagtccttcgtgaggggcttctgtccccacacccaaaccaggaccccagaggacctgaaaatggtctccccagctcctggggtgtctgaagcctctgcagggagggctgctgatggcttagggggcatcgctcagaggcgcctggcgccaggctgcggaagcaggggcggggcccagggggcgtttgaaggtgactgctccgctctgcagctcagtgtctggagcggcgcctccgcggtggtcccgagcccagggccgtggagaagggttgggggtgggtctttgagcgggtacccttcagggcgggctcctgtggcttctgaccagggaggcttgggtgaccctatccctgacggcactgcagtcagtgtgccccccacatggcccgcgtagaagagatcggggttggggagaaacttcagggggctcagccttcaggaaacacgtggggacggggacagagcacccccgccccgggggcgtgcatggggtggggtggggcgctctggtcccctcttgggaagccgctttctgaaatcacagcagccgcagtgagccccccggttttgcggggtctctcctatcggggaaccccaggtccctggagagacactgtttgacggttcacccctcgccctccgcagaggaaggagactcgcgcggggactgggagggcggcgggcggggagcgcccctcggaggctttgccgcagcgccgattctcctccaaacttctcccctggctcccgcggcgcggggaaggagggcacggccgggccccgcagacccgcagggctccggccccgccgcacccgcacccctcggctttgcgggcgggcgagcggccctcaggcgggagcgcgccaggagaggaaagaaagagggcgagggaggagagggggagcctcgagacaggaagaagcgaggaggaggccgggcgcgggccgggaccgcgggggccgcttcagcaccgcggcagtggacagcgcccgccccggaccccgcgcgcgcggagcccgggagagaaacgggggctgcggggagaagccggggtcggggggagaaacgggggccggagggagaggccggagccggggggagaagccggagccggggaggagagacccggggagcggaggccggggggaggagctgggcgaagccggggccgcggggagaaggggggccgggaaggagaaaccggggccggcgggagaagcggggagaagcgggggccggggaggagacgccggggccgggaggggagacccggggagcggaggccgggcgcgcgctgcgctcggggcgcggttaccttcccggggcgcgggcggtcagcggcggggcgcgctcgggccggctgggtccatgtggcgcccggtgagctgcggcggcggctgaagggcaccgcgaggagggcgcgtcactcgcaggcgctccccgccccccgcccgcgtccgagcgtgacgagcacggggaggggagcgccgaggggcggggccgcgggcgccgggcgggggcgggggtggacccgggggcgggggcggaggcggacccgggggcggggggcggggggtggacccggggcgggggcggggggtggacccgggggcgggggcggggggcgggggcggggggcggacccggggcgggggcggggggtggacccggggcgggggcgggggtggacccgggggcgggggcggggggcgggggcgggggcggggggtggacccggggcgggggcgggggtggacccgggggcgggggcgggggtggacccgagtgacgcgcccccgcctccctccaacccggcccgggctcgaccttcccccggcgggcgcctgcgacccccgcccgcccctgatctgggcgcccccggctctgcccccccgcccccagcccgacggtgcgggcctgctccctacagggtccgcgcggggccggtgggtgcaaaaccctcgggcggagaagtcgctgcctcccgagcggaggggccaggggttgggagtcgctgccgcccccattctccggtgaccgtgtccctgagcgccgcccgccgccccgacccctctgccccgacctccccgtatcgcagggcgggagaagggggcccccagacccctgaaaacccacgcaagcccctcgcagccagagacccgcaggccggcccgggctcactttcggtgtaacggagtcgctgtttcctttaccgggacgaaggccagagaccccaccgctccctcccctggcccccgggatttcctctgcagcggacgcggcactgcgggagagcggggtcgccgcaaggtcggccctgcggttcgcgctgtgcagtgtcgggagccaggcggcgggagggatggggcgcaccgcgaccctagagctgccctgtgctcctggcggggtgggggtggggaggggggaggggggccgctgccggtggccgccgcactaacttgtcactgtcccctccctgctgagtcctggggactcccctggcgcagggaagatgcggcccctcccccgccctcagccccatcccctccggtgccccgtgtttagcctgagctcaggaggactcagaggcctggactcccagccttggccccagcgcctctgcccccgtccccactcttctgctgacttggcaggggacccttcgcagaggaagggagcgctgggggagagggaagggtgaaggcaccagggccaagcccatgggggctccctgagacagccatgagggtcccgtgggcctgggggttcacaggcaacctcccagagggggacccatgccctaggattggggtctcttcagcctccctggctggaagccatgggcacccccagcaccgtcccttcctctctcccgggatctgagccaagtgggctcagaacgttgggcccagggacaggaggcaggacacatgcctgggggcccggcctgagccccagcctgctctgctccatctgctcctctagtctcctcaggacctgggaggggacagcaagggtgagatgttcgggtccaagaaagaggtcacttctcggccctggtgctttctctctccatccctaactgggtggataacccaacagctaacccggacagtaaccccagagaggaccccaggggtgaccccctgagcccagagccaggctcatgactgaccctgccacctccacaagctgcatgcaagggatatgctggtgcctttgggacagtctgcacaggagtgcagggaggtgcccgttcttccgagcagaagcactggactcctaggctgacccctccccgttctacaacccaggccagcctgagctccaagcacacctggagctggggcctggggcacagaggacagagaccctctgccagccctcacgttctgccctgtcttcctctgcctctctctctgtctctt

SEQ ID NO: 316793 - DNA, 4001 bp, Homo sapiens
tgaaagcggcttttgaaatagttctaagcctcttaaccacgaggtggcagcatttcttcaacaggggagtgacagcccgtcagtcctccccctcctcaactgaccagtggctgtgcctgggtcagggatgagacctgaatgaggtcagagaggtcaggccatctgcccaggtcacacagcagagttgaggagtcagaatctgaatcccagaccctaggacatgaaaattacctccgtccccaggctccagtgaggacagggaatcttccaccagggaagggtgaggcagagaggagagagcaccaggcttgctctcagcaagacccagatggcgagacagggacatggcagcccggggtgggggacctgcactgcaggtgaccggctctgcccacttctgcctgtgggctggaaacgtccttgacttccacactcgtccataagaggggagactggactgggggatgagtgatttctcccagaaacacttgccgatgccacggctgtgctcagcacctgccagggacagagaccagcccatgcatcctgctgggtgaggacagggtggtctgtgctgcctgcgtgcagaggaggaggctgcatttcttcctgggaaagggcaggtcaggagagcttcctggaggagggggctgtggtctccaacaagcctatgattctagatactgtctgggctctcaggggccaaggggaggcccacccacaacacggcacaagctccagcagcaccccacctgcacacctgcatgagcacacacgcagcgggtagaaaagagcccagaggtaaggcgaggagcagaggtgggaggaaaatccaggcatcaacaggacggaaaggaaaagtgtcgacacagcgcactggggtggggtattgtggtcctggcacatccactcgcagggctcaggcagttctcaggtatccacaaaccccagagaacaagcgattcagaacctgacaccctgcacccttgaacccacacacggccccactcccgcaggagcccagatgtctgcttctgatgagagtcctgagcacggttggctagatgcacccccacacctggagaggccgtgaggccagacgggagcccaggatccagcccccagcctctaccttcctgctccccacccccgctgcacaccccttgggtgaggtcgtgcgggcagacctcccagaggatccctgcgtccattccctctccgggccccagatccctccagggggcccacgccccctcccagcccttagggccacttccggagacttgctgtccacatcacagccccagctgggagggaggggtcaagagtttgccacagcccagagagactgtcccgttcctggaaagacccggggaccttagatggcctctcaccctgcaaagtcctggcacctgctccctcgaacccacctgcagggcgcccctgctgctgtgtccgacaggaaaaagatctcaccccccggcccaggcgtggtgaccctctgctgcctggggtcccggcctggatgccgtagagagcctccctggtgtccccgtccaggggagaggtcacactaccagtcccaggccacatgctgcccactttggagacgttctcgccaggaccataggcgcgtgacctactggaagaaagctcccgggcccctgggaagcgacggatcacactccccagaggttgcagggtggagggtggagggtgggggcaggggacggccttaccggcggggttccgctcaaactcgcaccccggccgggcagcggcgacgaccaggactgtaaggagcagcagcggcagcgggggcggcatggtggggcggcggaccttggacggccagcgcagtgatgtggcactcgggccgcgcggggccggggctctgcgctcgctgggctcccgcccccggcgcagggagggcgccccaaacgcaaatgccggagtcgggttacagtgggcagcgccagaagctagagagaggatgccgctgggggaggaggaggggcaggacagcagataaaggcccctgcctgccccgggcggagtgccccgccccgtccaaggggctccccgcccctccttgggcctcagtttccccatctgccacctgagtgcactgtggagctggtatgcagattccctgctgatcctgcctaaaacccctggtcccctgcacaggctgcgtcgcgggtgaatgcgggttctggctgcagcgctgatcccagcagaccagggcctgtcaggtgaggaaagtgaaggcatgtccccaccttttgacccttgtcccctgtgtggatgcggggagggggctttgctgggtggctggacctttaggagccatgtgcctcatgggttcctttgccagctataccagtgcaccagtagcagtccccagagccagctgccactcagccagccctgagacttaggacaagccccttcgcccagaggctggggtaatggagacagtactcactgtggccccaactcattgctggcacccagcaggtgctgcttcctgcaggtcatctgctcaaagatgcccatttcaataccccccgggatctggggcgcctggtgctcaaccttgccctctctctgcctggactcagctgggtccttccagaagcaactctgactgccccggccagcctccggggccacagtctttgacttccctgtctgagctttccagcccaggtctgagggcgaattcagactccatgctttcccgagccccagctggcagtgcacagtcccagggagggttttcctcctcctccctgagagctggggtggggacaccgtgcctccttgttgtcccctgctgtggcaggcttagttctcgtggacgctgagcgttcagccgtgagtggcccacctgttgagggtgtctcctagcacagccctcattctgggcttttccttcccagtggtacctaaaacagacagtttaaaatcaacggcattttagatttgaggaaattgagtgctagcttgtgtcactttttaagactcggggagaagaatttggtcatctttcctggaaccagcttctctcttccacagttaagttggaagggacagcctctaatccacagcgtctcacccacgagggcccaacccaccaaatggttcatcaggggcaaatcacaagacagggttaatcgttcccaggggtaaaagaggcatccaagtcgtccccatcacaccaaatccccagacactgtccagccagcccagcgggcaataggccacggggagaggacccagccacacctgtgcagtcaaggtggggccagtgaaccagcaggtgtggccagagccaagtctgcaagagcacagcccctggggccgggtgtgtggtcccatggggggtgccctgcaggacaagtttctaggagagaagccactttgtgtcatcaaaagagcacagactcaccgctcaaaagagcggcccaccttggggctcatgaggttggggtagggtcagcatggcagccggaggagcctgtcagtcgttggaagcctgctccccagctggacatggtgtgtgcatgccggcatccccagcacttgctgcagagcgggtgctggggataaaagtgggtctgaccctgttcctacccaccctatggctggacccttgagagaagggtgctggggctatgagcacctgaggagggagggttgtgtctgcctcagtcaggtggaaggacttggctaagcagaggaggaggaagtaccaagagaaggcccagaaaggatccaggccccctggggagaggccagtagactagggcacccagtactttagcccgaggccacgtagataggagtggggagcagtgaggacagagaacagaaagggccagcaatgccaggctcaggagcagagaccatagcctggggacttctcagggcttctggcaggaacacaacctgctctcagctgcatttctaggagctggctctgcttggtggagggt

SEQ ID NO: 316794 - DNA, 4001 bp, Homo sapiens
gaaagcgtctcgctctgtggcccaggctggagtacaatggcttgatcctggctcactgcaacctctgcctcccgggttcaagcaattctcctgcctctgcctcccaagtagctgggattacaggtgcacaccaccacgcccggcttagacaagtactttaaatcagcttctacacatatgttcaaataactaaaggaaactgtgtctacagaattaaagtatgagaatgtttcactaaacaaagaatatgagtaaagatacagaaattataggagagagccaaatggaagtttggagtagaaaagtacaataactgaaatgaaaaattcactagagcagcttgacatcaggttttgtttggcaaaagcatctgtgaccttgaagataggtcaactgagatgacccattctgagaagaagaaaaaattccggaataaaggaaagtcaaggaggcctccaaggctgtgcccagctccacatcaacacacgtagctggagtccaagtgggggaagagaacatggacataaaatatttcgagaaacgacaacctaaaatttcccaaatttgcagaaccacaatggagcgctgaaggcatactcaccacacatcaactgtgtgtcagcagaaccatgagagttactggtgcaaagcacttaaaggggtcccctgtccagtcactggctgaacatgaagctgacaaaaccgaaggattcaatacccacattcaatatcaatataactaggcagaagatcaataagtgaagagaagatgtaaacaatcagactacaagaaatattaacctctatatccaagaagctcaaagaactgcaggtaggacacactgaaagatccacaattagacacaccacagtcaaacagtcagaagctaaaaagagactgagacatggtgcggtgctcccgccatggaaaccacagatgccagaggcagtggaatgacatctatagaggactgaaagaaaaagagggccaaccaagtcagccatatccagcacaattattcttcagaagagaaggaaaaattacaacattctcagataaacaaaaacaaagagaattcattgctagaagatctgtcctacaagaaatacttgaggctgaagtccaagacaccacactcaaatccacacaaagagcaccaaaaaagacaactgcaaagccagcaacagagacagcagaaactcatttctgtttgtacatcttttcttcttctatgtgatttaaaagacaactgcataaagcaataattacaagactgctgacggacttacaatctaaaaggtagcatttatatgacaaatacagcaccaagaagctgagaggaaacaaagctacttgaagtgaaggtttttgtacattatattaagttcatctgaacacttgattggttttacgttgttactgtaatactcagagcagctgctaagaaagttacttttaaaaaaacccagtaaaacagacaaggaaattacaatgttacaagagaattaaatgtccatttaacacaaaaaagtaatggagaaataaaggaagaaagacaaaaaagacaatatagtaaacaaatttagaaatggcagatacaaatccaactttctcagtaatcacactgaatgtaaatggattaaacatccctctcaaacagcagagaccagcaggacagatgaaaaacatgatcccactatgtgctgtctacaagaaacacacttttgattcagagcagagaccagaaagacagatgagaaacactatcctactatatgctgtttacaagaaacacactttagattcacggcagagaccagcaggacagataagaaacatgatcccactatatgctgtttacaagaaacacactttagattcagagatacaatgaaagttaaagggtgaaaaaagataccatgcaaacaataatcaaaaaagagctaagtggctatactaataacatacaaaagggacttaaagacatttttttttcactaaagacaaagaaggacatgtcataatgataaaagggtctgttcatcagaaagaaatagaaatacagatgcacttaacagagcttcaaaatttatgaaacaaaagctgacaaaactgaaggattcaatacctcacattcaatatcaatataactgggcagaagatcaataagggaagagaagacataaacaatcagactacaaaccaatcagacctaacaggcttctatacaacactacaaaccaatcagacccaacaggcttctatacaacactacaaaccaacctctgacccaacaggcatctatacaacacacacaccaacctctgacccaacaggcatctatacaacactacaaaccaacctctgacccaacaggcatctatacaacactagaaaccaatcagacccaacaggcatccatataacactacaaaccaatcagacccaacatgcatctatacaaccctacaaaccaatcagacccagcaggcatctatacaacactacaaaccaacctctgacccaacaggcttctatgcaacactacaaaccaatgagacccaacacacatctatacaactctacaaaccaatcagacccaacaggcatctatacaacactacaaaccaatcagacccaacaggcatctatacaacactacaaaccaacctctgacccaacaggcatctatacaacactacaaaccaatcagacccaacaggcatctatacaacactacaaaccaacctctgacccaacaggtgtctatacaacactacaaaccaatcagacccaacaggcatctatacaacactccacccaacaagagcaggatagatattcttcaacactctgggacagaaaatacggtatgccaataaaataactctcaatacatataaaagacgagaaatcatacaatctatgttttttagccataatggagtgaaataagaaatcagtaacaggccaggtatggtagctcatgcttgtaatcccagcactttgggaggcaaaagtggcaggatcacttgagcccaggagttccaacacagcctgggcaacatagtcggaccctgtctctacaacaaaatttttaaaaatttagccaggcttggtggctcatgcctgtagtctcagctactcaggaggctgaggtgggaggtcaaggctgcagtgagctgcgatcactgcactgcactccagcctgggagataaagtgagatcttgtctctcaaaaataagaaaagaagtcaataacagaaggaaacctgggaaattcacatatatgtggaaattaaacaacaaactcttaaataaccaagagataaaagaagaaatcaccagaaaaatcagaatatacttttagatttaaaaaagggaaaacacaatatagcagaacttaagggatgaagtaaatcagtgctgagataaaaatttatagctacaaatgtctatatgaaaaagatttcaaatcagtaagctaattttccatcttaagaaacaagaaaaagaagagaaaataaaacccaaagcaacccaaaggaaataataaagattacagtggaaattaacaaaataaagaatggaaaatcataggggataataaacaaaaccagaagttgtttctttaaatagatcaacaaaattgataaatctttagctagactaaggggagtaaaagagagaagaatcaaattactaaaaccagaaaatactatgaataggctgggagcattggctaacatccacaatcccagcactttgagaggtcaaggtgggagggtcacttgaggccaggagtttgacaaagatcagcctggacaacacagcaagatcctgtctccacaaaaaaattttaaagaaaattagggctgggtgtggtggctcatgcctgtaatcccagcactttgctaggctaagacaggaaaatttcttgaggccaggagtttgagaccagcctagccaacatagtgagaccccatctctaccaaaaata

SEQ ID NO: 316795 - DNA, 4001 bp, Homo sapiens
tggacagggggagatacagaaggggtgggggaagaggaagctggactctcgcaccatctccctttctgatcaccccaccaccacacacacatacacacacacacacacacacacacacacacacacacacccttgctgttggacctctccctcgcgaggctccggcttcaggaccacggagagctctggagcaacagcccgcccgcgaagggatggggcccgaagaggcccaccaccgtgtttaccagttccctgctcctattcctccaggaagccctcccagatatctgccccgatcaagctctgcttccctccaggctcactttgggtcactcatagcatttaagaggggaaggtttaattaaaatgataatgattgtaataaaagtcaacaacaaacatttattgaatgctcactaccgaccggcattaactgatttaattctcacaatgaatccgtcgctcaccctagcctgggaacttctggagggtggggccaggttgctgagccagggacctagcgcctaccctgggcctggcacctagcagttctccggcatccaggtctggaccaattcgaaagctccccagccctcggatgctccaacttccgtttttctggcacctgaccctggctctcgtcggtccatccaaaggctacgccgtccatccgcccttcttcccccagtttcctggtgacccccagctcaagagagaatacccgcagggcccaagccctagcgttccctctccctgatcctcccggccccatgctcaggtccgggaggccagagaccccagttcaaatcccagctctacctccaccttgctctgtgaagcaggcacatcggtgtgtgctgtggagctcaggagtgccccttgaatctactggcgcttgagggtaggggtttacggctccaactgcccgacgaactaaatccttaaccaaatccttccccccagcaagcatgaggggagcgctcggaaaaaaagctccttccagctttaagctgtgtggccgcaggcgactcgcggaacctctcccggggcccggcacacagtaggtgctctataattactaccgactgagtggatggatgaatggaccaacacggaacggagctccagttcttttcacaaaacagaatgaggggcctgggttagattcatcccagaggttccttcgcgtttaagcgtccatgcggtagctttagccaacttcccctctcagaacctctctccctttctgtagaagaggagccgggactggacccgggcgatcccttccgagtctcacggaccacgccggccagccccgaccgagtcgccccagctctgggaacctcttgcatgatgaggtgggggaggggccgcgccgtggctctccccagcctggcggccgctgccccaacaccggggcccgggcatggccctcgggcgccccatgccctgggtcctcccggggcccgcccccctcgtctggcccgcgcgcgccccgagggtacctggccattgtcccggccgaggggcaggtcgcggggcgcggggcggcggatgcgcagcgtcggcggccgctcgtcgcgctctccgggagagctgaccgcggagcccgagggctcgctcacgtcgctggccgtgtcctcgctgcctcccggccctggcagcccgaccgcgtcgggccggccagcgctgcgcggcgtgcgcgccgagccgcggcggcccacactgtaggcgtcgaagtcgatggtcttgttctcgtaggcgccctccaccgcggcgaacatgccgccgtacttctggcgcggggtctgcgccgcgctgcccggccgcgccaggtacacgggcaggtcgtcctcggtgttccacgcgcgccgccggtccgccatacccgtccaaggccggccacccaccgcgctcccgcctgcccgcccgcggccctgggcaccgccgtgcgccgcgctccgcgcctcggtgcgggcctgcggcggcccgggcgcgactgcggcccagggaggggaggggcggggcgtggcgcgcgccggggcggggccggggcggggcctctgggcggctgcgggctagcggcgcggccagctacaaaggaccaggaggcggggatcgcggctggggcggggagggacggtgacgctcccgagccgcagcgcggagggcgggccgcggcaccgcagtgccctcgccgcaccccccactctccgcccccaggcggagcgcagggcgcgaggagagcgcggggcaggagccgtgtgcgtacactcgcgcgcccacacgctctggaggcacacgcgggttcatacctgcacaccagacaattacgccaaacacatgagagatgcacagacatgctggcacacacacgagagtcaatcacacatgctctccagagatacacaggggctcgatcatgcacaccatactcaatgttgcacacacatacacatatatgcttgtgcacattccgagttcattacaaacacacaacagaaatcctcattgtctcacaaccccactcacacacagtatcacaccaagattaattgcacaactggagaggcacatgcgttggacacaccgttcattccgtcagttttattttgctgagcgcccactagtgcctagcactgttgtaggagctgggaacagagccatggacaaaagagaccaagtgcctgccctccaggagctgacctgctaaggaggggaattggatacaaaagcacccatatggtgggccaagaggtggtaagggccaggaaaggtggtgcagcagccaagagggacatgctagaggcacactccgacagacacataagagaagcacattcttgcatgagaatcagcgacacacacatacacgtgcacgccaatgacaccacacaacacaccaatatcaaaggcaagctcagggcgattccacacatgtgcatcataaactggcaacaggatgcccacacacaagtccacaccagtaataaaggaagtcaaaagcttaaataaaaacgctccagagaaagacacacagagacagagatgaccacacacacacagctggcagtcaaccagacagacagatattccctcattcgaggggcacagtccacttttgttgctcctggagcttgcagtctgggcgttctggggtttctctgtcgtggaggtcgctctgctggggctctcctctaaggccaggcaccacctgcctcctatagacaccttcccttatttctccacgattatcaggcagaggatcctgcaagtccctggggaccctacagtcccagctgcacttcctggagaggcagaatcgccagctgccgaccccctcctcgagccagtctagacaagcaaagtcaggactgggtggggactgcagaggggagcatcagtgcttcttgcaatgtccccccacccatagccttccatgctgggagctgtcccttcaaccccgggccctgccagctgcaagccagagctcccgcagcgtgaccaagctccaggaataccagacagacagatggattcatgttcttgttttatgactcttgggccccatggactgaggatcctggggccgtcggatccgtggcctcagctgacacctccctgaagctactgtctttcaaccctgcaacaaggggtctgtgcagcaggtaggtatttttaccggccccctcttggaagaggaaacaggaggggagatgtgaaatggctccctcagggcctcaatctcaaggaggttcagccaggcctagagcgtgggctcatccactcggtgggcatttagcaagttatttttctgtgcttgagagagaggctagtgtggggacacagatgagtatttctaagtctctgtcttcaacaagtgtttactctcatgggggagagagtgctgaatgcgagaacagaaagttccacacacagcctccatctaccttccacccaccgcagctgcatcctggctcctctctccttgtgtccctggg

SEQ ID NO: 316796 - DNA, 4001 bp, Homo sapiens
ccgtgatgtgcgggatgctcttcttgccctggtacgacatggccccctctggcgccctcggcccggccgctgacctgcggggctgtctgactggaaccggcgctctcggccccgctcccagcgggcgcgctgacaaaggcccgggagggatagagacacggacggaggctcggcgcccgtggatgcccacgcgcggctgccccggctgctcggcccgcccgccgccgctccggctgccagcaccgcccggatcggcgaggagggcgggagaaggaggagggagaggcgagggcgggaggagggggctgcagacagctcctcccggcggcgcggagcgaagccggattcgcccctctcggctcgaaccaggaagcgcttcccttccgatctcccaccccgccccccgccccccacccgcccagccccgccgacccccgccctgcgcacacgcccttggcgggccctggcctcgctctcgcgatccagagagtatggttttcagggctcctttaaaagaaaaagacggcgcggtcagggcccgcgggcggcgccacaggtgtgtggccgcgcgtctggaggcctccccggaacatctgcgggggtgtggggggagggagtgtgggacgggggccaaggatcggcccaagctgctgggaacgttcttgtccctccaggatcgcgcccaaggaccgctcccctcttgcctctccttccatagcctccgtttatccttcccgagtgcctctccctgaatgcaccaagcactttttccatctcggaccccaagcctttattcacgctgtaccctctccctgaatagtctaccccagacaaaagcctgtccactcccctagacccatctccaatgccttccccaccacgaagcctctccctgccaccctctccatcctagcattgaaccagccctccctgggggcctctaaggtggagccccctaactggcagagggaacagcagggacagaagggtacggccttaattaatgctgacctgttctactccaacagcagctccctcatcacacagcagcctgacactggggccaccaggtcaccccacagaattgcctccaagacagcaggtgtttggagggctgggccactggcaccaaggtctccacagccctggggacaagctgggggtcaggaggaggactagggtgctcctgcctcccagcactgtggacaccagccccggagtccatgatccagatgttgctccagagggaggtgggcaggaagccaggtcacagcttgacaaggtccgtaacagcagaggggaaaagatgaaagaagatggaggaaaagggggagccccagcaagccccaacctcactggacaggtgccccaagttcccaggcagaataaaacaccaaccttgtccaccacttcgttgttcattttctgcatgcgaaatccaaccccacaggtcctatgaaactactcatcttttctgctttcaagttgccatccagagcgagggtggcctaggcttggtacagctcccccagcactgtggttgggggctggggccctgaccttcaccaccccaggggccagtcccctaatccagggcaggaggccagagacacctgggccttaaaatagaggtgaggttttagcttcacagagaagccagctcagtatcccaggaacactaggcataattttcccattttacagacaggaaattgaggcttacagaggtaaaatgatgtaccccgggtgcaaaacatattagctgcagcaaagcagcatggagatgccaggttcccctacactctgtttacaactcatttccctccacgcattcatgcatccctggctctcagcggggcctaaaatccctgtcaatgaccggaaattgcagatggggacactgtccctccccaactcctacactcccttccttggagttgttaagtcctaggttccccgtaccagggcgttccctggggtcagtctggagatctgagcagaaagcccctacagcaagggacaagaccacgtgcgtatcagggggaggagcatccgcctgccactggccaaacagatcgctgctcccaagcagatttcgccggtacaaagcgccgcagccgctcagcctccggcagcggcaatccttgcgcctgcgccgcagaaacccctcctgcagcccagggagaagcctggtgggcggggggggaagggccggggcacccgttgcgaagccctggagcggtgaggcccgccccggaacccgagcccactgtaacccaagcctcaaggccgctctgccggcagaaagtaaaaccctccctccgtggagatcgcgagcccctgagttccacagtcgcgaagctcgagtgctttcggagccccgggagcgccagaggcgctgccttttgtccggtgcctgagaagccatggagaaaggcagaggggaccacagggagaagaggaaggagtaggggagaggaacgggagaggtgaagcgaccagcgtccccaagggtcagggcgcagctgcggggctggcccaggctgcgccctgggggagatgctggcgttggtgacattgaccgcagttccagaggaactctccttgggacagctacgggccgtgcacaaagcgccctcgcctccctagtactccaccacgctttgaggaaggccggaagaagacggccacccccatctgacagatggagaagctgaggcccaagagagcaaagcgccttggctggaaacccggattccctggtgctggtcccgcttctcggcccgcggcccagaagcctccccatcgggctcgggagtttggatcccaagagaggtcggaccaccagggaaggtagtggacagggggagatacagaaggggtgggggaagaggaagctggactctcgcaccatctccctttctgatcaccccaccaccacacacacatacacacacacacacacacacacacacacacacacacacccttgctgttggacctctccctcgcgaggctccggcttcaggaccacggagagctctggagcaacagcccgcccgcgaagggatggggcccgaagaggcccaccaccgtgtttaccagttccctgctcctattcctccaggaagccctcccagatatctgccccgatcaagctctgcttccctccaggctcactttgggtcactcatagcatttaagaggggaaggtttaattaaaatgataatgattgtaataaaagtcaacaacaaacatttattgaatgctcactaccgaccggcattaactgatttaattctcacaatgaatccgtcgctcaccctagcctgggaacttctggagggtggggccaggttgctgagccagggacctagcgcctaccctgggcctggcacctagcagttctccggcatccaggtctggaccaattcgaaagctccccagccctcggatgctccaacttccgtttttctggcacctgaccctggctctcgtcggtccatccaaaggctacgccgtccatccgcccttcttcccccagtttcctggtgacccccagctcaagagagaatacccgcagggcccaagccctagcgttccctctccctgatcctcccggccccatgctcaggtccgggaggccagagaccccagttcaaatcccagctctacctccaccttgctctgtgaagcaggcacatcggtgtgtgctgtggagctcaggagtgccccttgaatctactggcgcttgagggtaggggtttacggctccaactgcccgacgaactaaatccttaaccaaatccttccccccagcaagcatgaggggagcgctcggaaaaaaagctccttccagctttaagctgtgtggccgcaggcgactcgcggaacctctcccggggcccggcacacagtaggtgctctataattactaccgactgagtggatggatgaatggaccaacacggaacggagctccagttcttttcacaaaaca

SEQ ID NO: 316797 - DNA, 4001 bp, Homo sapiens
gcactgtgcttggtatggcagtcatttgacaagttaatgcaaacccactaacagccaatgggtttgccttaacttgtcaaatgactactatggaacacgttaaggtgcagccatttgaaaagccacagtgctcacccatttgttacatggcatttaaggcagggatctggttcctgtcacaacacgtgtatgtgtgttattagcaaaaggtactcaggaagatgaaaggtcctatacagtgaagccccattcaagtggatcctctctgatttgctgaaggttttgatttgtttaaaaccacaaacgcttctggctgatgtgggccaaatgaacacaaatgatcctcatcaaggccctctttcccaggaactaagcataacttacagcctctctccttcccatgctcattgaaaccacctttagaggctgctggaaccacccatttgatttctctttacacacaagttgactaattgtttcacaggaagaactaaagcagcaagacctgtcggcagatctgaagcccttaccatgcacctagcacactaaatgctttggagggtcacctaggatgttcaggagtcctgtgaaggggcctacatcgtacagcagagcactgaggttcagagaggcatcagacacccagctccatcggctggaaaagcctaggcatctccactccagagggcaacaggcagtaggcctggtgaccacttcagcttagcagactgggactgcacactttcagaggcagcatcccacagacctgccttgcaggccatcctattaagtttccaccttggagactggggacctgagagcagcagagaccttctgtgggcacacagcctcaaacccagaactcctgactcctgagtcactgcatcaccccgaccccatcacctgcctcagttcccttgggaggcagggttagagggtcccaaggcagggacttgttcaaatatcacctgccttcttctcacattgcccaggaggaagcaaccatatgtgttctagtgattcttgaccaactagtgtttacgaatgggccgcttacacctctgcgtctcagagggcagagctgagagacggagaagaggtggtgcccaccctctggatgggggcttggcagaggcctgctgacaagagctgaggctgggcccaggaggaattttctaactcaagactcagcccagagctggggcggatgcaggacagtgcaggggaggcagggggcctgggttccctcctgaccttcctgtggtggaagccctcagcccatgctctagcctcagggagctttacgtgggtaatgccacccgcaaagccttgctgccaccatttaaagaaacaggcctgcaatacacgggacaggccactggcaggtgagtgcaagtgtcaatacctccgcctacctaaggctgccctctggcaggtgccctgcgactgtccaggagcctgaattttgcataaatgagcaggctgggtctccagtagtcaaacctctggagtcaccctggaggattccaccacgcccagaatcccgcctcccggccccgggctgctcctgcatacatgggctccagtggtccgcatccctcaggaacagtcaggctccacgctgatgccaggcaggaactggggcggagggccagctcctgaccgctgcgccctcagctccccaccccgagacaaagcgtaaagacggggattcctttgtttccggccacacccagggacgcagcccggctgttctgcctccaccaccgtccccaccctctcgcggcccagcgtcgggaacattaacccttcccgggccgcagccgccagcgtcgccccattaggttatttttagctgcggggaggggtggaccgagcttccatcatggcgctgtccctaggtccggacttccactccatcagtaaaggcggggagtggggagcgctggatgatctttttccctcctccagcgggggaggtaccgggctgtggggtgcatgggccggacggtgcgggggccgagccaaggaggctcagctcaccctcccacccccgcgcgaggcctgcggggagggggttcggacccctgcccctccctcttttgttcggctccgcatcctccctgtccacgccatcctctggcacatcccgtggggggagggggcggcaagcccgcggggagagggactcccggctccagccccgccccgccatgcggggctcccccacccccattgtccccagaggctgggggagggggctgaaatcccgagaccggccccgccccacccgcggcgacgcaggaggcctcggggggcgcccctgccggcgccccgtggatctggaccctgccgggcgcccactcccagcccacaaaggccagcgcggggcggcgggggcgggggccgcttaccgtgatgtgcgggatgctcttcttgccctggtacgacatggccccctctggcgccctcggcccggccgctgacctgcggggctgtctgactggaaccggcgctctcggccccgctcccagcgggcgcgctgacaaaggcccgggagggatagagacacggacggaggctcggcgcccgtggatgcccacgcgcggctgccccggctgctcggcccgcccgccgccgctccggctgccagcaccgcccggatcggcgaggagggcgggagaaggaggagggagaggcgagggcgggaggagggggctgcagacagctcctcccggcggcgcggagcgaagccggattcgcccctctcggctcgaaccaggaagcgcttcccttccgatctcccaccccgccccccgccccccacccgcccagccccgccgacccccgccctgcgcacacgcccttggcgggccctggcctcgctctcgcgatccagagagtatggttttcagggctcctttaaaagaaaaagacggcgcggtcagggcccgcgggcggcgccacaggtgtgtggccgcgcgtctggaggcctccccggaacatctgcgggggtgtggggggagggagtgtgggacgggggccaaggatcggcccaagctgctgggaacgttcttgtccctccaggatcgcgcccaaggaccgctcccctcttgcctctccttccatagcctccgtttatccttcccgagtgcctctccctgaatgcaccaagcactttttccatctcggaccccaagcctttattcacgctgtaccctctccctgaatagtctaccccagacaaaagcctgtccactcccctagacccatctccaatgccttccccaccacgaagcctctccctgccaccctctccatcctagcattgaaccagccctccctgggggcctctaaggtggagccccctaactggcagagggaacagcagggacagaagggtacggccttaattaatgctgacctgttctactccaacagcagctccctcatcacacagcagcctgacactggggccaccaggtcaccccacagaattgcctccaagacagcaggtgtttggagggctgggccactggcaccaaggtctccacagccctggggacaagctgggggtcaggaggaggactagggtgctcctgcctcccagcactgtggacaccagccccggagtccatgatccagatgttgctccagagggaggtgggcaggaagccaggtcacagcttgacaaggtccgtaacagcagaggggaaaagatgaaagaagatggaggaaaagggggagccccagcaagccccaacctcactggacaggtgccccaagttcccaggcagaataaaacaccaaccttgtccaccacttcgttgttcattttctgcatgcgaaatccaaccccacaggtcctatgaaactactcatcttttctgctttcaagttgccatccagagcgagggtggcctaggcttggtacagctcccccagcactgtggttgggggctggggccctgaccttcaccaccccaggggccagtccccta

SEQ ID NO: 316798 - DNA, 4001 bp, Homo sapiens
agactggggacctgagagcagcagagaccttctgtgggcacacagcctcaaacccagaactcctgactcctgagtcactgcatcaccccgaccccatcacctgcctcagttcccttgggaggcagggttagagggtcccaaggcagggacttgttcaaatatcacctgccttcttctcacattgcccaggaggaagcaaccatatgtgttctagtgattcttgaccaactagtgtttacgaatgggccgcttacacctctgcgtctcagagggcagagctgagagacggagaagaggtggtgcccaccctctggatgggggcttggcagaggcctgctgacaagagctgaggctgggcccaggaggaattttctaactcaagactcagcccagagctggggcggatgcaggacagtgcaggggaggcagggggcctgggttccctcctgaccttcctgtggtggaagccctcagcccatgctctagcctcagggagctttacgtgggtaatgccacccgcaaagccttgctgccaccatttaaagaaacaggcctgcaatacacgggacaggccactggcaggtgagtgcaagtgtcaatacctccgcctacctaaggctgccctctggcaggtgccctgcgactgtccaggagcctgaattttgcataaatgagcaggctgggtctccagtagtcaaacctctggagtcaccctggaggattccaccacgcccagaatcccgcctcccggccccgggctgctcctgcatacatgggctccagtggtccgcatccctcaggaacagtcaggctccacgctgatgccaggcaggaactggggcggagggccagctcctgaccgctgcgccctcagctccccaccccgagacaaagcgtaaagacggggattcctttgtttccggccacacccagggacgcagcccggctgttctgcctccaccaccgtccccaccctctcgcggcccagcgtcgggaacattaacccttcccgggccgcagccgccagcgtcgccccattaggttatttttagctgcggggaggggtggaccgagcttccatcatggcgctgtccctaggtccggacttccactccatcagtaaaggcggggagtggggagcgctggatgatctttttccctcctccagcgggggaggtaccgggctgtggggtgcatgggccggacggtgcgggggccgagccaaggaggctcagctcaccctcccacccccgcgcgaggcctgcggggagggggttcggacccctgcccctccctcttttgttcggctccgcatcctccctgtccacgccatcctctggcacatcccgtggggggagggggcggcaagcccgcggggagagggactcccggctccagccccgccccgccatgcggggctcccccacccccattgtccccagaggctgggggagggggctgaaatcccgagaccggccccgccccacccgcggcgacgcaggaggcctcggggggcgcccctgccggcgccccgtggatctggaccctgccgggcgcccactcccagcccacaaaggccagcgcggggcggcgggggcgggggccgcttaccgtgatgtgcgggatgctcttcttgccctggtacgacatggccccctctggcgccctcggcccggccgctgacctgcggggctgtctgactggaaccggcgctctcggccccgctcccagcgggcgcgctgacaaaggcccgggagggatagagacacggacggaggctcggcgcccgtggatgcccacgcgcggctgccccggctgctcggcccgcccgccgccgctccggctgccagcaccgcccggatcggcgaggagggcgggagaaggaggagggagaggcgagggcgggaggagggggctgcagacagctcctcccggcggcgcggagcgaagccggattcgcccctctcggctcgaaccaggaagcgcttcccttccgatctcccaccccgccccccgccccccacccgcccagccccgccgacccccgccctgcgcacacgcccttggcgggccctggcctcgctctcgcgatccagagagtatggttttcagggctcctttaaaagaaaaagacggcgcggtcagggcccgcgggcggcgccacaggtgtgtggccgcgcgtctggaggcctccccggaacatctgcgggggtgtggggggagggagtgtgggacgggggccaaggatcggcccaagctgctgggaacgttcttgtccctccaggatcgcgcccaaggaccgctcccctcttgcctctccttccatagcctccgtttatccttcccgagtgcctctccctgaatgcaccaagcactttttccatctcggaccccaagcctttattcacgctgtaccctctccctgaatagtctaccccagacaaaagcctgtccactcccctagacccatctccaatgccttccccaccacgaagcctctccctgccaccctctccatcctagcattgaaccagccctccctgggggcctctaaggtggagccccctaactggcagagggaacagcagggacagaagggtacggccttaattaatgctgacctgttctactccaacagcagctccctcatcacacagcagcctgacactggggccaccaggtcaccccacagaattgcctccaagacagcaggtgtttggagggctgggccactggcaccaaggtctccacagccctggggacaagctgggggtcaggaggaggactagggtgctcctgcctcccagcactgtggacaccagccccggagtccatgatccagatgttgctccagagggaggtgggcaggaagccaggtcacagcttgacaaggtccgtaacagcagaggggaaaagatgaaagaagatggaggaaaagggggagccccagcaagccccaacctcactggacaggtgccccaagttcccaggcagaataaaacaccaaccttgtccaccacttcgttgttcattttctgcatgcgaaatccaaccccacaggtcctatgaaactactcatcttttctgctttcaagttgccatccagagcgagggtggcctaggcttggtacagctcccccagcactgtggttgggggctggggccctgaccttcaccaccccaggggccagtcccctaatccagggcaggaggccagagacacctgggccttaaaatagaggtgaggttttagcttcacagagaagccagctcagtatcccaggaacactaggcataattttcccattttacagacaggaaattgaggcttacagaggtaaaatgatgtaccccgggtgcaaaacatattagctgcagcaaagcagcatggagatgccaggttcccctacactctgtttacaactcatttccctccacgcattcatgcatccctggctctcagcggggcctaaaatccctgtcaatgaccggaaattgcagatggggacactgtccctccccaactcctacactcccttccttggagttgttaagtcctaggttccccgtaccagggcgttccctggggtcagtctggagatctgagcagaaagcccctacagcaagggacaagaccacgtgcgtatcagggggaggagcatccgcctgccactggccaaacagatcgctgctcccaagcagatttcgccggtacaaagcgccgcagccgctcagcctccggcagcggcaatccttgcgcctgcgccgcagaaacccctcctgcagcccagggagaagcctggtgggcggggggggaagggccggggcacccgttgcgaagccctggagcggtgaggcccgccccggaacccgagcccactgtaacccaagcctcaaggccgctctgccggcagaaagtaaaaccctccctccgtggagatcgcgagcccctgagttccacagtcgcgaagctcgagtgctttcggagccccgggagcgcc

SEQ ID NO: 316799 - DNA, 4001 bp, Homo sapiens
ttgacacaagccatctcaaataagggtttgattttgattccaaaagtaggatacattggaacatgtggctttgtgttatatttggtaaagaaatgttggacaactattacatttttagaaatatgagaattttgtagtagactcaaggaacaggcctaatcacattgtttgttgctatttattatgttgtgcattaccttattctttttcttacttttaaatttttagctcttttttattgtggggtgcttataattcaagtcagacattttattcagagttaaggctctcagtggactatgcaataatgatgaaaatgtgaagcattactgcatttctattgtcaagacttcagaggccaattagagatcatccagtgctttaagattatttctctgggtatcctatgtttgatgaagtgtcaggtcatttctaacaagagtctaagactttctaaattctctactgaacttacaggcctggcaagagcaacagccacaagacaggtgagaatgagaagcctcatggttatcagagcctatgtaagagaacaaaaaagaaagagttagatattattacgttaaatttgtttcctgaaaaaaattcttgatttttcaacaaaggagcaaattatgataaaagtaggctgatttgaggagctgtaatgtgaatttttataaacttaagattttaaaaactttactactcaatatcaatgtttaccattctagttatttttcttagttcttatattatttagaaatactaatttcttacaaacatttttcttcactaacactttaaaacataacattttgttcttaatgtaataatatggcttagagaaataaagaagtgctaatattgaaatacaattgaaaaaagaaaacacttttcctcctagatgacaaatcagattttctaaagtgggcaataaagttaaatccactgagaactggaatttaattttattgaaaagttttgaaaatgagcttctcttttaaatctatttgagagcattcttttcttttagagtcttcatgaaaaatcctgtctgcacgttatgtaaaagctattgatctctttcaatttttaaataaagaatctagccataacttcgtgttttgctacattggaatattcatgacataaatatataaagatgattgaattggatagaatcaaaatattgacatgtcttatatttgatttccagagtttcattaaattgcaagaaccccgaaatatggacatccacatgtactgggaaaatggtttccagagaaatcattagaaaaaaaatcaggtcacacatactatttgttcacaccttaatcaacatacaaatgctgacatttatatatattgcttcagtctacaaattttagaatctaaatgtgttaataaaaaaggcatatttttgaacccaaataaatttactatttgtgtctttctgaatatctaaatttaataatcattacaaagtagccatcaatagctaattatctataatagatattcacattgtagagttaattttgttgcccaaatgacatgaaacaaaaatggccttgaactattctgctagaaatggtttttgctatggtaattacaaaaataagaaattatttgcataacaacttctcatagaattaggtaaaaataatttaaattagcttaccccaagcctctactgaaattatgtatcaactttaaaaatatattttagttacaaaattatcaaaaaatgatttggtatttttataaaactgtattgattcatcacctaaagctgtaaaatggtatcagaatttgcaaaaggatttttaaggtgccagaaaatcataagaagttttaatatttgcaaacatatggaaatggtacaaatatacttagtaaacagtggaagaaagagattagataatgtaaaatgatagcaattttgctgtatgtaaacgcagtaccttaagcccaagtctggagagaagcaagttgtgttgatgaccaagatgatggccgatctctttgctttacgctatttaaatgtggtaattagaaaatgctaattttgtggtttcagttcaaccaataggtttatttaaattctaagaattctcccaaataggaaactaattttctgtccaattcctttcccaggaaattctgagaattttcaacagggagtgattcatgctatgataacagattacacaagaaataaagtggcattattgcaaattaaaatacaaaaatttccaaatttatggctattataaaaacatgattttatgttgaagggataatttgacaggaacatattaataaaattctctgtatatcttttgaaaaattcaattcctataatggaaatcctggggacaaaatagggtcttagaaacgttccaatttctatcagtgtaccaggccattaaaagaattcatcatttatttaccttttaaaatgcagcttgtcctctattatttattgtgactatctgctttatggattaacttatactgtatatgctctgatctttttttcaaagaaggatatccaactgtcctatgtgttttggtgatatttaagctacagcagacaattttttgtttgctttcttttaggcatattggttgtgatagtatttatttaacaaattataacattgactaattagaagtaatatttattcattaattttaattttaaaagattttggaaaattatgccatacctctgatttcctgttttttaaaagtaaataaaggaaagaaatgaaaatgcctctctcctatcccagactctgttcctttatgttaactatcattatacaatgtagaaaaatactatatcctgaggaaaatatctgtaatagagagggtttttaaaaattgttgttgactgcgactttgcttttttacaggaaaagaatcatactatatattttaggaaataaaaaaatagtaatgatatttacagccttttcacagtcatatgaaaagggcattattctgggttaacacacatttcagactggttaatttcagattggggatcagaagagatgtacttttccatattaaagttctctttagttagtgttttccttactgactacatcacataaatttcaacaacttactagtgtttcctattcactgtgattcatttaagaggctgagacaagcatcagctgtattacagtaccttggttttgtcttttcccagaagtgtacccaggaaaactgatttattttactcctaactcaaaatcaagctatacctaccaaccaaaaaaaaggccaggaccagatggattcacagccgaattctaccagaggtacaaggaggagctggtaccattccttctgaaactattccaatcaatagaaaaagaggaaatcctccctaactcattttatgaggccatcatcatcctgatatcaatgcctggcagagacacaacagaaaaagaattttagaccaatatccctgatgaacatcgatgcaaaaatcctcaataaaatactggcaaaccaaatccagcagcacatcaaaaagcttatccaccatgatcaagtgggcttcatccctgggatgcaaggctggttcaacatacaaaaatcaataaacgtaatacagcatataaacagaaccaaggacaaaaaccacatggttatctcaaaagatgcagaaaaggcctttgacaaaattcaatagcccttcatgctaaaaactctcaataaattcgggattgatgagacatatctcaaaataataagggctatttatgacaaacccacagccagtatcataccgaatggacaaaaactggaagcactccctttgaaaactgtcacgagacagggatgccctctctcaccactcctattcaacagtgttggaagttctggcctgggcaatcaggcaagagaaggaaataaagggcattcaattaggaaaagaggaagtcaaattgtccctgtttgcagatgacatgatt

SEQ ID NO: 316800 - DNA, 4001 bp, Homo sapiens
ttttgaaaatgtgtacattttaaatgtgaaaatttaccttgtattctgtaatagattcctacagaaaaatataaaataaaattaggtttagttttaacaattcttactttgcaatataaatcaggaaataaaggcattaattctttgataatatcattaataactttgtataatcattaaacttatgtattaaactgttctatatgagcttgttatgtaaaagaaagtcagatgaatgcagtcaagaaggacatggtacaaaaaaaagcaattaatagatgctaatttctctctaccaccatgctcattccctgacaacaaatgatatctaaaaccccatctgatttttaaaaaaagaaatactcattgaaaatatattctaataacaattgatacattatgatcacttcaaatgaatcataagagttaaacacttcccttaaggatcatataacctttctgaagagacagaatctattgatgtaccatttacttatcaagtgatcacacacccaagaagagtggtgtaagaataaatatctacctgactctctcaggtaaatttaggactacactaaatctcgcttatttactaaagtggctattgtaattataaaatgtgtcctttttgcacgtctgcctacctactacttagcaagctcttaactatcactggcatctctaacttttcagtttgtaccacagctcctagtcaatgtctgacccatagaaggccgtcagtatatgcttaaggtgaataagttcagagtaaagagagttcaaggcagaaaacaggacaatatggttcattaaaaaaaaaagaagcaaaataacacaatttcaagtagcaagccaatttacaaagttctagaatgttgtattatccagatacttattgtccttaaacacacataaaagaaatatgtactagaacttatatgtcattaacatagctgcattagcttaactgccatgatgtaacaccatagaaaaatagcacaggattttactgttctaaaattgggtagaatgttaacttacctcactgcttgaaaggctttctatggtctgtgggaaaaaaaaattgacaaccagctaaatcttctagatcattagagaattttactattttatggttcataaattttctctaaaaaaataatctcacctcagaggatgcattggattgttccttctgaaaagatgtttaaaaattcaacttctatagctaactcattgttaaacatgcatcctacttaatttttacatcacttatgcagagctatctctttcacaaatttgagaaataaaaaatgttatatgacttttgaggtttaaaaggtaattactttaatgtcttttatatttagtaatctattaatatatttttatcttacatttattaaagacagagttttttatgggtaaaagaagagtcactttaatttgtattaaatatttttattatattattattaatatatttatgatcatgattatgattgtctctgtacttcatcccatggatgtctttgtacagacagacacaggatttgacccagtgccctaggctgtaaggtatatatacattttatcactggaataagatatatttatctagcttgagaatctttggagttgtatttatgcaatattatatttcgttgccatttttatgattttttattacttattgatttgtttgctttttctttagtgactagcagcacattggtgcaggaagcatttggggcactataggaaactgttgagacagtgggtaaatataaatgattttgatagaagccaagagaattctcatgaaattcttcattatttatacagtaaaaaatgttggtgatgttattctctacaaataagcatatagtccactatttattgattgtttaggaattttttcttgtgcacatacctcccttgcaagagcaagagccaccaggcaggcgaggatgaggaccttcatggctactaagtcctgtgaatgtagaaaaaatggaatggtggaagattggtcaattggatatactttcttatgtaggtaaggttactttttataaaacaaaaaaaaaagagagataatatataacaaaaatatctgcatttagaaaataaatagaataaatactaaatagaagttatatcacatgaaggaggtcaaaatccattctggcttgcgattctcatttttcaaattccaaacttcattgccagctattcagatttttcagctaacaactctatccccacttttaaaaaagtcccatttacagtattgaatttttcaaaaggcataaagaagttataaatatgtatggaaagatttatgcaacacatcaaaaagcttatccaccatgatcaagtgggcttcatccctgggatgcaaggctggttcaacatacgaaaatcaataaatgtaatccagcatataaacaaaaccaaagacaaaaaccacatgattatctcaatagatgcagaaaaggcctttgacaaaattcaacaacacttcatgctaaaaactctcaataatttaggtattgatgggacatatctcaaaataataagagctatctatgacaaacccactgccaatatcatactgaatggacaaaaactggaagcattcccgttaaaaattggcacaagacagggatgccctctctcaccactcctattcaacatagtgttggaagttctggccagggcaattaggcaggagaaggaaataaaggtcattcaattaggaaaagaggaagtcaaattgtccctgtttgcagatgacatgactgtgtatctagaaaaccccatcgtctcagcccaaagtctccttaagctgataagcaacttcagcaaagtctcaggatacaaaatcaatgtgcaaaaatcacaagcattcatatacaccaataacagacaaacagagagccaaatcatgagtgaactcccattcaaaattgcttcaaagagaataaaatccctaggaatccaacttacaagggatgagaaggacctctccaaggagaactacaaaccactgctcaaggaaataaaagaggatacaaacaaatggaagaacattccatgctcatgggtaggaagaatcaatatcatgaaaatggccatactgcccaaggtaatttatagattcaatgccatccccattaagctaccaatgactttcttcacagaattgaaaaaaactactttaaagttcatatggaaccaaaaaagaggccacattgccaagtaaatcctaagccaaaagaacaaagctggaggcatcatgctacctgacttcaaactatactacaaggctacagtaaccaaaacagcatggtacttggtaccaaaactgataccaagaccaatggaacaggaaagagccctcagaaataatgccgcatgtctacaactatctgatctttgacaaagctgacaaaaacaagcaatggggaaaggattccctatttaataaatggtgctgggaaaactggctagccatatgtagaaagctgaaaccgggtcccttccttacaccttatacaaaaattaattcaaggtggattaaagacttacatgtcagacctaaaaccataaaaaccctagaagaaaacctaggcaataccattcaggacataggcatgggcaaggacttcatgtgtaaaagaccaaaagcaatggcaacaaaagccaaaattgacaaatgggatctaattaaactaaagaacttctgcacagcaaaagaaactaccatcagagtgaacaggcaacctgcagaatgagagaaaatttttgcaatctactcatctgacaaagggctaatatccagaatctacaatgaactccaacaaatttacaagaaaaaaacaaacaaccccatcaaaaagtgggcaaaggatatgaacaaacacttctcaaaagaagacatttatacagccaaaaatcacatgaaaaaatgctcatcatcactggccatcagagaa

SEQ ID NO: 316801 - DNA, 4001 bp, Homo sapiens
gacaatattaacggaattatcaaattatcattactatgtcaaatgttgagattatcaatgtaaatatgatacaggccttgccaatgagtagcatcaattttaggaagagtgttgaaacatatactgaaaaacaactgtaagagggaaaaaaagtagaaaatgccacaaaagtggttttctattaataaaagtttcagttaagagaagcagcagtctttgtgtggaaaaaatgacatatagatgaggcttgcctatgcagtatttaacagggagagaaatatttcaagtagaggagaaagtcttgagaatcgccatgaacatttgattggaatcttgtatgagaagggaaatataagattggaaggaaagtttagagcagaaaaagtagacacctttaagataatgatgggttaaaaagctaggcatggctttataaacaacagaaaacaattgagtgtttttggactagaaagtgtatgactatacattttttggaggactgaattctagaccaggccttatctctacctctgtaactttgatcaagtgatttccctttcctgggctttacattttcttacctgtaaaaccagggtttgaacttagagatttctaaaattctataattccatgatcaatccaacagaagtatgtaggatggaatgggaagtggagggttatgagactgttttctttataacatacttctccagtaatcataactgatatgattaacttgattgttttaataagaagtatagagatgacaattacagtggctttgactaaaatatttaaagaaatacattagccttatttttctaaaagagtatatacagtgtcatacttgcttatttgatttttaataaatcatctttttagactaataatatatgataccccaaactttttatatttaagtatatattatgtttaggaagtaattactaacttcatcttgttgcagctattgttattgacacactcatataaacttgaatcactacaaagttgaacttcgcaaaaaagattcacagaattaaagcctcagataggggatggaaagcccactggactccattagcgtctgattctcaggcaataatgattaggaaggctgtctactaaagtgacttcaaaactgcccatacgatgtcatcaaatttccattcgatggaactcatttggaatcaatttgaacaatctaagcacactcatatttctttaagtgggatgaagctccttattaatgcttcacttgctagtgatcttttaggattatagactgaaaatgtttttatgatgaatcacagaccccttatcagttcacacagtaaaatgatatgtaaacaaaagaaaatattctataaaatgatagtaatttccttttggcacaaacaaaaatcacagagataagaccatactttgcgcatcagctacatttgcatttgccctcatcacttggtaagaagaaataattcgtgaaatggtagaattatccagctttcatgaatatttgaaaaacatgttttaaaaaaataattattccataacaaataaaattatgacttttatagaaataaaatttgaaagtaattaaggggttaattgcgattattatcatgagcccaacttcctgtggagttaactctcaacatttgtctgtaggaatacgttaaacgccttcttgttcggaattcacaatggctgctatgatttagttggtatcagaatttgactggaacccaaagtaaagttaaaaataaatttgaacataacaccatccagaacttaggtttaggttagaaattaattttaaagtgatgctaggtcatattcaaacttaacaataactaaaaggaagaaaatgtgattctgaaataactatggtgatgtcccaactaactactgtgaaaaggatcactttctccaagtgtttcagcagcattacctttcctcgtgccagtcaggtcttggttggcagtaggttgagttggcctgtcagctgtagagaagacccaagaaaaataactgaagaccaattaaagggtattagtaccttgagtcacgctattctatttccctcctactttttacccaataagatgatgatagcagggtcacctttgggtcagtctgtggtggggtggggggagtggggagggatagcattgggagatatacctaatgctagatgacgagttagtgggtgcagtgcaccagcatggcacatgtatacatatgtaactaacctgcacaatgtgcacatgtaccctaaaacttaaagtataataaaaataaaataaaataaaataaaataaaataaaataaaataaaaaagaaatgcagagaaggatgtagagtcatcactcataaagcttgaaaaaagtattcatatctttttaaataatctttttttgtttataaagaaatatagaagaatttttaaaaatattaattgtattcttattcaacttatcctatctatttaaacttaaaactgctgttgaaatgaaaaatagccacaatactttcacattttaattgtttcttttagtttaagaacctggatttcaagtgatactacatctggcattgactgtggttggtcttcttccttccagaattacaattattgatttttaaaaattaaataattggccatctcacacatacccaagagcacctccttataaaagtcaaacccatatatgaaacattttaatcagtatatagtggggaatcatttgcgtttgggctgcagcacattttctcccgtatgcattgactacatacttagtgatttattatcctcttatgaataaactttttttaagattttaaatttcaataatataggtgaaccattttgaaaaaaaaattattaaattattgaattggagataattgttctgttttaaggaaagtcattttgacttagagcataaatcacaaacccactgacattgagaatattttggcaaaaaatagctaaacaaaattttgcttagataattcaggaaagcatattttcttttacttgcttttctaaagaaataatgttaactgtgacttattttggctgtgaagacctgaccagattgaggaacttacaggaattaatgtaggactgccagaacacaaacaagaaataatatcagcattgtagttatgtctatattcctgtctgtttcttagaagtattgcatgtcttagaaagttaggaacaatattctaaaccctagaatacttatttggattacacagagtaaaatagtaatatgaaattttctgtttctcagaatagttggtttttgtggttcaaaaagagatgacagaatttaaaatggctaaaccaagttggtaaagtaataacaccagccattctatctgaactatttagtcacagtgttttcctttgattatcagggtccgtggttgaaagatcatgatccggtcattcctcaaattttgaaggtgttctatttcacatagtaatttctcagccatttatttagagtaataagagtgataatgattttcagttgagtattgaattatttaatttacaagtagcagagactcagaacacttctgaagacattgttttcacaggaaaatatattttaagaacatctgagagtgctagtaatcttttctcccaccaagataaaaacatgtttaccatggtgtcacccattcacttcaaatactaatgtagcttttgtggggctttgcaaaactgtacattattatttgagcacatacaatatttcaggtcctggacattattctttgagcacataccttatttcagatactgtttcaggtagtagggataaattagtaaccaaagcaggtaaacatctctgttcttgtggacctcatagtctaaaatttacttgagtactggtaacattggatatttcccatatctactgatctaaggcaaccttagtgaaagtgttttgagtgactggagtagatgaattagatggatt

SEQ ID NO: 316802 - DNA, 4001 bp, Homo sapiens
gagtaaaagggaagatcctactcgctgacatccccaaccacacgcccacctctcagaactaacagctgccctggtcaaggctgacaggaagaagtgcatgttggggacatggcagacaccccaaaaatggccgggcaggcggacgaggcacccccaggagtgaccagatgccacccccagtgcgtgtccctcccagagctctgcagaggacgcctgtatggaagcaggtgctcaaagatgggcaacagaatcacagagagcaaaaggcgtctgcggagccgacagccccaaccaggagccaaacccagaccccagagggaggtggccaggcccgggcaggcaggggagacctgggaggccgggtgctgaggcccagggcagagccacgccctacaaagttccaggacacagaaagggggacccccaaaccgcagctgtcatcctcagctgcaacggcaaatagttaccccacggttctcccccaaccctgccccaagctgcagacgggtacacagacgcgcaaaggccacgcgctaggagctcagcgaggacggccgcggtgcgggcccagccgccagcgccgttttcttcccgagggacgtgtgctccctgccgcgctcctacagaaacggtggagaggccggggagggggggggggctcgggctcaacggaacaccctgcgcacccgccgcctcggccctagctccaggccctcttgccccaactctcagggtttcacctccccactcagggcaccgggaagggcgcgaccgccttcccttttccccactggaagggaattctgtcccggcaatcacggagacgacagcaaaagggatctggcccaggccgggcttccagacaccggcgcccttggaggccgccagagaacgctccagtctcggcccggggctcaggcgcacggactctgcctttgcagccgggtcgagggaaagagaggctccgcgcagcggctcgggccggcccaggacgcgggcgctgcaagatggcgatggtggcaagcccggcgcccgcccgtgctccctgcttccgcggccgcagcccgcgaggaaggcgccccgggacctgggcgggcccaggcaagggcaggtgggggcgctgggccggtccgggacctcgcggagttcgcgggaacggagaccccgggccctcccgcgtcaccgccgggggctgcgctttgggcccggtctgagggcagcggcctcctccacggtcatacccggcacccgcgccccgtccccttcccccacagcgcgcggccacggtcgccggcggcctccccgcgggaggcgcgctcccgcgagtggcccgggagcgcgcgccccaggacaccccgagctgcgcacggctcccgccccatcccggccccgcaggcccagccacggggtcatgaccggggacggggtagcggccggggatcgggacccggggtgccgtcccgggtccgacggggctggggtcggtggagctgggggtccggcggggcagcccagaggcccacaggcccttttgtgtcacctgcacgggccgcgggcggggagagcagactgcggcgctcgcgcacacgcagcggcccgcgcatgcgcaagacccttcccgcggtcccgcccccgaccgcggccacgcgcggacgccggcgcgcacgcgcactcgcacacaaagccggcggcccgcgggcgcgcgctcggtccgcccccgcgccccccgcccgcgcggcacccgccccgccccgcccccgcccgcggccggaaacgcgcgcgcgcgcggccttaccaagcggcaggcccttgttgagcaagtgcgagctgcccatcgagaggcgcgagcggccgcgggccccgaccactccggcgcgctgcgccgccgcgagcccggcgcgtggggcggcctcggcgccgtccgctgctccgcccgcccgcctgcgcctggccgccgccgtgccgagtctccgccgcgccgctgagccgcgctccgacgaccgcgcgggcggggacacggcggcgcgcgcgggcggggcctcgcggttggtctcctggttcccagcgcgggcggcgcacggactcacgcgggcggctcagggcccgcccggccgggacgcggctgcggggcggggcggggcgggagcctggcgggaagctcgcggggctgcagcccggcggaggccccgggcctggtgttccgcacgttctaaaccgcctgtccccgaggaagtcgggcagggtcgggccggactcagcgccgctggcgggagcgccgtccgccccgaggaccctgcgggcccggaagccgagacagggccgcccacgtcagcgcctggcgcgggcccgaacgtaaatggcgctcctccgcgccgcagccgcagccgccccgctcccttcccgctccgccagctgccgccctcccgcgctcgcttctcgccccgcggcctggcccgtgcgcctccgaggctggccaggggcaccgaggccgcgggccccccatcgcccccacccgagccctgatttaccgtccgagagccggcggcacatgggaccccgagaggagaagcgcgcctgccccagtgcgtccccaggcgggggagccccgactcctggagggaccgcgtcctgcccggcccgggaagttcagggctggagaaccccttccccgaccccatttctcttttaacaagagtagggtttgtagctaaccaacgtcctgacagctcagctctgctttccctttaagcattaatatcaaagccctgcctgctaccggtgaagccccgacccgggagggcccgaaagtcccttcagggagaggccgcactgggcctgctcacccaggggctgcccctgcagactctcccgaggggcccagggatattcctcgcgccgcgagtggacgcttccatccaccccatggggagggcctctgcgcgtggctactctgagccctctggaatgccgagatagttgcataatttcagaaaccacggcatggagacggaatgatgcagactcctatccgcgagatacctgctgtaatttcgctgtggttcgtgaggacgcgtcctgggctgccctgagaagcctacgtctccccttcgaggcccgggaagacctccaaccccgctgacaatgctgggccctcagccagacctgccctgcgtgccacgttctgttctaagatcgggctgccgagctgtggcctggaggaaacctggcaggtgtcaccagagctttggggagggtgaggccctgtcggggaagcccagtgggagtcatgaaggagggaacacgtgtggagcccttgtagggggaggggcagccctgcagagatctaagaaaaaattccagaaaaatgagcagcaacctccaaggccaggcatcggtgcaggggacaaggggtcgtagctggaggggcctaggtgaggctgccgggaagggacgatgtggttggtggagtgcacaggcagggacctcactggactttcctgtctgctcagcatggacaggcagcccaggagaaggcagcacgtggccgggtgcagggacgtaccacccccacttccccaggggagctggggtcagacgagtcccaggcactccatcctctgcagcaagtcaggttgtgatttactagggggtggtgaatataatggagagacttctggggaggaattcctggctcccgcgtggacttgcagagctcaacaggcagccacgtggctgagtgtccagcaaacatcacataaggctttgggtcctgcaggtggggctgccatgagcagcaagctcagtccagaagaacagttcctctccaggatccacttcctgcgcacttttatgtgcagtgtagctggagcagagctccccggaattccacaggcaactgagaacggagagggatgcaggccagccagggatccagcgtcttccccatcgtcactctccatggcctccgtctacacacagtgttcgtctgcacagcttgtcag

SEQ ID NO: 316803 - DNA, 4001 bp, Homo sapiens
cccacttccctcctcccgtccatggaaaaaatgtcttccatgaatccggtccctagtgccaaaagattggggaccactaaggtagaaaatcggttttaaagcattcttggataaagtccaactaagcaccgagaggtgttcagtttccagcaactgtgcgttgaagcctcaatgttctcttttttgggtatccatctcatgaagcaaattcttacaggcagcaattgctttgaaaattttttcagtatttcttaacccgaggtttttaaaatgtactaagagtcttcataattcgatcctcctccacttccaactttccatctttcaacctgtttctttgtatttctcctgagaaaagttacattttctagacattcatcagggtatggcctctttacaggaccagtatgagtcactacataaattatacacatatatatttataaattatctaaaatctaaataaatgttaaaaatatatttataagtctagccctttgagctttgtcctgaaatattatttttaggagcctgacagtgtgtttatttatttagccaatgaatacgttaccaataaaggtgaaactgacttttcccctaaggggtttcgtttaccaggaaaacgaacgtaagttgaggataggggtagaatacaggccagaattttgttcttgaaagagtaagaggacttctggttttgaaagctagaactgaactcaagaataataaagtggagataacagtacacatctcggtttggacaaaacgtaagagtggacagaatcagggaaggctggccttcctaaacattggagctttccaggagagtcgggggaaaagagcacagctatgaaatcctgtgagaaattccaacaaacaccaggaaaaaagatacacttccttgagcaatattactcaactcagacttatgtttgattcagaatgaaagaattttcttttccaataaattaaatcatgataatggcatctttcatgaatttaaaaatgtgttaaatagtatcagctatctagaacatagtgaggcgaacactaaatcggcatcccttgcagtttccttggtttcaggaaaatcattatttgtgctcagctaactggtcccttccagagttttcatgctagactcaaatctaagtatttattataaatattataaaatataaattatattatatttcgtataataatatgaaaaggaaattaaatgcttctcttttcttcaactcagtctccgccaaggcaggaagaacttttaaagtggtgcgttagtttaaggagaatcataaaccatcaggattctttaatctggctaaagacaggctctttgtttctaacttctgatcactagcgccctcctcgggaaaaaaaaacacgacaggtttcttccaccaacaggctgctccctgtttctggttctcataaaagagaaatagaagagctttggaagccagtggcaacgatagaggggattgctaaaagggggtgcttcttcccaccaaggacactttggacgtatctatggatttatttgggtgcgtcccaaaaatccatagcgacaaatctcttctggaaaatcaagtcttttggttagcaaaggcatgggggagtgacaccatggcacaaggagaggggagagagaagctggcttttgcacccgcagctcagggccccagacgcatcgcagagccacgggtgcccacgagcagggtcagctctcgggggccctcttccgcagcccagacccgggacaggaagtgagggagcagggacagatcccggggaggcgcgcgctcggtacccggaaggcggcggcttcacgctcgcggctccgcggccaggtcggggtgaagggggcgcgggagtccgcatcgccgccgccccggcacagcagccacagcagccacggcagccacggcagcgcccgcacgtccattgcggcgcccggctcctctgccgcccgcgcggcctgttttctctttcggttcctcggctcctcccagcctgggctcgaggggcggaaggagctgggttgagtgcacgatgctgagattgacccttttttaggtccccggtgttctgtgactgaaaatccggtcagctggaggctacggacctccttgctgaggctagtttttttgtttttgtttttgttttggaagagtcaggcacttgaccatgtgctttcgaggtttcacttccatccattagaaaaaaagaagcctgagagtcattcttttgtgtgtgttgagatcaggtctcactgcagcctcgaccttcaggttcaagtgcctcctgcctcagcctccggagtacctgggactacaggcgcgtgccaccaccccaggctatttttgtatttttagtagagataggatcttgccatattgcccaggccggtctcgaactcctggactctagtgatccacccgccttggcctcccaaaatgctcacaggtgtgagccacctggcctgccctgtgagccaccggaagctgcctttttccttcttgccacaatccctaagttcaagacctagttctgaagtgatgtgggccaatacatagagtcatccattcagcagatgtttataaatacgtaacaaaattgtacagatgtgaaaagcatacacagtttttggatctattatggcagtttcaaaactcttgaagcctgtttctccgtttgcaaaggaagatagagccaagtacataatttgcagggttccgtgtaaactgaaaatgaagttcccttgttcataaattgtgaagaatttcaagacggcaacagcagagcattaacccaagccatgggccttctaagcacccacttctgcacaggtcacacactcatgaacctggctctaccgagcctttctattatcatctattctgaacaaggcttccatgtctgtgaaattcatatcattacccttgtagatttttagaactaacatcagatttatgtctttagtttttacctaggtgcagtgagttacaatattctccaatgcaaacttcgtaataaaaataaaaataatgttccgagtattaagaggaaagacacaagagttttttatgtacgttcatgataagatatattgctcttggcaagtgtggtgataaagattttatttaaatcataagttcacagaacgatgttcatgtttacctcagcagttcttttgtacttagcccttttttgtgactcatacaagcacatacttttctttttaaactgaactttgctttcagatcatagtccctgtttattgacaacctacggagtcaggaaatttaaatataggcagtcatctttactttaggataattggtattgtaaaaaagccccttgaactaaactcatttcaggagctcacatcaagtatttattgagtacctgctaagtgtcaggcattcttctaggtaatgaggatatatcaagtaagtggataagtgactaaagggatgaaaatccccatccctatgggactgatatttcaattgatttacatcaacaaatattttattgagtacttcctaagtgtcaggcattgttctaggtcatcaggacacatcatggatggaagtgcataagtgactgaagagatgaaaagccccaccctgttgaagctggtatttcagtgagggggagagacgcaataaaattactacaggttgaggatcccttatccacaatgcctgggtctggaagtgtttcagatttcagattttttccccccagattttggaatatttgcatatacataatgagatctcttggggatgagacccaagtctaaacacaaaattcatttgtgtttcacttatgctactgactgaaggtaatcttactgactattttaggtaattttatgcataaaacaaggctttgaatgcattttgactatgacccaccacatgaagtcaggtgtgaaattttctaggtgtggcatgatgtcagtactcaataagttttagattttg

SEQ ID NO: 316804 - DNA, 4001 bp, Homo sapiens
agcatccacttcttgttaaccaatttccagaaaggagtaattgttaggaatattggagaaagaaatgctatactaaaaccttcaagcccagtgagttctagtgtttgcaaaggaaagtaatagatcatcggtcccaggtcatggtagagagaccaagaaacacatcctacaaaaaaaaaaaaagttaaagagagaaagtgtaacttcaacattgtttctaacgacagtcctgtccctccactccagccgcttgggctggtcattcttcttcatgactctggcctgaactgggttccagttgtctccactgacatggaacaaaacaagagctctacacctgtgtagggatccgcagaactcactgcactgactgtgttgtgcttaagagactgatggacagaaaagcaatggcaatttcctcgtgaaatgtcactatgtaacacatgacactgagtatatctgtaggatatatacccagaagtgaaatttctggtgaaatgtacatattctcccactcctcgcatcaggccccagtagaggatggcttcctgctgccgtgagtctctcaacatcccttgcgtgttcctttcccttgcccatatggctgtagacagtctctttattaagtcctattcatttggaccatctgagttgaatttggcatcccgtcaggaccctgactgacaaaattttcttacctaagttgtcccctgtataatgaaaaatattgtgagagtccaaaagggcagcaagcagcaggactccctcctccaaccccagactacacccaaaagcacttgagtgaggcagcagtcgttcccttgagtagaccattttcagtccaatccttatgaggcagtgctgggtagtggaatacccagatctgaagtaagttgtacctctgccaacagctgctgtataatcttgagcaataatgataattaacgctatgggcacttgccatgcactagggtctgtgctaagtattaacatgtaccatctgtctcattccttatacagccccataagctatgaggtgggtactatttccgctcccctcttataaatgcaaaaactaactaagcaagaacaaaacaacaaacaaaacactgagactcagaaagttaagtgagtacctaaggttacacaagtagcaaatgtcagagttgccctaactctaagcagcctggctccaaaggtagccggtctaaccactgggcgtgggaactttctaccaactgactttccaacctccccttcttaatcagcaaaataggactttcaaccccttcacagtgttgttgggaggattaaatgagatcaagtgcactgagtacctagcacctgaggtacttattgaatgctaggcactgtacatctcccaacttatagatacaggctgagccagaaaaaaatagtctgaagcactcccgagaattaccagctcccagaaaatcaagttctcaggaaggcgccccacccagaccagagggatctttgttttgtaacgaaccggggattctagcaatatcccaaatgtttgtctgggaactttgattttattactcacacagctccgacagaattacaccaataaaattgtcctcgggattttgcaaagctggtgagagagcagatgagactcgagtctgatgcttttcgccaaatgcccaagtgtgcagccgacaccaaggccacttgtcctgggcccagcccacggcagcagctgccgcccagtgtccacctacagctcctggggaaaacgggtgcccctttccttctgaattttaaagttcagcactgaactgtattaagttaaacttaaaggccacgggtggggggctttggggacggtaccggccgcgcggggtcaaggccgacacgaggagaattcgcgctccttgggcacaatcccagggctgctgggaactcgggcgacggggtctctcgcgggcgcctcgcagactcagcttgaagacttcaatctaggtcttttcctttattcccttcagtaggaaaagttcccaggggacgataagcatctccactctgggcacggagcgcccttttcctcctacctgaactcagccaacctggcctggctccacggctctggacatggcccggggagctggcacccgcgaactcgcggcgaggggcttcggcttacccagcagcgactccaagaggatttctctccacagcgagggcatcgccgcggcgaggggcagcgctttccaggaaagccgtgcgggtcgggcccgctgccctagccctgcgcccccaggttcccgccgccgcgtcctcccgggcctgcgtccgcgcccctcgttcccgcgtcccgttgccaagtgagccccagccaactgacccacttgccgaaccgaggcagtgtggggccggtccgcccgccccttcacgaccacacccagcctcgcctgccagagcctggccaggccgggcgccacctgtgcgcgttgcgccgcctccggcgcctctggtccccgcctttgcctccttggcgcgagccccagcggcacccttggccggtgcaggggacatgcgtctcggctctgactctgctattgggcccgaacccgaagcaaccccggggatgcagcgctgccagagcccaggagggagcgaacaagtgcaactccggaccagtggtgccctcgtttagactaggcccacggggtgctctgcgaggagaaggcagagaggaaggaccgctggagacccagatggggaccctggaggagcaggtcctgtgcaccagctccagcgccctggaagccttaggggaccacggggcgcgaacccgactgtggcgatcttcaggccagggcgacgcatcggaagcgtgccggcagggccagggccactgctgggccactctcagctttgatagtaaaagtgcaatttgttaattgcctcctagcaaaggggcccaaaattccagcggctgcaagatattctcaggggagagaaagtaactgatgcgagtggaaacccggccctcccctagtttatgaataatgatatttgagagtgcttatccctaaaaagaaggtgggagacgttctgattaatgtggagagtgaactaggccagctatttctcgctcaaatgtatcacactcctggatgtcttgaacttgtttaagaacccctgaaagcaatttattttaatgcactttaatttcttaaggagagcttattatttatcagttccagaaagtttgctctgaaattaaacaatgatggcatgcccaaaaagtattagaatcacattagcagcaatcattgctattaagtccataggagtattgagcaaagagtttttttctgttttgttgtgtttgagacggagtcctgctctgtagcccaggctggagggcggtggcataatctcggctcactgcaacctccgcctcctgggttcaagcgattctcctgcctcagcctctcgcgcagctgggactacaggcacgtgccaccacacccaggtaatttttgtatttttagtaaagacggggtttcaccatattggccaggctggtctcaaactcctgacctcatgatccgccctcctcggccgcccaaagtgctgggattaccagcgtgagccaccgcgcctgaccaagtaaacagttcttaatcggttaattactagctctctcaatctcaagggtagatacatagattaatggaatagaagtgagagactggagataaaaacccccttttagggtcaaatgagtttcacaaacttgccaagacaattccacagggaagagtcttttcaaaaaaatgattctatgagtactatctgtatgcaaaagaataaagttggatccatatttcacaccatatacaaatatgaactcgaaatggatcaaagacctaaatgtaagaaataaaactgtaaaactcttggaagaaaacatcaaagtaaatcttcacgatcttgaattaggcaatggattcctattatatata

SEQ ID NO: 316805 - DNA, 4001 bp, Homo sapiens
ggacagaaaagcaatggcaatttcctcgtgaaatgtcactatgtaacacatgacactgagtatatctgtaggatatatacccagaagtgaaatttctggtgaaatgtacatattctcccactcctcgcatcaggccccagtagaggatggcttcctgctgccgtgagtctctcaacatcccttgcgtgttcctttcccttgcccatatggctgtagacagtctctttattaagtcctattcatttggaccatctgagttgaatttggcatcccgtcaggaccctgactgacaaaattttcttacctaagttgtcccctgtataatgaaaaatattgtgagagtccaaaagggcagcaagcagcaggactccctcctccaaccccagactacacccaaaagcacttgagtgaggcagcagtcgttcccttgagtagaccattttcagtccaatccttatgaggcagtgctgggtagtggaatacccagatctgaagtaagttgtacctctgccaacagctgctgtataatcttgagcaataatgataattaacgctatgggcacttgccatgcactagggtctgtgctaagtattaacatgtaccatctgtctcattccttatacagccccataagctatgaggtgggtactatttccgctcccctcttataaatgcaaaaactaactaagcaagaacaaaacaacaaacaaaacactgagactcagaaagttaagtgagtacctaaggttacacaagtagcaaatgtcagagttgccctaactctaagcagcctggctccaaaggtagccggtctaaccactgggcgtgggaactttctaccaactgactttccaacctccccttcttaatcagcaaaataggactttcaaccccttcacagtgttgttgggaggattaaatgagatcaagtgcactgagtacctagcacctgaggtacttattgaatgctaggcactgtacatctcccaacttatagatacaggctgagccagaaaaaaatagtctgaagcactcccgagaattaccagctcccagaaaatcaagttctcaggaaggcgccccacccagaccagagggatctttgttttgtaacgaaccggggattctagcaatatcccaaatgtttgtctgggaactttgattttattactcacacagctccgacagaattacaccaataaaattgtcctcgggattttgcaaagctggtgagagagcagatgagactcgagtctgatgcttttcgccaaatgcccaagtgtgcagccgacaccaaggccacttgtcctgggcccagcccacggcagcagctgccgcccagtgtccacctacagctcctggggaaaacgggtgcccctttccttctgaattttaaagttcagcactgaactgtattaagttaaacttaaaggccacgggtggggggctttggggacggtaccggccgcgcggggtcaaggccgacacgaggagaattcgcgctccttgggcacaatcccagggctgctgggaactcgggcgacggggtctctcgcgggcgcctcgcagactcagcttgaagacttcaatctaggtcttttcctttattcccttcagtaggaaaagttcccaggggacgataagcatctccactctgggcacggagcgcccttttcctcctacctgaactcagccaacctggcctggctccacggctctggacatggcccggggagctggcacccgcgaactcgcggcgaggggcttcggcttacccagcagcgactccaagaggatttctctccacagcgagggcatcgccgcggcgaggggcagcgctttccaggaaagccgtgcgggtcgggcccgctgccctagccctgcgcccccaggttcccgccgccgcgtcctcccgggcctgcgtccgcgcccctcgttcccgcgtcccgttgccaagtgagccccagccaactgacccacttgccgaaccgaggcagtgtggggccggtccgcccgccccttcacgaccacacccagcctcgcctgccagagcctggccaggccgggcgccacctgtgcgcgttgcgccgcctccggcgcctctggtccccgcctttgcctccttggcgcgagccccagcggcacccttggccggtgcaggggacatgcgtctcggctctgactctgctattgggcccgaacccgaagcaaccccggggatgcagcgctgccagagcccaggagggagcgaacaagtgcaactccggaccagtggtgccctcgtttagactaggcccacggggtgctctgcgaggagaaggcagagaggaaggaccgctggagacccagatggggaccctggaggagcaggtcctgtgcaccagctccagcgccctggaagccttaggggaccacggggcgcgaacccgactgtggcgatcttcaggccagggcgacgcatcggaagcgtgccggcagggccagggccactgctgggccactctcagctttgatagtaaaagtgcaatttgttaattgcctcctagcaaaggggcccaaaattccagcggctgcaagatattctcaggggagagaaagtaactgatgcgagtggaaacccggccctcccctagtttatgaataatgatatttgagagtgcttatccctaaaaagaaggtgggagacgttctgattaatgtggagagtgaactaggccagctatttctcgctcaaatgtatcacactcctggatgtcttgaacttgtttaagaacccctgaaagcaatttattttaatgcactttaatttcttaaggagagcttattatttatcagttccagaaagtttgctctgaaattaaacaatgatggcatgcccaaaaagtattagaatcacattagcagcaatcattgctattaagtccataggagtattgagcaaagagtttttttctgttttgttgtgtttgagacggagtcctgctctgtagcccaggctggagggcggtggcataatctcggctcactgcaacctccgcctcctgggttcaagcgattctcctgcctcagcctctcgcgcagctgggactacaggcacgtgccaccacacccaggtaatttttgtatttttagtaaagacggggtttcaccatattggccaggctggtctcaaactcctgacctcatgatccgccctcctcggccgcccaaagtgctgggattaccagcgtgagccaccgcgcctgaccaagtaaacagttcttaatcggttaattactagctctctcaatctcaagggtagatacatagattaatggaatagaagtgagagactggagataaaaacccccttttagggtcaaatgagtttcacaaacttgccaagacaattccacagggaagagtcttttcaaaaaaatgattctatgagtactatctgtatgcaaaagaataaagttggatccatatttcacaccatatacaaatatgaactcgaaatggatcaaagacctaaatgtaagaaataaaactgtaaaactcttggaagaaaacatcaaagtaaatcttcacgatcttgaattaggcaatggattcctattatatataaaacgccaaagcacaagcaacaaaagaaataataggtaacttggacttcattaaaattaaaagctttttgcttcaaaagactccatcaagaaagtgaaaagacaatgtacacaatgaagttctgggatacaagtgcagaacgtgcaggtttgttacataggtatacacatgccatggcggtttgctgcacccatcaacctgtcatctacattaggtatttctcttaatgctatctctcccctagcccccagcccccctgcgacaggcccgggtgtgtgatgttcccctccttgtggccatgtgttctcattgttcaactcccacttatgagtgagaaacatgaggtgtttggttttcagttcttgtgttagtttgctgagaatgatggtttcca

SEQ ID NO: 316806 - DNA, 4001 bp, Homo sapiens
aaatgaagcataactcatagtttgatttatctgtatagcaaattgaacacccagaaaaataaacacaattaaaaaattgagaaatattgatataaatcaccagattttccagtaaaggtagcccttgtttccccccaaaaatcaaacgagttttttctataagtgctttatttttatattctctatgaaaacatcaataattaagcccctttgttctaagccagaaacactgtaaaactaccattaaacaaggcagtatgccttacaagaaagacataaaatgtccaagggatatttagaacattttagttcttaaagtttcaacatgagaaatgttgaccacacactgtgaaatcatttcaataaataacaactgacattcatctaaacagttacaaaacagatgtgcacatacattcccctgccttcacaatgatctcattggccatttgcttggatccgccagcctctatcacagtggctggcatgttgcaggctcctcagaaatattaacataatgactggagaacatttgaaaacattctaccttcaaattaaatatgaatccagattgaactaacttggggttgacatttcaaaaagaatgaatataataggacagtgtgcaggtagagttaatcatacccttaattattttacacctaaaatattaacatagaatcttcaaaactaatgaataaataaataaatagaagacttctcctaagcgatgctcaaacacattaggcacaatccaggtggcctctgcagctgtgtctctctttcctcttctgttcctataagggcagggcctccttcaggaacagccaccagtgagcttcctcctcccttctggtcagttggatttgtcactgcaatgagaaaatgggtgccctgagtaggtgctcgggaaagctgattgcacaacactcttctcctgccctgctcctccagcctctagagttttccgaatgcagtttccccagcctggcaaccaagtggctactgcctatgacagctgtgctgtgtggcagggacctctaagcttgggatgctcttttaggaatgggggtggggtggggcggtggtctccactgtactattggattaaaaacagccagaacctgttgctgtttgtcctactgggcctcaaatgaaggcagttttacctacattcattggaacgaaggaagaaccagggtggggacgccaggcattgggaatatcctctggcaccagagcagtaattatcgtaaaggaaaccttaattgtgaaaacaataatcccaatttctagtccttcaactaacccctgggttttcctgattttatttttagggggcacatgccagtatttctgaccaacggctccagtcgcctgtgtacatggaaaccataactcacctgttcagcatcttttcgatgattttcttaactatgggggatgcaggattgaggcaagctttccgcccattcttgagtgtggctctgcagagggaagggaatctcgtgaggcaggaggtcgggctggggacagggttggggcagcaggagggtctgggaccccggcggtggcagaggcagcgcggggcgggacttacatgacttcggtttgggcgcagtggggtccgggggacttcacgttcacactttggatgttcttggggtgaattccctgcagggtctgcaagcactggcagcgcagttcagtggccacggacgctcctagggaagaagagactcactgactgagcgaggctgtcggcgctgggtgcctaccccagccgcgtccggcccggggaccccagggcgccggtacccacctgctgcgcgccggccagcggctaccaggagcaggagcagcagtgccactcgcaggagccggggattgctgggggcggcggagagagcagcgcgggccatggggctcagcaggcgggtctggcggctgtgagaggagcggaagagctggcgaggaggtgcctgcggcccgggctctgtggctctccgagatccgcgaaccccttttatgcatggttggggctggaaagcccggagcccccgggccagggaaattcccggagttccagatcgatcccgagtccggaaggaaggcgacggccccgcccccagggtggagcgcttggggtgcgggtggggtgtgggggtccactgatgcagcccgcgcctcgcccttcagagtaactcctgtggactctgagactctgggatattcgccttctgccccagatccctggaggggggctgagtggcagcctgcgctgaagataccacctgagaggtgggatcttgggtgcctggtgatcccagtgtgtggggctgggaacggagaaggagctggggcggatccctgagaaccaccacagagaaggcgcgacctctttggaggaagagcgttgtgtctcggatttgtggctggagattgagagaaattaacaaggtgctgggagataggctggagctatattatcctctctgcctcagcctttcttattttcagtttagcctatttcacgtacatctaacatcagtgctgtctgtgaaagtacagtccattatgtcagattccagagaagaatgttctgcttgttccttgtgttgcatattctctaaccacacttagaatatcttgtttacgttttccatttggtggcaacagattatcagtgtcaaaagctgaatccagtgttagcgtcagtggaagccagggctgtataacatgaactcttctttcatatcctgcttatcttccttcttccctgtaaaatgttggaactttcaaaatcccctggaaatcttttccctgtaggaggggttcaggtttgatctagaaatacggcactggttgtcactccggacctcggaggggctgggtccagcaggctcatgggctcaccattcctggttctgtctttggactgcatagcacatgacaccagggagtgggtacctggtgtgcaagcacccttcccactgaagcagcagacatgcattcggatgaaataggaacgccggatcccacatagagtcacattccatttactataggacttcctggtattcagtattgggccccctttctagagaaacacacacatgttgttttctctcaggaatttcagtcatttaacctggtagctttattacttttttctccagaagttctagagaacttatttttattcatcattaggtttttagagggtttaagtgtgattctccaagtgggattcagagctctctgagacatggagtaagatgggaggagggggaaaaagcagaggcttctgccccaggggcagatgtctccacaacagagttctacacagcccagctcaataggtaagacctgtgttcctagccaagcagagaacacaggcaaggctgccacctgcatttagtagtgaagcatcgcctgcagattgtttagcctctccgtttctaccccaaggtggttatgagaaatgagtcaacatttgtaagagccagcatggatttaagtgccttataaatgtttgttaaatatttgtttaaaaaaaaaatggaaatagcgttttccaacattgcctaaacagaaactcatcctgatgtgaatttatatatatatttatatatttatatatatatatatatatatatatatatatatatatataatggaaaggttcactccccagtgttttttacatttaaaattttctatatcagttactgctacccaactacccctaatgtatacaacaccatatacagcagtatgagtcttgaataaatcaaggcaggtcctggaagacagaatgttcatataaacaccaaaagctcagtttccaaaatgccctttcggttactcaggggtactggtgctctcattacagtaatcttagtcaagggtagaaaggtgtgctagaatgttgtttctttaaaacagacactgtagatagtatatgtactccagtctttttcaattatttctcttttcac

SEQ ID NO: 316807 - DNA, 4001 bp, Homo sapiens
tttgattgcataccttttagttatttgagattctgagaattctgataaaccccaaagcagaaagattccttagtacccttggaagatgggaaaggtgagggaaatatttgaagcagggtcagaacatccactaagaacatagcacctcagtagagcttacattatagtgccagggtagagttattactgaatagcttaggatgatgaacattaaccttcctacaggagtagtagcagctgatttggtgaccatcattggtcaccttttagtgtaactgcaaactaagaacaattatggcttgacatatactccatgtagggaagtgatgggagaggcagcctctgtgtggtccatccttggaagcactgcatcgattttgctcccctctggttttaaggagatcttttagacctgtaagaagagaaaggggatataaaagtgtgatagtctgactctggcttcagattgggttgtgtttggaaagtaccgagttcatagaatagataactgagctttcctgctgctatgcattcattatggattataggggttgcttttttcaaccatgaaagacttggggaaaatgttgtcagttttgcttagatagttatagctgtacttcaaggttgactggtaatcagggtaacttctgatacttatcacacaagatggtgcctcagcatttaaataaatggaggtaggggagggcgtggtggtaacatacttttaaaccagcgattgcacagcaaaccacaatgcaagtatttctgactcccaagattgccgtttcctaaagagcaattcttctgcaggcaacagcaaacctacctttccttgctaactgctttcagtaaattcttgatggccttcgattctggattcagacatctcttctcacccttctttttcattgtagcactgtagaaataaatagggatgaaaatatttaaaactgtgttgggtcaataaaacagatggcatacgcagttctgaagtcagacatttaagtttcactctgcatgtttttgtttgctgtacattagttttagaatcatcacaaaccctttactgatctttttttattatcattacatatttaatacagtatataattacaaccagggaagtgataatcagatgggatttcactcacatgatctcaacacgtggacaaaattggcttgcaggaataatttcaagtttttctaaagaccttggattaacaggttgattactaatgctgatgcaggtacagcgtacagttctagagagaggtactcctgtaggaaaagaggaacagcagagaaggttagcacagtgttcattttaggcatttaatgtagactggtggtatttagcagaacctatatccccatatcagcaaatagtcacttaatctgaggaggaatggatcacatcataacacaactgtaaatgattaaagagttgattatctggaagaaaagaattgcagcttgttgattataaagtcaaacccttaagcacagttcatgtggttcattgagcttagttaggtaaggaagtatctgtatctcatctctgtccgcattccctcacattttctctctctatcctccctcttccccatctcttctgtcctccttccctttttccttctctttctcttattctatttgtttctctcacttcaattcatataagttttatgatctgagggaatctctatttatttccctcttatttataagcatgcagtgaaacttttacaaatacattatttctgtatttttagaatttatacctattcctatttctcattttacaaattaagtatcctttgatgttccttaccttgaatgccacttagagtcagaaagataaggcagcaaatcagaatggcagtttgattcatggtgctgagactggaggttcctctgctgtaggctcagaatatgtctaagcaattgaggaatgtctcagaaaacgtggggctagtgtgccatatttatctgcaaagccattttccctccctaattctgattggataagggcattacagttgacttagcaaaacctgctggctgttcctggggaagtcccatgttgcagactcgaaggtattatttattgtagcctccaagttacggaatttccctctgctcctctttttttggtaatagtgaattaggtttcactttccaaaacatgaactgtttcttgaaaaaaagaacttcattgcatatagaaaaaaacaaaggttgcaatccattctaactataatgctttttctcaacacttaaacttttacagttactttcagaggttatttttcaaaatatccccagtaatagaaatttttcatcctttataggtaaacctaattttttggtaacagcaagttgtgcctgattattagaacagtgatttacctggacagtcctccttgatcaaatactataaagtaataggactggcctgctttgacagggtcaaagatctggaactggcaagttttaaataattcaataaatgctttgatcattcataacaccattagattaagtaaatagcctccaacataactattttgagggaaaacattgctcatttgggtatctgatttgtggtgtgttaaaacaagtttcacgtcttatagcagtccctgaatgaaaacatcataagatggtatctagaatggtgtgagaaaaggattcatagctatcctagggttattgtaaaaaacaaagggtgctttttgaggaaatgaatttaaaagcgggggggcacgcatagagacagaccttgggaaagtagcttgagacagaagggaaacaggttgatttacgatggggttcagctccaagacactgttaaatgcaaagaaaaagaaaaaaaaagtgttggccattgagctagtaacagtgataactgaaattggcacaattttaactggatgatgaatcgtggcaaaacttaatttcacagcattcaatagtacttgactgattattcatagtagctagcagtagaaagcacatgatactcatataatggaacacatgttgaacctgagagtggaaatttagcagtatccatggatatagtggtccttggttgtgttctttgcaaatgattagtaacagggaatccaagatgaaatactgtttcaaaggcaggcaccaccctgcaatgagagatctgaggcaagtgatatttagaacctaggaaaatatatgggagttcttttcatagtcagctgggctgcaacaatgcagggattggtcagggaatggaaaagcttccatcctaggatcaggctactgtactaggcagatactgtctcagaacctggtatcaggggccaagaataaagcctgtatctgcaaactgggtgcacataaaacttggatcctcaaatgtaggaactccatcattaaagcagagagtgagttgcttggggtaaatggaatttgctagagagctgaatcccatgttaatctgttctaggaactggaatagagctaagctttcaagtgaataagtcagtggaattagctgtgggaaaccggaaaggcaaaagagagggaggtgaggtagagactgacagaacccaaaagactttcacctagcaaagaggcgttcgttctgatgagggaaagtcttatgagaaatagtgacaatggagggatccttccatacctatttgtgcagaacaaacattttactgtgaatagaatgccaacaaatttcagagaaatgtctgacatcatgaatggaagaggcctagaaaagttcaacattaaacaatcaaaatgagagatggtgacagttttattttagttggtatctaagttgtcagctaaaatgtctctatatagaagacaatgtaaaaaggagatacttgataaatggactaaaaatctgttattagggataaaatatttgatttttactaaacattgtattacattaactgtgtgccaggcattgtttgaactgctttgtgactattgaccat

SEQ ID NO: 316808 - DNA, 4001 bp, Homo sapiens
acatgatgtttggggaaagaagtgtgtatttgcatgaaaaaatgtttgaggaatgttttacgacacatagatgcttttgacttataagggcttgactccagtaataatgtcaatgtctccaccgtaaccacagatagtaatatagcataaagatcaatacagacagatgacttctagagacagaaatgttctcatagtcacaacagaatagttgtaagcatcaaatctagaaggttctctagcctagaaatgcatgaatgtataatgcaacaagtaagaacgtgaaagcactttgtaaactccgatggtaaccagcctttcttaaggtagcttttcctagaaatccatttaattgttggactcctttgggcagtggaattctgattgtcattcattcaggaagactgtatttctgtttttggtcctttcacccacctttcatccttcacataactgtacaaaagttgaaagtcacaaaaccatagaaaagtctcagtttcctactgtagaattcttgtcatttcagtagtcacagttaaacttgttctaggtttttcagatgctcttttccaggacttcatatgttttgatatttttaaaaattctttctttcaactttctggaataagaaaacaagagttttatttacttgggctgttcttgtttcccccaggacatctaaaaacatgtagtaagaaggggaagctgttacaaccaaggaccccttaacagaatatttcacacaggatcatagcagaatctttctgtagttgtccacattattttctttttcaaaagatctgtcttggataaaacagattataacatgggagtaatttggtaacttactttgattataagccttgcttgcttcgatttgggatttaggcatcgttgtcctttattttctttcagggtaatactgttaaaagaacatacaagagtcttaaagtttagatgcaaatacataaacaaaaaagcctgcaccattgtcatcttcagcaagttcattacttacatcacttctattttgtcacagttgttacttgggtacattatggaggctttctcaatatctgccactttcactgcttttaccccagggcctatgcaaagacagcgtcctcttttgaacatggggaagcctagaatagatcatagcattagttagtaatgcatctgattgcaacagatggctgtggtttatagctggtggtgaacgtgagcagaattttcattaagggtaaagatagtaatttgtcaaatagcacttaacacaactgttactgggaaaagttaagtaagatgttgattattttctcattaaattagtaagcaaatcgctaacaaatgggaagcatgaaggaagtttattggaggtgaagcttgttttgcccccttgattttatcctcaaatattttcccaggaagcttgttaacatgatcgctatataaaatcttcttaacagacatttaaaactgttgctaaaggcttttgccagatattctagccaaatcaaaaattccatgaagttcataatttctagtttcaataatcatctctagtatcttaaacatgtccaccatttctgtgctaaagctgtagtaacttctaatctgtgagattaaataaaactttatcatgtcttttaggataaaagtggaagaaaagacatttgaaacattagaaaaggaacttataggttgagaaataaaaattactgcataccttgaacaactgtagcacacaatatcacagccaaggctatagccatgcccttcacactcatgtttgttttttgctgttgctgctggtgctgctgctgctacttcagctttgctgctcttcttggaaggagtagaaatgctgaacatgaaaggaaattgataattggcatatatagagcattttatacaccagcaatccttttatggcacaggaatttccctctttgagtcatgcacctttcctgcttccaagagtttctgttttgttctcttctaaatgttactgtcccttcctatttgcagtagtgttgaaagtgataagaatgtgaaagcactgtgaaaacccagatggtaaccagccttcttaaggtagcttttcctagaaatccatttaattgtcggactactttgggcagcggaattctgattgtcattcattcaggaagactgtgtttctgtttttggtcctttcacccacccttcatccttcacatatctatacaaaataatattctgaaaagcttttttttattatctcacttttgcttttcagtccaaactcttataatagataaggcctatattatttgacaccagatgacctttattcaatttcatatttttacctgtaaatgagtgcctaaagaagtttccctgtgtttctgtatttatgtccatattgttttgcattttcaacaatttttactttatatattttattttgttttgctttattttatttttaaatttaatttaattttattactttattttatatttattttattctgcaaagctttcattataggcagatggcagggggctcagtccttcttggcagctgctttcctcatggcagccaggacgttgctcagctcctcctgccttctcttggtgcagatgtttgtccctacccttttcttgatgaatttgagggcctgtttgaccttggagaccttcagtaactccatgccacgccactcgttaggggtgaagccacacacctctgggatcatgtcccacacaaatttagtgagtttggtcaggcgcccacagtggctgtgcctgggcttgctcacattcttggtcaccttgtggcccttgttgaggcccacagctatagggtagtgcagtgtcatggctgctgccctccaatggtggccatggtggaaagctactttatatatattttagcactgttacttagtacatgaagttgtatgagttgtattagggatcataaaaaaaagtgatcctctttgctcatgtgatagttttacctctgagattctactttgatgtaattcctatttttttgtctttatcttttcctcttaagcttcctaaatctttgttttaagtgtgtcacttgtagatgtttaagaaaatcatatcaaaggagctttctaatgggtaagcttaataaaatatatttactgtataactggtaatctgtaatttttaaaatgcttccttgctgattctttatgttttctttgatttctttctaactttaaatatattttatttaactttttgaagccatttttgttttttttaatgagatgggtctcactctgtcaccattctggagtcgagtggcacaatcatagctcactgcagccatgaactccaggcctcaagcaatcctcctgccttggtctcccaaagtgctaggattactgggatgagccacggtgcttggccttccttaagtaatttgaaaggaatacattgttttacattttgatattaattcttaaaattctttaaaaagatttttacctgaatttttctaattatttacatcaaccatcaataatatttttttagctcctgtctttgtaacatgagaaaatcactgtaactttctttcaagaattttctcctatttcctagttttaccaataaaagttggtataatcggggaatttatagccagtttattacttttagattattattttatcttattcaacttctttttttgagaattatcatttgcattttatcttgaaattatatatttatttagatataatcctgcatttaaattctttaacaaccatgactagtctttaaaacctttgaaagtctttacagtagtcccccattaaatgagaaattctagaaataattcataagttttaaattgtgcacttttctgagtagcatgatgaaatctcacatcatcttgctccatcacttcatcccatcacatagacattttatcatttcacagcatcactagaagagtgagtatagtacaataa

SEQ ID NO: 316809 - DNA, 4001 bp, Homo sapiens
caggccaggtgtggtggctcatgcctgtaatcccagcattttgggaggctgagttgggtggatcacaaggtcaggagatggaggccatcctggctaacatggtaaaaccccgactctactaaaaagacaataaaattagcttggcctggtggtgggcacctgtagtcccagctactcaggaggctgaggcaggagaatcctgtgaacccaggaggcggagcttggagtgggctgagattgtgccactgcactccagcctgggcaatagagtgagactccgtctcaaaaaaaaaaaaaagtcaggaaacaacagatgctggagaggatgtggagaaataggaatgcttttacactgttggtgggagtgtaaattagttcaaccattgtggaagacagtgtggcaattcctcaagaatctagaactagaaataccattagacccagcgatcccatcactgggtatatgcccaaaggattataaatcaggctactataaagacacatgctttattgtggcactgttcacaatagcaaagacttggaaccgacccaaatgtccatcagtgatagactgaattaagaaaatgtggcacatatacaccatggaataccatggtgtatatggaatagccataaaaaaggatgagttcatgtccttttcagggacatgggtgaaggtggaaaccatcattctcagcaaactatcacgaggacagaaaaccaaacaccacatgttctcactcataggtgggaattaaactatgagaacacttggacacaggatggggaacatcacaaactggggcctgtcgtggggttgggggagtggtgaggtatagcattaggagaaatacctaacgtaaatgatgagttaatgggtgcagcacaccaacacggcacatgtatacctatgtatgaaacctgcacattgtgcacatgtaccccagaacttaaagtataataataacaataacaaaaaatatacactaaagtaatgttctgggttaaattgtgtccttccaccacccaaatcatctgttcaagtcctaacctctagtatcttagaataatactgtatttggagacagggtttttaaagaggcaattaagttaaaatgagatcatcaggatgggccctaatccaatatgactggtgtccttataagaagagaaaatttggacacagacacacagagaaaaggccctatgaagagcaagggagaagacagccatttacaagccaaagagggaagcatcagaagaaaccaaccatgctgacatcctgatcttggatttctagcctccaggatggatagacaattactttattattcaacccactcagtatgtgttactgtgctatggaagctctagcaaactaatagaagtagtaatagcagcaacatgtgatgatagaattacataaatttactctttgatactctgcatttcctgacttctataaaattaactacaaattttgccactaaatttatttaatgctgtaactacactaaactgagagatggtcaggatgaatctaatgagaaaacaagaattaaagaggcagcaagcaggctaattagtttccctgtttctcattgaataatatggaagtaaaaatcagattcacagtttaagtcgaatgagctttaaagtttcgatcaaagaaaaatgttctgaacggttagtcctctgaacagactatacaaccaaggcctctctccattacctggaagtggatcttcaaggtgctccatggcacagtgctccaacaatgattctgggggcttccaaacccttgatttgagactcagaacaaatagaacatacacattccttagtataacttggaaacaaattccagatgagggctgccccagttcaaaaagaatgatagacattaactctggaagttacccagccactggagaattggtagggttgacatattcaacctctcacctcattagcagagtcagttttttcaaacatcttctcctttcgctcccttgaataaatgtaatggtccaagagtagtcagagatgattagattaaatctgtgggacctggggaccttcgtcaacttgtccaatcctctcattttacaagggtgacaactgggaccctgaaatgctcagggtaatgtatatgtgcatgtgtgcctgcagaatatttatagcagtctacctcagtctgaagttagagataaagaatcctcagagacataccaagtctaaaatttctcatgctaggaacagaactttggattctcttgataggccttgtttaatatctcagaggaaaataaatttaagggatgttccaaaattaattgcttatcttataaagttgggctaaaagttaaaatcctatcagtagaacatatggaagatataaatagattaatagttggagaaagctgtactataaatgaaaagtaactcaatctcaccagcaatgttcaatacttactcttgataaattattttctttcttcaacgtgcatataccttctctcttcaacatgtaggtacttgttttacagtcctttggaattgataacgtagggagctaattcatttgagacctaaagggttaaataaactatagtgtatttccattatatgtactccaactctcagaccttaattgtatgcctatacactaagaatattttaggatataaaattgggtaggacggtccttcaccttaaggagagctcattctggtagagaaattggacacatgaggcattgttaaacaaggggtctcaaggctgtgattagaaaatgttatcctcttattcccaattacctgttctaattcactcttcaagtttatattcaagggaaaaaaagttcttcctgacctttggaagaaatctaggacacgtctcgtgatctttctggtatattccaaataatgccttctggtcacttccagagacaacagggcttgtttcagatttcattgaaagatcaagatttcccttctactagcttaagcctgctcccgaggcacagacagcttctccatgcccctgtcctgaagctctgcccctcttctcccactcacccggctgcatctggttcctctaaggctggagcccaaggtgaaggtgagggctggagttctaagaggcaggaaagggcttggctggctttcaggtaatctcatgttggctcccttgggccagggcaagtgtttgactgacagtctgtcacgtgggttatttgaaggctccccgtaggaatgcaaagcaaactgctctgacatgagtgatgcgttttctttccagtggctgcttatatctcctacctccaagcctggcagtcgaatgggccatctctcagttggaataactgcccctccataaagtccttttgggtggaatttaaaatggctctaaactggtatggtctctctgtctctctctctgcaactctctctgtctcagacgaaaagaaacctagaacactgaactgtcaaggcaacgcagctggctcccaatgcagctggttgagctctctttgctctactgtctttggctaattgtcacagtttctggcccttaaatccttctggagtttttgctgctctgtcccctgaactgcaagaggcatagatcagactctcttagctcatcaaagccctgattgctaggcttgaggaatgggaaagaaccctctacctctcttctgtgtggtaggaaaggcccacagcatactaataacactctccaaagaaattatttttcctagattccaatttattgactgaattcttaaccatcactaaaatggcctggatatggccaggagccagcttgtttcttctctacaagttttgtctaggcatatagcacctcactttggattgtgggattggctgctttttggtccttggcaaaaactaaggctgagtcccatcttgtaatacaagcaaatatgtcatgaatgtgacaagtgaatgctaggatagagacatgcaaaagct

SEQ ID NO: 316810 - DNA, 4001 bp, Homo sapiens
ttacagttacaaaatagacacacatacatttccctgccgtcacattgatctcactggccattttcttggattcctcagcctctatcacagtggctgacatgtgatatgtcatcacgaagaaatattaacaaatgactagagaatatctgcaaaccttctatcttcaaattaaatatgaatcaggattgaactaacttgggtttgacctaaaataaacaataaatataatgggagagtgtgcaagtagattcaatcataaccttattttacacataaaatattaacatagaatcttctaaaacaaacaaataaataaataaataaataaatagaagacttctcctaagtgatgctcaaacacattaggcgcaatccaggtggcctctgcagctgtgtctctctttcctcttctgttcctgtaagggcagggcctccttcaggaacagccaccaataagcttcctccttccttctggtcagttggatttgccactgtaatgagaaaatgggtgccctgagtaggtgctcaggaaagctgactgcacaacagtcttctcctgtcctgtttccccaggctctagagttttctgaatgcagtttccccagcctggcacccaagtgggtactgcctgtgacagctgtgctgtgtggcaaggacctctaggcttgggatgctcttttaggaatgggggtgacgtggggtggaggagtggcagtctacactgttttactggctaaaacagccagagcctattgctctttgtcatactgggcctcacttgagcctcaaagcaacctcatgatgtagctaccattattttccctgttttgctgagtctcagataaactaaataatattgtctctgagtgacatggctaataggtggtggcaaccagttatatacccagtgcaatattattgtgaaatctctgcacttcaaccctaaacttttacaaaaaaccagggggtctgcttttcaggtctgaaagtcagtaggaactaggggaaatgaagcttgtgttttttaacaggtggaaaacacttcagcacaactggcaaactccaatgagaccttacatgaaagcagttttacctacattcactggcaggagggaagaacctgggtggtgaccctgggcactgggaatatcctctggcaccagaacagattaataaccttaatggcaactttgtgaaaataataattttttcagtcctgcagctaaccctgggttttcctgatttactttttagggggcagacgccagtatttctgaccaacagctccagtcgcctgtgtacatggaaattataacttactttttcagcatcttttcgatgattttcttaaccatgggcgatgcggggttgagacaagctttctgcccattcttgagtgtggctctgcagagagaagggaatctcgtgagacaggaggtcgggctgaggacagggtttggggcagcgggagagtcggggaccccagcagtggcagcggcagcgatgggcgagacttacatgacttcggtttgggcgcagtggggtccgggggacttcaccttcacactttggatgttcttgaggtgaattccctgcagggtctgcaagcactggcagcgcagttcagtggccaggggcgctcctagggaagaagagactcgctgattgagcggggctgtcggcgcggggcgcccaccccagccgcgtccggcccggggaccccagggcgccgggacccacctgctgcgcgccggctggcggccaccaggagcaggagcagcagcgccacccgcaggagccggggattgctgggggcggcggagagcgtggcgcgggccatggggctcagcaggcggttcgagcggctgtgcgaggaggagagctggcaaggagctgcctgtggcccgggctctgtggctctccgagaacggcgaaccccttttatgcatggttggggctggaaagcccggagtcccgggccagggaaattcccggagctccagatcgatcccgagttcggaaggaaggcgatggccccgcctctggggtggaggggggtcggggcactcacgagtgacgtccgggtctgactgtcttgcgtaactcccgccaactgtgggatgttctctttctgccccgaatccctggagcgggagcgagagcccgccgctctcagagataccgagataaccgcctgcgaggaggcgcttcgtgaacccagtgcagtgcgtcgtgggtcagatcccttagacccacgtagggaccgcgctacatccttaccggggggagttacttctctggaagacatttcagttgttgggattgaaagttagggcaagaactgcagcatgtcttatctatcctctctctttagtttgggttctgcaaatttcattaatgtttgaaataaacgcacgctttaacagtacatgtgtcatctcagatgacgcataagagcttttgtctccttcctggtgttttatgatcttaaaagcaaatatcacgtgtgtgtgtgtgtgtgtgtgtgtgtgtgtgtgtgtgtgtgtgtgtttcaacgtagtggagccaggtgttgggtgcgggaacagaccattgccaagggtcaattcagtgtttattttagttaacagtgttgcaatcccccatcctttctctctttgaaatcttggaacatctcgaactctagtaattccagtagcatcaattttttgttgtatggaagtctgtgttttgatccatggaagtcactgggagctgcgaggggcctgttgggctcaggaggtctgccttttctagtgctgtccctgggcagaaaaggccatagacaccaccagaaaaggagcagggaatgagactccgcttgtttactactctaagcacaagcagacatgtctgatatatacatactagattgctaacataattgcatttccatgccatatgtatttaccagcatcctgggattggttccctctagagaaacagctatcgaggaaattttagttctagaggaatgtcaataaagcatttccaagcctgtttagctgatgccttctcactggattactgacttttcatcatcaatttcaatgaccccctctctttaaaaattaagctgtaggcctacaatactctgtcttaattcttcctggtggatgcagacttcagggatatggagatattctgccactgctatgagaagggctgggagtggcacgaggatgaagaagtgggactaccttaggaatagagtgttccctggatgctgcagctgtagagatcacttgataaggatgtcagggctgaagtttcagccataccactaacttgcttcatgacccttggtaatttatgctttatttgctcatgtttctcccctgtagaagagcttataatagtgcctgcctcacggggttgttagaagtattgattgttaatatgtgtaaaccatcagtgcatgtaaagtgttatgtaaatatttgttaaataacaaaatagaagtggtgtttcacaaccttactgatataggctggatgtttgtgtctctttcaaattcagatgatgaagccctgactcccttatgtgctaatattagaagacaggaccatgggaagtaattaggtttaggtgaggttatgaaggtatggcccccatgatgggataagtgccattacagcaagagatcagtgagctttcgatctctggctctctctccctttctgcattgtgaggacacagcaagaaggccaccatctgcaaactgagaagagggccctcaccaagcatgaaatctgccaggatcttaatcttggactccccagcctccagaactgtgaaataattgttgtttaagccccctagcctatggcattctgttatagcagctcaaactgactaagacacttaactaaacagaagcactctgataaagccttatgaacacacacacgcacaaagaaagaaatattttcaaagaaacatcttctaatttacctttaaaa

SEQ ID NO: 316811 - DNA, 4001 bp, Homo sapiens
gataatttgaataaataacaactgacattctttttttaaaaaaaaagtataaaaaatagatgtgtacatacattcccttaccctaacagtgatccactaattgcttgcatttcaatccccccaccctccagttccccaccctgtcatttatcaaggtggctgacacattatggtctcccactaaatattagtttaatgacacatttaaaacccatcatattccaattaaataatcaggactgagctatgtttgatgaaacacactcacatctttaaataacagcatgtaaaatattaaaatacaagctttcaaaaataaatacataaataagtagaaccctcgtaagaaatagtcaaacacattaagtcctttccagctgtccctagaaagctgctgttctctttttcattttcagctctggtaagggcagggaccaccctgcaggaagtgtcaatgatacgctgataagcttcttacttctctcctgtcagttggtgctccccctgtgatgagaaaagggttactgttgcaggtgctaaggaaggctgctcttctgtcactctgaagttgcttggagggatgtccccatgcagactctctcccagccctccactcagggaaggtctgtctgtacccactgccttctatagcagaaaacttgcactcctgaatgctttttttttttttttcaagaaagaagtggctgtggactcaactagattcttggtttgaaaaagccaaaacatattggtcactgattgtcacattgggttagaaatgtccattcatgatctcccttaagctgcacacaaccctatgaaataactaccattatctaccctattttgctaaagctcaaagagattaaataacgttgacagggatcctagccttgaactcactgaaggtgttactgcaaagtttctgctcttcaccaagaaggcttacaggcccaaagtgcccaaaccagacattgcatttttcaggtctgaagcccattagggactgaggtaaacgtcccaaaacaggcagggggcattttggcattgttagtcaaatttacttagtattctagaaacccacatttaccctcccaggggttaggcctggaaatggaagacactgaaatactgaaatatcctctggcaccagagcagattaataaccttaatggcaactttaattgtgaaaataataatcacaatttctagtccttcagctaactcttggggttccctgattttatttttagggggcagatgccagtatttctgaccaacggctccagtcgcctgtgtatatggaaattacaactcacttgttcagtatcttttcgatgattttctgaaccatgggggatgcggggttgagacaagctttcttcccattcttgagtgtggctctgcagagagaagggaattccgtgagacaggaggtcgggctggggacagggttggggcagcgggagagtcggggaccccagcggtggcagcggaagcgcggggcgggacttacatgacttcggtttgggcgcagtggggtccgggggaccttacattcacactttggatgttcttgaggtgaattccctgcagtgtctgcaagcactggcagcgcagttcagtgaccacggacgctcctagggaagaatagactcgctgattgagcggggctgtcggcgcggggcgcccaccccagccgcgtccggcccggggaccccagggcgccgggacccacctgctgcgcgccggctggcggccaccaggagcaggagcagcagcgccacccgcaggagccggggattgctgggggcggcggagagcgtggcgtgggccatggggctcagcagacgcgtcgggaagctgtgcgagaagcgggagagctggcggggaggtgcctgcgacccgggctgtgtggctccccaagatcggcgaaccctttttatgcatggttgagactggaaagcccggagcggccgggccagggaaattcccggagctccagatcgatccggagtcccgaaggaaggcgacggccccgcccccggggtggagtcggatacgggtagggggagcccactggtgacgcctacgcctcgccctccagagtaacccccgtgcactctgggactttgggatattcattttctgccccaaattcctggagaggcagtgagtccacctcgctgaagatacagcctgtgaggggggaccttaggtccccgatgaccccccgcgtacggggtagggttggaggaaagagctggggggacccgtgagaaccaggacaggaaaggcacgacttctttagaggaagagagctttgtctccttagttatcagatttgctggggacccggagacaggcgagttttccctcagctatcctctctctatatagtctatcctctatgttaacctcccggtctctgcctctctcattttcggtttagcgttatttcatgtacatctaacatcatgctctctgtgaaagtacagccatcgtctcggattccagagaagaatgttctacttgttccttgttttgcatattctctaatcacacttagaataccttgtttacgttttccatttggtggcaacagattatcagtgtcaaaatttgaattcagtgttagtgtccgtggaagccagggctgtataacatgacctcttcttttgtatcctgcataacgtccttcctccctctgaaatgttggaacttcctaaatcccctggagaccttctcccagtgggagggattcagatttgatctagaaatatgacactggctgtcactctgaagctgtggaggggctgggtccagcaggatcatgggctcaatgtttctggttctgtctttgcgaatgacactagagagtaggtacctggtgtgcaaacaccattcccactgaaggagcaaacagctgcctgctgatgacatttaaacaccagatcacacataaaatcacatttcatttactatagaattttctggtattcagcactgggggatctttctctggaaacattaacagggcacttttttttctcgtctggattttcagtcttttaacctgacacctttgtccctttttctagttttagataatgtattttgatttgtcattaggttttagagggtttaagtgtgattctacaagttggtctcagacctctttgagacgtggagtaggatggaggagaggagaaaggaatggcatctgcctgaagcacagggctctacacaacccagctcaagggataagagtccttgcccctaaccaaacacagagcgtgcaactgtgctgcctgtatttagttgcagagtatcacttgcaagttgttaagcctctctgtgcctagcccaaggtggttatgagaaatgagttaacatttgtaagagacaacatggattaagtgccttattaatggttgttaaataaataaaatggactatttccatttttaaaaggctatttctttcccgacattgcctgaacaaaaactcagcctgctatgaattctgtaaaggaaaaaagaagaatctaatggaaagttttactccccagtgtttttcacatttaaaattttctgtatcccttactgccacccaactctccctgtctctaactgatataaagcagtgtgagtccttaagaaatcaaagcacatcctagaaagaagaatgttcatataaacaccacaatcccagtttccaaaatggtcttgtagttactggtgctcacgggtatctgtgatgtcattacaataatcttggacaagggatagaaaggtgtgctagaatgtcctgttactttaaaatagacactataggtaatatatatgctccattctttttcaataatttcctctctcacatctccctgactacttaaattccttgaaagaaaggatagatacagaaaaaacattgacccaatggaggccaaaatagtgtcccaaatgtcttctgcagtttcaagctgtaataaatgctgc

SEQ ID NO: 316812 - DNA, 4001 bp, Homo sapiens
aaactttcagagtacaagtcattgttaagtttgcctttactttaaaaactaaaagaatacatttctatataaactagcagtcaggaatttgcctgttttctagcttcttcatctatctaaaatatatatttagctaccagaattatggtactcctaataaaatacttaataaatagcatataaaatcaaagtttaaaagtaaatgatggcagtttgccatactaaaaagataaagaatgtctaaaattataggaagataagatattagccctcatagaacttaaacttttagaaattctgaataaggaaatatattctacatagataaggtgtgaaacactcagctttctaaagtgaaataattaaatagtatcccacaatcaagagtaaggaaattctctaacatattccccaagaaacattaaaatatttcctatttcttataaaagtgaagataacagtgtatttccatcaacagaattcttatgaaacatcatttccacattaaatccacagccttctcagttaatatcttaaggaatatttcttggaaatataatagtcacctacaattcaagacactttgaaagattaacagccagtgattcctggctcacactatagtcaattgccaaaacttcaatagcatagcagataaaataacagcaaatagcagaggtactatgctaaacacttcattagctgagctgaaagcttaagcggcaaacataggttttcctcacactcttcaaagtgaggaatccaggaagaaagctaactactggaaaaacaaataaacaaacaacaacaaaatctttccttcttgtcttccctgggttcagagacctccagaaaacttctctgctgaagactgggaaacttttccatgcgtgctcatttctcttaatcagttttccttgtttccactgttgagaaaaatgttatattagtttaaccatttttcacactcctttctactccacccttgtcaaaactcagcgtttatgatgtttggtaaaaaaggagaatacaaaaatcaataaaagcaatgggtaaacaaaaaacataacttagtgacaagctgtgtgtaattgctcaagtaattacatgtaagattggtatattttcccaggacaatccagaaaaactttcccaattcaacaaccttttaattctaaacatgaaaagtgttacttaaatcgtacagagaataaagaccttgtgaagtctatggtctccctagatcagatttagaaaccacaaagatcaaagtgacaagtacccgtccaaaattttctggatgactttctttagaaaaggggcttctggatcaagacaaatttccttcccgttcttcagggaggctctgaaggaaagaaaaagaagatacactcatgagataccaaggttgaagacccaggctgcgggatttctctcttgccaaggtcacagcggacacagcagcacagaacttacaccacttccaccttggagcactgtgggcctatggcgaacacttgcagattactgatcattttgggatgaactccttgcgtggtctgtaaacaaacgcaacgcagctctctcaacacagcagcggcaggaccagctggggaagaaagagagacaccctttatagggcaggttgctgggagagttccctggaacgcagcgaccccgcagaggctgggatgcacctctgtgcccgagtgcgagtgcgtcccgcgcgccatgcgctctcaccgctggcgatgggccctggctgcgtcagcagcagcagcagcaccaacagcgcgcacaaggagctcgaaggaccggggacacgggccgcgcggctggacaggaggctcatagtggtcaagagagcgctgcgagcggtcgcgggttcctgaactgggtggaggagcggagattggaggagcgaagattggaggatccggagcactgtggcttcctcgtgccttctgcactccttttatctacactcatctctccccactgacaggaaactcaagctttgggatgctggggaaattccctgaactcatggggcagtgtggaaagaagaggttgggggaggggggccagacaatgggaactggtggggagggtggccaggaggagctgcgtgcacctctaccgagagggacgttgtaaccctgctccgcggtggagggagctgtggctccagctagaagggagtagctattcagcaggattcagcagggcctcatggcctgtgccagagcgggctagggatgccggcttttctgaggcacgcagccctctgggagatgctcctcctctccttctagagagaaaaggtggaaccaaagtaacaggagccttgatttgagaaaaatttctgaaagtcaatcctttctaattattattactattaatcaggaaatgttattcatgtttgaattgctataaactgaaagtccttcctgtcttccttgcaggcaggtcattctaggtttcttgaatgactttatgaatctctggacttcaaccagctttggaagccaagataacatgataacaagagacccttgtctcttgccacttgaagtcagtggcctgaaaggaccactgaattttgttaactcccctacagatcacctactttggtaagtccgcttactgagaattctgtacttgtagtatatagcaagtatacgtgtgtccaggtagttaaacaaaaatcttccaaaatcacccagcaaattgccatggaagataccttgctattggcagttgctatgctattgaattggaagaggttttggtcttgttgggggtgaggtgtagtatggtgagcgcaggctaaagcttgccagggatcccaggcctgccccagctctgttcccagccccagatatgtatttgacaccatttggagatgctgtgggaggctgatgagtttgaagggctcatgtgaaagcttcttgtaggggtttgtatcaatttggcagcacaacagcacccagtctgttttccctcaaacaacttcacggagggaggaatgctccccacaggtttctggaaccatcgagtttcatgattactggtgaccaacgctgtttccacaggcctactctagtccccagtgagccctgcactgctgcctgaaattgaagggtgaagtagtttccagcttcctctccctctctccttctgttatctgtggaggagttaaagcactgaaggtttaagggttttccactgtcttgctccatggcaggaatgggttattgtattggaatgacacataggctttctttcatggaaatctaactagatcctcttctggctggttctgaagacccttgccctcacagcagaccagcaaaggtaatcagtaaacatgatggcaatgagaaaccagtcatgaaacacaactcttttccttgtctcctatgatactgggaattttattaactcccccatccatcacctccattggtgagcaagaaagagatgtcatagaccttaacaacttttattttggaaggaaacttcagaaattcactggctgagtaaggtttggtggtatgggccttactctgtgggaaactaaatgagaagtcttcacagcttcttgacatcaccagcatcatacctgactcagaaaatgtaattcttcatctttctggggagtggtaatctgtagaaaacagcctgcagatttagtatgttgacgttttagagattagagtgtatcgaaagacaaaagttaagcctaggtgaagtgataacacttcaaaaaatcttgggcaattaaattcaacgtaaccacagggagtaaaccataggataagactttgttcttttaaaagaagtttaattacataggttattgacttttaaactgtgtgtgtgtgtgtgtgtttacgttagttctaaataagctattttaaacataagtgaacacacgaatttgtttttggcgccaaatggtgaaatctgagatggatcatgagaaaagattgccagtt

SEQ ID NO: 316813 - DNA, 4001 bp, Homo sapiens
aaatgatgaatttatattcaaattgttcaaatatattttcaaaactttcagagcacagatcattgttaattttgcttttatttaaaaaaccaagagaatacatttctatgtaaattagcaatcaggaatttatctgtttttgggcttcttcatctatctaaagtgtatatttagtgaccagaattatagtcatcctatagtgaaaaaatagcatacaaaatcaaagtttaatgagtaaatcatgacattatgccatactaagaagacatcaaacgtctaaaaccataggaagagaatatattagcccttacagaacttaaatttttagaaattctgaataaggaaatatattctgcacagataacggtatgacacacccagtgttctaatacagtacaacttaaatagcatcctagggtaaagagtaacatattccccaagaaacagaactaaaatatttcctattttatgagaagagtgagtaagaacaacaggatacctccctcaacagcacactaataaaacattatttccatacgaaatccacagccttttcggtaagactttaaggaatgtatgatagaaatacaatagttatcttcaattcaatattcattgaaagactaataaccagtgattctttgctcacaatatggtcaattgccaaagggttcaataacttatcaggtaaaataacagtaaatagtggaaatactatattagtacttcattagctgagctgtaaacttcagggagaagcgtaggctttcccccacactcttcaaagtagggaatccatgtagaaaatggaaaaaaaccaacccttccttcttattcttactgggtccagggatctccagaaaactgctccgctgaagactgggcaattttatgatgcatggtcttttttgttactcagtttttcttgtttccactgttgagaaaagagttatattagtataaccaattcccacactcttgtatgctacatttggttttcaaaagcgtttggtgggggaaaaaaatcaataaaagcaaagagcagacaaaaaatagatgtcagtaatgagctctgtgtaattgttcaggcatgtaagattggtgataaaggtttacccagaacattccagaaaaaaagtttccttattcttcttaacaaccttataattctaagcatagtctaaatcctacagagagaataaggacattgtgaagtatatgctttccatagaagatattaaaacaccacaaagatcaaagggacaaatacctgtccaaaattttctggatgactttctttagaaaaggggcttccgggtccagacaaacttgcttcccgttcttcagggaggctctgaagtaaagaaaaagaggatgcacccatgagccacaaaggttgacgacccaggctggaggacttgcctaagtcacagtggacacagcaacacaggagaacttacaccacttccaccttggagcactgcgggcctgcggggaacacctgcagtttaccaatcgttttggggtttactctcagcgtaacgcgtaaacaagtgcaacgcagctctgtcagcacagcagagacaggaccagctggggaagaaagacatttttatagggcaggttgctgggagagttccctggaacgcagcggccccgcagaggctgggatgcaccccagtgccaggagctctcaccgctggcgaggggccccggcggcgtcagcaggagcagcagcgcgagcagcgcgcacaaggagcccgaaggacccgggacacgggccgcgcggctggacgggaggctcatagtggtcaagagagggttcgcgggttcctgagctgggtggaggcgcggagactggaggatacagagcactttggtttcctcgtgccttctgcactccctttatctgcattcatccctcccgactggcaggaaactcaagctttgggatgctggggaaattccctgaactcagggggcagtgtggaaagaaggggttggtggaggggggcgggaggatgggaattggtggggtgggtggctgggaggagctgcctgctcccttaagggggaggacattttagccccgccccgcggtggagggagctgtggctccagccaaaatagagcagcgattcagcagggtctcatcccctgggcttgaggggttagcgaggctggcttctctgaggcacgcagctgtctgggagatgctcctcctctccaatggccaggacaattaggcaggagaaggaaataaagggtattcaattaggaaaagaggaagtcaaattgtccctatttgcaaattacataattgtatatctagaaaaccccatggtctcagcccaaaatctccttaagctgataagcaacttcagcaaagtctcaggatacaaaatcaatgcacaaaaatcacaagcattcttatacaccaataacaaacaaacagagacatggtctcagcccaaaatctccttaagctgataagcaacttcagcaaagtctcaggatacaaaatcaatgcacaaaaatcacaagcattcttatacaccaataacaaacaaacagagagccaaatcatgagtgaactcccattcacaattgcttcaaagagaataaaatacctaggaatccaacttacaagggacatgaaggacctcttcaaggagaactacaaaccactgctcaatgaaataaaagaggatacaaacaaatggaagaatattccatgctcatgggtaggaaaaatcaatatcgtgaatatggccatactgcccaaggtaacttatagattcaataccatccccatcaagctaccaatgactttcttcacagaattggaaaaaactacttgaaagttcatatggaaccaaaaaagagcccgcatggccaagtcaatcctaagccaaaagaaccaagctggaggcatcacgctacctgacttcaaactatactacaaggctacagtaaccaaaacagcatggtactggtaccaaaacagagatatagatcaatggaacagaacagagccctcagaaataatgccgcatatctacaactatctgatctttgacaaacctgagaaaaacaagcaatagggaaaggattccctatttaataaatggtgctgggaaaactggctagccatatgtagaaagctgaaactggatcccttccttacaccttatacaaaaattaattcaagatggattaaagacttaaacgttagacctgaaaccataaaaaccctagaagaaaacctaggcattacccattcaggacataggcatgggcaaggtcttcatgtataaaacaccaaaagcaatggcaacaaaagccaaaattgacaaatgggatctaattaaactcaagagcttctgcacagcaaaagaaactaccatcagagtgaacaggcaacctacaaaatgggagaaaattttcgcgacctactcatctgacaaagggctaatatccagaacctacaatgaactcaaacaaatttacaacaaaaaaacaaacaaccccatcaaaaagtggatgaaggacatgaacagacacttctcaagacatttatgcagccaaaaaacacatgaaacaatgctcaccatcactggccatcagagaaatgcaaatcaaaaccacaatgagataccatctcacaccagttagaatggcaatcattaaaaagtcaggaaacaacaggtgctggagaggatgtggagaaatgggaacacttttacactgttggtgggactgtaaactagttcaaccagtgtggaagtcagtgtggcgattcctcagggatctagaactacaaataccatttgacccagccgtcccattactgggtatatacccaaaggactataaatcatgctgctataaagacacatgcacacgaatgtttattgcagcactattcacaatagcaaagacttggaaccaacccaaatgtccaacaatgatagactggattaagaaaatgtggcacatat

SEQ ID NO: 316814 - DNA, 4001 bp, Homo sapiens
gcatcttcactgattcttggataccacagagaatgaatttttttatgaattctcagccctaaaataaaattaaaaatataaagatgagctatgtttaataagaaggaaagtagggttcttgaaaagtcaatatagtctttgacattcatgtgttagaaatgctctatattctcaactataaatagggagatcaaagaaattatcatctaaaataggacactactgggagtgacaaagaactttactaagagtataggacacaagcttaaacccagaatttcctgggcaaactatgtatggtctttctggtcatgagtacaacaaactcactattgatgctattccttttttttttaaccaaaaaggcagatacctaatgacgatttttagcaacagaaagaaatttataggctgactttggattatatgtctcaggataaatgaaaaatttaaattaaaaaatatataacttacctcttcaaaaacttctccacaaccctctgcacccagttttccttggggtccagacagagctctcttccatcagaaagctttacactgaaataagaaagaaatggttcagattaatatttagtttttgcattcaaatcatgattccttaagtcaggcataaagtctaagtccaaaataacatttatagtagttgtggaagctaccatatttaaatgtcatgtagacaaatatttttattttgttttgtttcatttactactgtaatcctaacacctggaactttcctaaatatttccaccttccttaattttaagtttgctaaaacaaaatatctaatcttttttaaagtacttacataatttctgtgttggcgcagtgtggtccactctcaatcactctcagttctttgataaatttggggtggaaaggtttggagtatgtctttatgcactgacatctaagttctttagcactccttggcaaaactgcacctgttgggggaaaaagtgattaaggattgattttatcaacaggcacagctctgccagctacttcctttctaattccaatatgattatttggagactatggaaggcatcatgtttctagtgaactcattcctgaatattctcctagcccttgacctcagttagttctttgttttaaaaaacagtcataactgacaacattgaacgacttcctatataaagagttagagttctttttgtacaatatcaacatcttcatggtatttttatctggtcaatattgcataatcctctgtgataccacagtgttatttatagtaggcaagctaagactctccagcatagaaattgccttcagaaagaattaacagaaatatataaataagttatacatgcctggtctataatcagggtatctttaaaccagacaggaattaatgacaaatctgaggcttgtcaatgaaatactacaaggagtggaattgtctgagttaccttgctcaactcaatattaatacataatataggtaaccgtggttctcaataggacatactataaattacttatttacgttaaatatatgcatgctacatggtataaattataaaagcagaatatctatattgatcaaactttatactttcctaagtgttatatatagttttttctaaatcttcaatttaacattaattgactgctaagattatattctgtttctgaataaaaaggatgtttgttaccaaagcatcaagaatagctttgctatctaaggatcacatttagacataggaaaacgctgtaggtcagaaagatgtgcttaccttcacacagagctgcagaaatcaggaaggctgccaagagagccacggccagcttggaagtcatgtttacacacagtgagatggttccttccggtggtttcttcctggctcttgtcctagaagcttgtgtgctctgctgtctctgaaagtttgtgccttatggagtgctccggtggctttttatatcatcaccctactagagaacttatgcaccctcatcttttcattatgtcagaggaaattccacgatttgcaactgatggcccatcccctcagggcaaacctgagtcatcacacttcctatttgttccttatcaaatacggagtatgacgaaagttttctttgatctttaaaataatttaattttaatatacatttaaaatactgaagctccacaatttggtgaattatcaattgtatgcttttttatttctagataactttatcatagtaccatgtgacagatatagtactagagtggcaggtgttagaacaagatcatggatgattttcttttaatggcataattattttttttcagttaattacagatgctatcatgatggtgaagataagccagccaatcattttattggggaggtaatttaaaataaatctttttctaagcattttagagagtttctaggaactgttactgctcttagggggcatactacaacttttcaaaagatttagttttctaatgcatgttaacagagtgaaggggcacatgtgcttcacatagaaatcagttccacaaacatttatggagtaactttctgagtaatgtgggggatctagaaatagataagactaggtacttgtccttaaagagtttggtctatcagaagaagaaagcaatgtaaggactgactatatagcagaatagacaagtggtactaagacattaattccagtggaggcataagagcagaatcttccaaaggcagttggagcaaggcattgaggaataggagggcttcaatagaggaagatgaaagagaacagcacattccagataggaacagtattcaaggccactcaagttgtaaagttaaggtatgtttatgctccagaaagtggtgcactggagctgcttggttggggtgggagggaggtgttatctaatggaaagttgtatgcttagtggaaagagcatctgggttccaactctggttcagccactgttgcttcatgctctttatccaaggacaccaagtctgacctctgaggacccatgatcactagcaaaagggatggagtgagaaatttcaacaaatcataaaaaggtggctttatgtcctagtgtcctgaagaaaagaatccaagacctttcttgaaaggtcttggattctgtagataaagagcaccaaggaagggttcttatgatagtaaaagtctgttcgcttctgggcaagtacataatttataaataattcaccttggtgtaacagttcttcattttcagaaagtacgacagagcagtgaatttgcccacactgtgaacacactgtggagggggaatgccattttcaaatgctttccaaaaaggtttgtctgtttctgcacaatcatgtttctttttgttatctttctccaaccaacctaagacttgaggataaaataatgcctgggttacactgaattctatagcaaagtaaatgtttattctatataatgtagctcctatagttttcaactgtagtatttcagaaacttcattattcatttaatatgtgttgtttatctgctaatgtcccttattgtaggagatgtgaatgctatgtaaatagatatagtacctgacttaaaggactttgttgtctagtgcagaatatggaaaattagttacacaagtaagtaaaatacagtgatgagtgttacaataacaggtaattacaggaagttctggaatcaaacaaacatgatctttgaggcagttttgatgaatgaaggttttctgaagaaacaacatcaaaagtgttacctttattgttaatgaggagaagaaagaccaatgggactgctttgctagtacaggacaggaagtacaggacaatgaaatgtaggcgaacatggcccatttgggtttctcaaactatttagcatacggaacacagtgcatggagtgacaagaagagaaagcttgggccggataggtaaaaaagacctatatcttaaagaaaactccaagtttctttgcttcagtgatgttg

SEQ ID NO: 316815 - DNA, 4001 bp, Homo sapiens
atactgccacagtaagttttatttcagcagtaaaaatttggaaataatctatatttccaacaataatcctggtcatataaattatggtttatccatatgatgaaatacagtttggccattaaaaatgacattaagtaaaaatgacattattagagatttactgacacgagaaaatgttcatgatatagtgttaatgaaaaagcagattacaaaacagtgtatagtatatgatttaatttttgtgcttatatacgtgtatgtaaaaacatatctatgttatgtgcacacgaagcaagtaaggaagatttagaaaactgtatactaaggggttaacagtatttgtcactcaagggtagaattatgcgtgatttttattttcttctattgtgttacctgcattaaacattttgtacaataaacatgtgtcattcttggggcctaatctaccagaaattccttgcatttttaaggagaagaaaagaaaggagctgcccaaatttatggagggggtaaccatctgatttttaagtgtttgtatgggcaagcactccaagggtaaaactcatgctaaatttaatgttcttgccaatatggtgcatgcatgttagctgggttgttacttacatgatttcaattttctcgcaggaagggcttggggcaaattgtttaaggtctttcaaggattgtaggtggatagtcccttggttggtgctgatgcaggaacagcgaccctttctcactactggggttcctgagggaaagaaaaagatagaacacatcagtataggccaatgtttcagtttaggtgatctatcaaaatgatacacttgactgagtcatgattattgctatcatttaccgagtgcctaaaaataatcaccacaaacctttgaaggaggtatcatctctattttatacataaggaaactaaggttcagaaagattaagaacaaagtcatacagcttttagggagcaggggcagggttttagcccagatctctctgagtccaaaggcgttgctcttaactaccacaccgtaagtccgtgggagaaaaagagactttcacaatatttaataaatgcctatcacaagacaaacagataactaattcatgtatgctatgctgatcacagtttcttaagcaactcctaaaccatctattatttattatctgaccttaaggaatggaactggtgttggtgttgaatagaaagcactcctttgtaaccaatcaccactttcatcctcatcctctctcctccccactgccttgcttttcaatagtgttttaaatttttgaaaaccccttaaaatacattatcttaattcttaaattcatatatttacttggtacttattgtaccatatgccatacattgtgtagcagtcagaaaaggtataactacaaagttctattttacagatgatgaggaaactgaggtctagaaagattaagtaatttgtccaaggtaacaaagatagttagtaaatagattagggacaaattctctgattattggttggatccttaattggttagccacagatatacttagcaaaaaacagtatcagggagaagaaaataatttaggagatagagttctcattattacccagttcaatgaacatttattgaacacttactaggaattcatacacctagactacaaagacttgtgtttgacttggcagatcgaagttatgaactttggataactggtcatgtcactgagaagcttttatgactgaccaaatattactcttcaatgcaggcagaacattcacctttatctggctaatcaagattcttttacagtgaatcacttctcttactttacaacctaactcagaaccccttaccttgcactccaatcagaaccagcaagatgatgcccaagaggaaaagaacaccacttttcttcatagtgatagaatggagttccaagtcactcctgtattggattttgagcctgagaaattctttagagaacacattttggggatcatatttatttaggatattcatttctctcctaaactctgattggctagtatctttagctgagctaactaaattgaccacaaacttgattgtgctgggggaaaccctagtctcagatccaagggaatttctgcatgtttttatttccatttcacataaatgggtggtttatagtaagggatgtgaaactagcaacactgatagcctttggcacattcacagttgctcacctgtgtgaagaataggttatataatgaatatactaatgttatacaacaaaggttggagatgtggtttccagatgggaaatattaaagtccagataaataatatacttttcaaattcccttactatttatggcatattcttctgtataatagatggctacattgatattttcttatattgcccacttaacaacttaaagcaccttaatttcctctgggaccaggtcattttctactagtggtaagctcattctgtatcattcctgctacagtattattttttaaactaataaattggttagaataaggggtcagttgcatgtaagagacccaaattaacagtggctaagaaatgcaataaaaatgaagataaatagctgggacctaattaaagagcttttgcacagcaaaaggaacagtcagcagagtaaacagacaacccacagagtgggagaaaatcttcacaatctatatacctgacaaaggactaatatccagaatctagaatgaattcaaacaaatcattaagtaaaaaacaaacaatcccattaaaaagtgggctaaggacatcaatatacaattctcaaaagaagatacacgaatagccaacaaacatatgaaaaaatgctcatcactaatgatcagggaaatgcaaatcaaaaccacggtgtgataccaccttacacctgcaagaatggccataatcaaaaaatcaaaaaacagcagatgttggtgtggacttggtgatcagggaacacttctacactgctggtgggaatgtaaactagcacagccgctatggaaaacagtgtggagattccttaaagaactaaaaagcagaattaccattttatccagcaatcccactactgggtatctacccagaggaaaagaagtcattatttgaaaaatgtacttgcacatgcatgtttatagcagcacaattcacaattgcaaaatcatggaaccaacccaaatgcccatcaatcaatgagtgaataaagaaactgtggtttatatatacacaatcgaatactactcagtcacaaaaaggaatgaattaacggcattagcagtgacctggatgagattggagactattattctaagtgaagtaactcaggaatggaaaaccaatcatcatctgttctcactggtatgtgggagctaagctatgaggacacaaaggcataagaatgatacaatggagtttggggacttgtggagaagagtgggagcggggtgagggataaaagactacaaatagggtgcagtgtatactgcttgggtgatgggtgaaccgaaatctcacaaatcaccactaaagaacttattcgtgtaaccaaataccacctgtaccccaataacttatggaaaaataaaaaaaaaaaaaacaacaacagaaaacagtggctaagatagaagcttatttctccctgagagatgtaggtggattagcacttggatagtggctctttcccatgaggtcttccaggcttctcctttcttgtgttgtcaccatctctagattgctgccctcatgcacatggccaaaggtggcttgccaccatgtccaatttccaggtataggatgatgagaaggcagaaaaagggcatgtccctcctttttagacatcctagaagttgcacccatcattttctatcacctcccatggaggcaggccttaatcacatggctacacctagttgtaggggaagttaagaaacgtcatctttattttggttgactagctaaagattggagattt

SEQ ID NO: 316816 - DNA, 4001 bp, Homo sapiens
aggttttaaaccaagtgcctgcagcctctataagaatattcctaatcattcctaatggagattgctgtctcttccgaagacaagaggaaagcatgggactttttgaaaaggatatctcacaatcactgatttttacattgagtaaaaggggggggggctttaacgtgttctttgccagagaaaaataacaaaattattttttaattttgctctttttaagaggaaagtttaatgttaactgggtatttgcattaatctccttgcttacaggccattattatgctttaggaagaggtattttagttgtttattacagagggagaagtacatcacagccttttaagaagcaaagcaaaggcataaagtgtatattcacttaaaaaaccagtttctttgtttccagattttttggccagaatatctttttgtgacatcttttgaagcccatagattggtctagaatgcagagttcagggaattctacatgggggcccaatagtctccgtctcaaatattcagagttcaaaatggttatcaattatagtaattatgcttataattaggttaatgaaccagttatgcccaaactccaagtgcaaaaacttcaagacctactgatgaggtgctctaaaaagaggggtttatgtaaacaaatccctattaggcaaagtaaatcaagataaggaacctcaccccaggctggattagaagcttgcaggcatctttcaatcacagcaagtccctaatcactcaggaaccacctctgtggtttcgcattagggaaaactgctgccttctcaggtctgagggcaatacaaaaggtgcccccaaaatgctcttggctaaatattcttgatgcttggaaggggtgagggaagacacagcaagaatatgcatatagcttcagtttctgcgaatcacattgtaactgcaagaccataataactgctactcagtaaaaactagttatgtcaaccatgcattagatatcatcacattgagtggagggaaaattttcaaccttttagtcttttgaccttgttccaaataaataaataatttaacgtcccttttttagagtcttagagtggtgtttccaaacacaagctttccttgcttttctgattgccatcaccatccctcttcctacctcaaggtttaataccaccagaaactgtagaaaatgattatgcccagtatccaggtcattattgtttaatcaatgcatctctggagcatgaaaaaggtatctaagccacagctattgtttggattttatttaaaaacaaaataaaacacacacaaataactatagttctatgccaaagctaaattagagatccatacttcatgatcctgttttgcctttaaacaatgtgactttacatgcctaatactgtatgtctggtctaccagagacatagagatcaaaggtcatatttaacattcaggaggaggggcgggtgcagactaattaataaattaatacagcgacgctttttcttgctggagtccagcattaataatctactttcacaatcccaacggacagcaaacatttaagagaaaaaaaagccagagaaagagaaagaacaatcacttaccagtctctttttatttggggagccttagaatttgcagacgctgccagtctgcctttaattagttgcacatcaccccctaacacaaagaaacacaaatccagatgtgtcttggcagctcccaattacaactttaatacttgtaaacaaactgttgggggggggggggtaaataaatatgcggatcaaaaaaaatacctgtaaatggcttttttttcttgttgcagagagaaggaggaggagatggtgttagtggtgggggtggaaggaggaggaggtggggggagaggaaagagtcgagtgtgagtgtatgtgtgagagcgcgggtctgttgtcggtggtctctcctctcccagcgcgttgctctccgtccgtctccagtcgctgtgtgcgagggagggagggagccggggagtctctcctctctctctcccctctctctctctctctctcttcccctctctctcaccctccccccttctctctctgtttgtgtgtgtgcgagtgtgcggttgctgggggaggggagccacagagaaaggcgagggaggaggtgtggaggctgggggcgggggcgcgggggtgggggtgattggcgccgaggtgaggaggacgcagggacgtggacacctactgatgattggctgcaaattacacggggaacaagaggcgcacgcgggccagcgctccttttcacaaatcctctcctcggcagaggagccacgttttccctgctcgcctgcggatcgccctccctcctcgcgcccggctctccggctcagcccagcacacagggctgttgattattttcttttgctctcggagataattgtttggaagggttggaaagagggcgtttccgccactctgcgtgtggggtgtgtgtgtgcgtgcgtgtgcgggtgtgtgtgtaaataaacttgtctgggatttctggctgggttgagaagagcaatacaagaaacagagaaaaggtcatgtttgtttgaagaatgctcttagttcgtacccaatggcatggttttaaataaatttcctggtgtacccaggaagactttaaaaaaaaataccatttagatctttaaagtaagggaaaacggaccggtgtggttcttcagaccctcgaagtactattatgccagaatgtaaaaaatcggtgatatgatgcttggccaatttcaaaatccatctcaatctctgtctctcttctctactcttctctctctcctcccaaaatcctcttttactattccatctggtagttccaaagaataaatcagatttttaactcactgccctattttttaatttcaaactttacttaaacaaaaacttttgtctttcagtctattttagaatagtatgtaattaacatttcacttcttgccacttgggaaaacatagtttatgaattgaaacataaatattgtacggcacgtcaaatataaataaaactcgttcataaatgcagctgtaaattaacctcttcactgctgcctcaaataaaatatttgtggacacatgctatcctactattaaagtatactctagtggaaatagttataagatacagaattatgaatacttttgaataattttttttctaagagcaaaacagtggctaaggtaagttatagagtaggaaagaaaaaacttaagattatttaaattggtgttatcaagcagagtacaagttttgtattaaaattaagtgtttattctagagtaatgcaatattaattgttcagataagtgaggaaaatataatgttttgtttctttaataagaaaaaaaagctgaaaagacattttaaaccattttgtatttgaattttcaaaagatagactttgaccatatcaagacattaccaactatggaggataaattgttgataacaagtttgaaactgtggtgtgtgtatgcctaaatgaaggtgttatttcaagagtgggctactattgcaataggaaacaggtgtattttgtgactcattgattaatatacatgttttgtaatttttttaaagcataagctgtttgattattaccggttatttgacatctatagacaaaataactggagggttaataattattcaagttaataagatatttttattcttgtgctaatgcattataaaagcaaaaaaggaaattttccatttgattattttgttttagctcagcttcataggaaatttatcaggaaaatgtggtcactttttaatgagtgaaaacatgctagaaaaatgatagattcttaaacatcttttcacaatatttaaaatatcagtccaatgttagaaattttgaagtttataaataagcaatgtttttaatcaaataaagacatcatgctttcttttgccaaattttcttttctggaaattttcctttttgg

SEQ ID NO: 316817 - DNA, 4001 bp, Homo sapiens
acatggatgaacactaagacattatctaaggattttaaatgagtagggataaagatcataatactttaaatgccccactgaaaaacaaatgtcacagttcacacctcatccactacatgccttcgtaatactgcttctacctaaaattctcttctgagctcatgggtgcctggagaaaacctacctgcttttcttttcttttttaaaaattgtggtgaaatacatataaaatttaccatcttaaccatttttaagtgcacaccttaatggcattaggtactgtcacactgttgtgcaaccattgctaccatccatccatagaacttttttcatcttgcaaaactgagactttctgtccctatgaatttcactacgctaggaggcacctcatataagtggatcatacaatatttgtcttttccgtttaaaatcctgatgcaaaactctggctttatcagattctgaaaagcctagatctttctttgccatgttataggggcaggaaatagcattcatttaatagatacttgaactcctactatgtttcagacagcaatgactctgtcctcctagatgtcagaacagtggtgaagactgacatccaggcccaaggtcataaagttatgtagcgtcagttttgaaaagtgtagtgaaggaaaagtgcttgggcaagggacctggttctaacaagggaggctaccctacttgcagaggctgtgagaaaaggcttccccaaggaaaaggcatttaacacctgactgatgcgtaggagtgactcagaaaagaagtcagagacctaagccagccagtaagacaaagggggacggtagagacaggttagattggacattttattgcagcagataacacgttttccaacccccaaaaatgtccaatttagactcccatacgcaggaatcagaggctatgaaccaaagccggagatttggtaataggcttcttctgtgttttctggactttttatcttattggaaattatcttcttaaattcttacattcgaaacccacaaggtaaaaagaatatccttccctctttctaacatgggggccaaagtttctctccgaggtcacagctggtggaagggaaggctacttttggaaagatggaacctggcttgccaccttgtccttccgccatccctattactctccctcaatctccggatgacttttctacttatgatcttggagtatgagcaagtcacgcgtccgtcactacttgatgggatcttaaaggcatcagaaaggagaagcgccgccaccaccatcacctgttagttcaggatgcaggtgtgaggcagcctgggggcgcgggcggccggaaggggcacaggaactgcagcccccacgcacctggagactcatccgcggcatccgcgtacccacagcccacgacctcccgctcacccttctccttggtcacgatggagatgagcggcacccgcgggcggtcgctgaagacctcggcctgctgcaccagcgcctcgcgcacgctgtggaagtcgctgaggaccaccaccaggtagtggccgataaagaagctgaagatgctgccgtacacgcgggctaggtgagccaggagcacctgcgggcctatgaccgagggatcaatccctgcggccctggtcctgctgctcagccagctccgccgccggaggaagggaggcagcagcacgtgaccgaagttgcccaccagaggccagggcgtgggcccgggcgggatgccccgcgcccggcgcctccgcagccagctccagcccagcagcgctacgaggccgcatagcagcagcgcgcccccgctggggtccagccgcagcagccccagaggcgcacgcaggaggcgcgcgggccagggcgggtcctcggccggcggctgcgacggccccggagacgacatggtccgggcgccggcggcctcgggttccccttgctgcctggaggagacgcgcacgcagctgcctgacccgcggcgccagtgtcctgctctgctctggaaggtcgggggcgggcagggggtgtaggaacgcccccggattggctgcgccgcgcgcattctccccgccgccgccactcagcgacgcctgggcggaacctggaggcgcgccggctgcctggcggagggggttggcgggctagcaggcgggggacctgaagtttgccccgaagtccggttacgaccctttgcagggtcgggcttggcggtgactgtccctgaaactgggatgctggcaacacaaccttgcgctctgattggctgttggtttcccttgtgtcattcgtttgtcattatcactcgtttgtcagttgacaaacacaaacgcatggttatgaagtgcataaaccgtgttaggatctgtactgagtgtgggaaactggtgaacaggcccgtgagatgggtcggccttagcacctgtgccctgagctgggagaatggggtcaacgccctattcctgcatgcttcggtgtagtagtgaaaagacggggttccttatctaaactgggattcgcagcaccctttcctccacgcagagacagcaggatgctgggaagccgtggaatgcagaatctgtgggtgtcggcttggcagccaactctgcggaagggatgatggcgggagtggggggagcgaggggcgggcagcgaggcacgaggagtcacgttctgagagcttgccctgggctagaaaacttatgcggagagcgaaagctgtgtccattcctgcgtgtggcctgggtgcattagaaaatgtacttaaatccagaaatagcgaaaccagaatttgcttggtggatttaagtagctagaaatatgaaaagaagataaccggttgagggaggggtggcaatattattattggtgttagacaacacttgaaaggctgaggttgaaatattagatatgaattgtataatactttaaaaacaaagtattactttattttatcttctcagataatggctttcctgataagggcttccctttcagtcttgtttaggccaaatcctgtagtttctgttcaagttggattgagcatagaattgtctgtactgggccatttttctagccgtttcatttttctccatacattaaaagtttgaacaccacgctgtacctataaaaatgtgatcaaagaaagcatagtgagtcctcaaataaatacatgatccattttatttttctataaacaagtgatgccagtaggatatgttaaatttcaagtccactctgttctcatattctttttgacatgcttttcatgttattttaagcttatgcaccccaaacaaaaaaaaaaaacctccacacctctcatcttctataattaaccactacttgtgagattacttttctcattttttttgaatttttgaattaagagaagtttttaaaaatttaaactacttgtttgcagatacgatcttcaacatgacattctggatgtcatctgattctagggctttgctctctgaaacagtagccactatatacatcatcccatacaagcaatttaaattcataaatgattttaaaatagttgaagctgtgactaatttaacaactccaacagccacccttttatattgtacaggatgtaactgcacgtgtagtgttttcctaaatctctcattttcactaggttaatagctgtgcggggcagataggaaatctgggctgaattcagcctctcctcaccactatatgttgaagtcctaacccccagtgcctcagaataagactgtatttggagaaagggcctttaaagaggtaattaagctaaaatggagtcctgtggatgggctcttaccaatatgactggtgtctgaagaggagataaggacacagagaggaaagaggatgtgaggacacagtcagaaggcagccatctacaagtcaggagagaggtctcagaagaaatcaaccctgctgacaccttgagttttgacttctagtctccagaacggtgaggatataaatataaa

SEQ ID NO: 316818 - DNA, 4001 bp, Homo sapiens
tctcaaacaacttggatatagtgttggaaattgaacagtggttttcctgatgccaaaatccagaatttgttggtggaataaaaagtccctttgtaaaagacagtattcgtcattgtcttcactctgaaagtgactacaaggagaattactttaaatagtccagtcagctcacaggttgttttgaaacaggtctttattcactagagattttaattactggaatccccaaaacagtatgatgagacttcagtatattactttccaggggtaggggataggggaaaatctatatttttgtacagtttattttttaataccataaagccttaggacaaaaggggtggttagctctgcttttagaattaactgagatgatttttaccagtgtgattttcatatctgtgttggattacttgttacatcagtcatgatgatatttggttggcaaagagttcgcttgatttttttctgtcaaagtatttttaatattttggtaaacactcttccatgaggcctcatcttgtgaagttgaaattacagcattatttttattagagaaaacaagtgaaaatgagaaaaagtccttcaagctttggagttagttaatgctcagcctgtaaaacgattactaacaaataatcccagaggaaactgggttctggtctgggccaattttaaaatatgccattttgggcaaatcttctcatttctgggtacctcaacgtaatccctgatgaaaataaaactctgagatcgagttcgccctccctgacagggagttgtaaataccaggtacttttgagagctttctaacttaacgtgatttttttccatcaataaaatgtccatctctgttttaaaacatgattttaattaaaaaattcactctttaataaacaaggcgtttgacaccctccaaagaagtctgcctgaaggccctgccgtctcttaattgttattatgtaacatcctttaaagggctaaagtatgaaggtcaagcgggaactgaagcagcagtcaagtcttgtgatgccgggaggaagcgtccagtgaatctctagtctcttattttccaaagtggcagcgagaggagggcggctctgggcgttaaggtgttggccagtttaaaaccgctctgtgctcccagggagcttctgttcctaaggcttcccaagccaaggcaggaggaaacggcagggctttgagagctgagcagcggtgaggtgggaaaagaccgagggcaggggtttggaaataccgcatcctgtgctacacacaaagaaaatgctcactttgggatggggcactagcagtgtcggcgggtgccaaggggcaacgactagaactgggagtgcattctccacagggtgacaggctcctctctcctgcggccagcgccacaagcagcgggttcctggctgatcggagggtgggaacggggctgcggaccccgttgcgctccaggaggagcgccggcccttacctcgcccgtccggcttcatcagcagcgcgtggcccaccagtgggtaggcgcgggccaccgtggggatgggccgcatctgctgccatttccgcgcgtagctcgccaccctctgcagcaggctcaggaccagactggcgccggccagggaaagggcactcgccgcgccccacagcagcagcttctgccacacgagccccagccagagccccgccatcgccccggctggcggccgcggggtgcactccgggaaagtgcgggcccgcgggggcgtggtgcgaggcggtgccggccgcacaccgcccacttccccgcgcggacctggcgcgctccccgctgcggggtcgcccggtccccggaacgacgtttcccgcccgggcggcggccagagagggcgccacggggctgttcctgcgcccggcccggcctacgcagcaccgcggcctccacgccccagccgaaagcgaaagaccggaaaacggtttccgggccccagggcgtagtgattgcactggaggcccggaggctgcgccgggaggaggccggcgacacttccggccgcctccggatgcggggtcaggggcgtcggaaaggtcaccgcggcagcccggcgcgccccagcggggctgttctgagggtgctgcgaggttgctctacgtgcgggattccgcgggcgggcagcctgctctggagaggaaaggaaggcgcatccggctcggagcccagctctgctgcgcatcgctcgctccctgcgcaacttgcagccccgggaggcggggcgcgtcctggctcccgcggggtcacatggagcagcgggcgctgtaatccagggaggctttggggacacgttagggaagtcagctacccgtgtgtgtccgctggcccactgggacactgggagctcaatgaggtggttatgagccaggtattttccaaaatacgcaccaggcaccagaccgaggaagccggagccccggagagcacgcaggggcgggtgggagaggaaggcgggcgaggctgctcagcgggtgccgggagaccgcagccgcggggtactcgcagaagagccaagacctgccacccagcccgggaagggagggaagggccgcgagagggtgccccatttcagcctggggagacgcgtgtgctggccgccagtctctcttcccggcagagggccccagtgctgaccccagccccttttccacgctcgatgcttcttacaaagtggccgggcgaggagtgtcgctccccgagaggccaggcccttcctaaacactaaagtgccaggaagatgaaactgaatgtcctggatgcccgctttgcttaattactaattacgttcgttcactcgaagccactgcataagttggccacagccacctgcagggcctctttagtgcagagaaaaacatgcctaaggcttttctccatttgaatttgttttaagtcatctgcatgggctgacgtgaaatagcaagtgaacaaaacaagttgcagaacggagtgtgtaaagtaatgccttcttttggagaaaaggtttctttctctacggctccactaatgtctgcaagtaaaaatactgatcagctctatggagtgggaatgaagatggggaacttacgctttttatttcattcacgtctacattgtttaatcactttaacactttaaaaaataaatatgttcacttagtatctttaagcaagtctcatgggctttagtttcctcctctctaaagggttgaggctgagctataataaggttaattacagctataaaagtaaacaatttgtctacatactggggattctaaaatagggggaggaaggaaggggagtaatggttgaaaaactgtgtattgggtactgtgttccctattcaggtgaggggatcaatagaaactcaaacctcagcgtcaggcaaatttaacaaacctgcacatgtgctcttgaatctaaaattagaaagaaaaagggtttgtctgtatcagtctctgctaacctctgtggataaaaccaggcgggtaacatacaacccctcccctccagaaggagagaagggagattgctctgggcagcagtgagtctcggcctgggcagaaatggtcagaaatgctgcagagccaggaggggtaaaatgagctcagggggcagtgaggtgcccctgcctggagcacagggtcccacgcagtgacaggtgcaggatgaggtgggtgggtatggagccagcttaaagagacctgcactgccaggcttagacgctttatctttattttgaaggcaatctgtgggtaaagaacaaaataaaagccttgtccctttgttcccttagccatctttcttatgctttctttgttaccagatagggcctttctcatactaccctggaatactgaaatttcagactaaaccagtcaggtggctgggagtgcaagaaatccttggcaagacccttctccccggaaagcctcctgacagcagagtacacagtgtcacaccttagaatgtccaccatgaaa

SEQ ID NO: 316819 - DNA, 4001 bp, Homo sapiens
agcagtcctataactgtaatatagaaatagtgatatataatacagtaatacaagtatacatacagagtatatatgtacatctataaaacagttctataactatttagttatataacagttgtataagttagttatatagtaacttatataataatatacttatataataacttatataagtatattagctatataacagttgtataactgcatgtaattatagacattatatatacttacataagtacgatatatgtaataatacctattgttctataggcattctatagctaatatgtagttgtatatagtgtataatatagtaatatcgaagtgcataaatttgcatacttttatatttctatattgggcttccgtttttgcgcagggctgaagggcaaaagccctcgtgctctgccctctcagtaatccccgtgtgaccatgggcaagtgccttccttcagtcctcagttgtgaaattagagatttagaatgcataatctttccactttcttcccgctctgtggttcagagcctctgaactttttaaaccttttaaaatcagattcctttaaaagatgattgctgtctatattcgataacaagaaacttgtgggtaaattgtggtgaaactgtacaacaaaatgttaaaacaaaaatgaacttatttgatagtgtcattaaaaagtaagttgcaaaactgcttgtgctgtttgacccaaattttgtttacacacacacacacacacaacacacacgtatttgaatacctatatgtagacagaaagctgaaatatgatcctccacaatgctacggcagcagctacctctaggtggtagaattacaagcaagattttttttcttctttgtactttattttccaactgttctacaaagtacaatacttttataattagggaaaaaatacatgttatttaacttttaaaaagaaaataccaagaaggtgttagctaggcttttgtaaaccccaacatctgagaaacattatgttttgtttgaagcatttgcaagtgattaaaagacactttgaaactttacaaaagcttttaatgaagtttaatgcattttgtttcgacggagaagcaggcagaggcctgggttctagtccccaaaagccctcccgggtcttcccctctctgagtccccagatctgcctctgaagatcgtgctcacatcagctggcatctgttgagtacttgttcctgtaggcttggctctgtgagccctgcctgtgttcacacctgcctttgatcgtcaaagccactctaaagggaggggtgctactgtcatcccattttacagacaagaaaactgaaaggcagaggctgagaaatttgcccgggtccctcagcagatgaggggcggaggccagttctgtgagccacctcttagggcacactcctcactaggctaacaaaagcaatacacaagcttcattcctccgtcctccttaactctgatggggagctgtttttctccccatcctcccactcctttttttttcttttttcttttttttttttttttttttttttacattttacaacagatcctttgatatttgctagtaagtcacaaaaattgtgttgtctttactttttcttgtgttttgaagaaagcaaaccattggtatcatatttaaaaggagatgaataaaacacaaatactcctgagatttacatttactagaaaagaaaaatatccttttctctctctctctcttttttttttcgtgtaaaggcaagggtttaagaactgggtctgccatgcacccctgtcctgagcgggcgggggactcaccgagggctccgagacctgcaggaggttgaagtcgcgggtgatctcctggctcagggcccgcatgcgggagtagcaggtcgggggagtgggccgcgcggcgggggctcccgccaggagcagcagcagcacgggcagaggcccaggcgtcctcatggtgccaggcgctggtgcagcctcgccgaccgcccctttatgcaggctgggggtggtccagggcggctccacgcctccacttcctgtggggccagcgcaggctgcggtccatccagggtggcagagaggaagccagcacgcccaccgggcagggtcgggacaggaatcctctcagacacgaaagccccaggttaagaggaggggctgcctggaggagggggtgacagagggtggctttgcctcccccacactttcagcaagaaatttctttctgcacagggacttttcctgaaaaggcaggaacagcagatggagaggggtgggggataagaggaggacagagatggaaggaggggagggtcagaggagaggagtgggcagtcaggcctgggtttggatggcacggtttgtcaaaatggatatagtgccaggagggaaagggactagcaggggatgactgagcatccctccctccaggcagcccgcagtggagcagggatgcagagctgcggtcaggccaccggtgtcctcgtccatcaatcgctaaccaggtaggtgagccttgggccagggcccccagcctctcagaagccgtgtgtgtctctcggtccggaggatgggctcactgagcggccgtatgtgtggggagtgtgagtacccccaccctcttctacctcaagctcccagcacaggccccgagggagagcagaccctcaggaagggttagttttcaagaagtgcatctccctcagggctaacttcccaagacagtggcaggtaaaggtctaggctctccacttagacgccgtgggtgcaaagcagggtcaccgccttctggctttgaccttgggcaagtttcttcagtgtttcctccatctccttatctgtgagatgaggctggtgagagtggctcactcaaaaggccatagtgaggaatcaacaggatatagcatgactgagcaagcctcatgccaggcccattgtgtgtttccaagtgatcggagctaatagcactgtctctgttaaatccagcaattgtctctgtgaggtaggtgccacagaaaagagtcccattttccaggtgggaaaactgaggctcaagagttccagcaacttgctggaggtcacaaagctggaggcacatgggttgggatgagacttcaggccctgtcctcctgccattcttccatcccacagggcaggatgggtgaggagcaggactcttgcaggcagagatgagttggggtcctcaggctgcccaagatcaggcaacaagcaagaaggaactgtcaaaagggagaagattcttccttaacactgaacatgacttacataccagcagccaccaggccagctgccattgggaacgctatgaccctcacagccagccaatgaagtgaatggggttattcccaattcccaggcgaggaaactgagggcctcgggggatgtgaagctgggaagagcagtggagccctggagctatgtctggactttcctgcctccaaagcttcctccaacaaaggaggaaaggggagcatcctgggcaagctccacattcccagaacaaaacaaccaaagatgcagcccacagggatgggtgaaccagagcatggcatcctggacacagggctggactgaggatcaaccacagggatgaagcccggctccagcttgtccccactgtatttgccaggagaaatcccttctcgacctggcctccattccctgtctgtaaacaggatagcatcacgctgggcgatgtctgaggttccttccagccccagtgttttatttatctagtttctggtggtaaaagccctgggcagggactgtaagctgtgccttcctgttttgtaggtgagaatgtgttctctaaacacctttagcaagatgacatagggaccgcggccttcgggcagaactgtgtgtgcttggaggtggcaagtggaggcacagatgtgttttcttctgggtgaaggagtctccacactccctccatgatagtgcctggggcatgggcctc

SEQ ID NO: 316820 - DNA, 4001 bp, Homo sapiens
aagaaccaggactgtagagcagttttcccagataactgcaggttgcccattgctatagaaatcatcctcatgtttattaattgttcacgccttctgaaatagggaaatctggccatgaatgtacccttttttttttgcagggaagtggtgtgactcagttttgtattcaatgtctattctttgcacatggaggaaagacacagtcctattccacccgtgggtttcacctgtagttgcttcttgctgttgacatcatggtggggcacagagacagcatctaattcatctttgtcatctaagtgtgttcccacagtactcaaccatagactctgggttctaggattgtttgtttaactaaaggaccagaattgaatatattcctctatctcctcctttggggttttctattacagtgggctgggaatacagttaacagaacatgtaaagcattgtaacttaatagttcaataagacactgagggccacagttcagctttagcttttggacttggtgacacctgtgctggatgctcacagaagggccttttacctcttctgtttggggattcaatctagagggatagagagattctagagctctggcttcctaataaggggagttttctttaatgaaaattccaggtgttttatctgatttgccaaatgaaagtagagttcaattccgagacctcagttttataatctaaagacaggaattattaataaacttttacagtaatacaacataaaaagatacaatctctgcagccttaacacagagagatttcaactctattttggtttttctttggtttcggacatagcctgtggtaggttggatgcccagctttgctatgtaattgatgtgtgactagcaagcaagttattcaaacctgtttggtacttgttttcatcctttgtaagatgaagatgacaacagctcctatgtcattggattgctatgaagagttagagctatttgtccaggcagaaggtaaaggttttgcctctcctcatgcacaggtgtcaaagccaccttcattgggatattcccagtgcattaggcagtttctctgggaaatccccaattcctctcttgtgtaatacttgtttcttattaaatacccggatgagttgtcatctgggtcccttcttaaagacagagctccaatgactccacctacctatgcttacctgtttgaagcagaaattttatcctcttcctggattgttggtactgaaaggctcaaagttggctctctggacatacatacgatatcaaatctcacaaatgcagtatcaggagaaagaaatatacaagcgagactgttgcaggaacttcctcattctctgtcttttgaaaaagtccctctcccttacagtagggtaagctttctgtttatcttaccagaaacacagtccttttactgtccctgggtcagtgctagaaactcttgaacagcgcatttattcataaaccagagcaacatcaaggaagccaggcaacatcacctctatatcccaattctgtccctcttctcaaagaatgtccaacatttgatttttttccctattttctcaaccaacttgttttcacatctagaaaaataatgcctgcttttccaatggaattagccccagacaagaagatacttaacagatacaaatgaataaagtggaaaaaaataaatggttgaggtggcagagggcaacaaggcactgaagatagtcattaatcaaagcatgcaggtgggagtgcggagtcaatgtccacccactaggtactttgaaaggagatctgctgccttaccccaagtcctggagcagctcagcctctccatcggatctgctccacagatctgagggatcctgggtgctcatcttcccttctagaagttctgctctgcccattcgcgcccttcacagaggtagagagagagacacaactgggctgctcctgacaccttctcgctctgtgagacagcagcctgctatggctctgagtctccaaggcaaggaagtgaaacttggttacttactcctcccaccaacaccaccaccctggcctggaggcactggcaggagtgttctgtcagtcaggaagtatgcaaacttaggtagctacctctgaggacacccacactacatcacgcaacaggcggttgctatcaaaggaaatgaagaggcaaccaccccacctgggattggacaacagtgcaaactgcttgtgtgaggccaaaccctagcttctccctaatgctatcagcctctggtttgtagtggaggatgcgtgcactcttttaccccatcttctttctgtcttacacaccaacacagggaacactgaggaagcttctctatcaggaacacctttagagtggatagaaaaagcagaagcaaaccacaaattcgaccctgaagtttgatgttttagcacttttgcaatatttctgcttgtttacccagaccttctaatatatcctcaatgctccgaatagggatgattcagagacaattattgtttcctccacagaaaaagaattaggagaggagaaggtaggaaaaagttacaaggggccattctggtgcccacctaatggggcatattagaactcctggagtctttttttttttttttttttgagacagtctcgctctgtcactcagtctggagtgtaatggcatgacctgagatcactgcaacctccacctcccagggttcaagtgattcttctgcctcagcctcccaagtagctggtattacaggcacccgtcatcatgctctgctaatttttgtgtttttatagagacagggtttcaccctcaggtgatacactcacctcggcctcccaaagtgctgggcttataggcatgagccactgcacctggcctgaactcctagagtctttgagtgccacttccttcatgggcttactcacacctgcatggctttgtgcccagattcatatgtagagcaggattctatctgcctggaatgctaaaggtaaattgcagtgactgaatccttgggaagtggaacaaagtgcagtatcaaatgagtcaaggacatatgttgcttcctgccttttctatgtacctacaggtctctctctccctctccctttctctctctctcttcctatctctactccctgactcattcagcactcaccacagtgctctgtaacttgttctcacagtgtggcctgaggactaaacagcacagcagaactgttcctaaaggactagatgattgcaaaaggctgctgtgcaatggttctatccttcatcttcctccctattaccactgttcacccgggatcggtgagacccgggtaacactggttgccagtgggaagttcctgagtgtctggaggcagtctgctgaagactaagctctgataatacatatataactgactaaatgagcacttaaattcttttggctacagtttgctcacagagaaggacagggcccacttgaacagagaggccagtgcaggccagggagatactgaatatgcatacagcagtgacaggggaacagcctgggcactagagttcctgttccctctctagagccctttatttggtgttttagtatctatttcattcccatttttagcaaattctggttgttctttttcttaacttttttggaagtacaagtagcagaattttctaagatcgtcctgcttttctggctgaatcttcctgccttttgcccttcctcatgttgctgtcctgtctgttgccctctcctttgatgtcattgtcccactttgtcatttactcaatttttcacagtatccctaccaccccgcccactccactaactacacacttagttttgcagtggtaacagctgcaggaggcttgctagatagtttcaacaaaatgctggagcccatccctcccgggacatctattgctgtgtaactgaaaggggatttagaatcttgttctgggccgggcgtggtggctcatgcctataaccccag

SEQ ID NO: 316821 - DNA, 4001 bp, Homo sapiens
tggctcacgcctgtaatcccaacagtttgggaggcaaaggcgggtggatcacctgaggtcaggagttcgagaccagcctggccaacatggcgaaaccccgtctctattaagaatacaaaagattagccaggtgtggtggtgcatgcctgtaacccagctacttgggagactgaggcgggagaatcgcttcaacccgggaggcagaggttgcagtgagccgagatcgcgccattgcactccagcctgggcgacagagcaagactctgtctcaaaataaaaataaaaaaatatatattagaaacgtcacaaagcaaaattatgggcaacacaaatgttaccacattcttaactagcagctgaatatctacaaagtttgaggaattaagcaggagaatggataaggtatggcatattaatacaatggagtactatagcaacctgtctgtgccgtagtttcctcatcttaaaagaagatcaaagttatcctacagggtttgtgagcagtaaacgaagtaaagtgcttagcatggtgtctggcacataataaaggttaattaagtgcaagttactattatgaacatatcaatatgaaccacagcaatattgattgaaaaaagccagatgcacatataattattcatttaacggttaaaacatgcaaaatagtacaatatcctcattcagggatttattcatgtcattaatatattaaaatatgtcattaagatatagaaagctgcatggtaaaagttaacagtaaattcagaaaatccattacttcttcggagggcaggtaattcaaaaggagaaagatgtacaggtggctttagtaatgttctatttcttcagctggcagtaggttactgaggtgtaggagagggaaaaacggcttccctccatcctcctaggttctttggctgggttacaaattaacctgacatagacattaacaagaaaaaaaacccgtacttaattacatacgcagaggagtcccaccatggtcagatgattgaatattatacagcatcctacgctactcaagaaatgggggcttgcggctttctgggggatggtggccacaaagttgtggaaaggtgaggggaggaaatatacggtgaataaaagttgtcttggtatgcagataagatctcccaggtaacaaaaattatcgcagagctgccctctttctgatacagatcctttactgatgtatatttcctctgtagatgtcaatttcttttacaacaggacagattttcagagcgactcctgtgtctgcattttatcagaataccagctcaaaatatactctagaagtatattgtagggtggcatattttggtctcctacagtcctatttttggatggtgcatcctgagatccaacagaagttctgtctgatataatttcatttaaaatttaaaaacctagttcctactcttctttattttaaccactacccgaaagacctttccattctcttgagttctcccttaatacactgtccttatgcacacttgtaaacagggcctacacagctgcacatctagaaacggcagcagctaagttagcccgcaccccccttcgcaacgatccccggactgcctgcacgccctgtggaacctcgcagtcggcttcaccagggcagggactaaggccttcaaaagacagcatccgtctccactaacctcgggtcgccccgctcagcggacccagcagcgtcgtctcccttctcagaggtggccgggcctccggaacgcgctacgaactttcctttgtcgccgtctctcgaagcggagccctcgtgtggggatcccccgcccttcggccacaagggaggttgttatcctcggcagatctcccgttctcactcttggaggatcgctttttctttctagcctcacgctcagccgcacgacccagccaggcctaacgccagcagcccttcccctccggtggcaaggccactccgctcagctcccgcgccgacgctacttccggccgagtcaaggcccctcccccttagaaacgccacttccctccgtgaaaacggctggacaaggttgaacctagacgcatgcgcccaaagcgcggggtgcgaggtgggtggacccatcgcttcccgctctcttctcccaaagcgcttacggcagtctcgcgggatttccccctctcgcgggaattatttgaacgttcgagcggtaaatactccctggggctgtcatagaagactactcggagagcgctgcctctgggttggcgggctggcaggctgtagccgagcgcgggcaggactcgtcccggcagggttccagagccatgggagcggaaaggaggctgctgtcgattaaggaggcctttcggctggcgcagcagccgcaccagaaccaggcgaagctggtggtggcgctgagccgcacctaccgcacggtaagcgctcccggccccggccgccgcctctcgcccgccccggcccaccctccctcaggggccctccgtggccctcgggctcggcgcaccgtgactccagccttgttcaccttcgcgactcacttcatagggatctgaggttcggagaagtcagggacttacccgaggtcgcctgggcccaggccagaaagcctccgaagcctgggcgtcgttcacacgggccccgccttggcttttctgagccgacacccccagcttctgggcggcgtggaccgttattccttagtccgatcgtgaacgtggagagaaacatttacgaccaccgaggcgatcagacatcaaatattgaaccgcagagtggatcctgaatgcgggggttcagtggtcgttgcccctggggtcatcgctccccgccgaacatcaaatgattctacccttgtcctacggttacgttgaatccaatcaccaaataccaaattatttttagggcctggccattcttatttatgtacatactatttgtttgttttgagtggaaccttgagaagaatagaacaattaatttggggaagatgaattatcttgaggtccaagaaaaattgtgagtaaacatcacagggctttgaggatatgagataggatgtgcaagttatctcataaagaaactgctggtgataggaaggcctgaatatgagaaatataaaagccagtattgattttgggttgttgaagaagcgtatttgtaacgtactggtactaaaggcttattgagaatcaaagatattgaaaaaaatatatcaaaggaatcttttcactgtcaaaagtcaagcttgtgtactcccattatagcctggagagaaattcatgcaaattgattgccctttggctggtttggataattaagagtttactaaataaatattttaatttgtctgcattattatggctagtgctttcatcagtcttagggtgatgttgggaataaaggatttttatcggtgcagtttatgaagggtttcttttgtctttcagatggatgataagacagtttttcatgaggagttcattcattaccttaaatatgttatggtggtctataaacgtgaaccagctgtggagagggtaatagaatttgcagcaaagtttgttacctcatttcaccaatcagatatggaagatgatgaggaagaggaagatggtggccttttaaattatttgtttacttttctcttaaaggtactatgaaaatgatagctttggggagggattttagaaaattttgccactttaaaagagtcgtgggagtttgtatgtttttgacaatgaaatatctagtgattgaaaaaacctgaatgagtctacctttcataggaaatattagaattatcattatgattaaaaagtggactttaactccagcattaaatttttaatgacctctttaaaccagttctcctttgtttattttaaatgagttctgtattttagaagcctctacaaagaggactatgtaacttagcaaagacttctttcagactgttcattttgagactgtataaaatatatatatt

SEQ ID NO: 316822 - DNA, 4001 bp, Homo sapiens
ttcaagtcaccataatagaaaccggagctgctgtaccttacattctgaaaggtacctcaacaaaagcacatcaaggactgtttaaaacttctagtatttaaaaagatccatctttccttccaatgcctatggatgataacaataaaaggagaaccttaagagatctgctattgagtttgagaaggccaaatttaatgattccaaactccagccttaaatatttctgtagagactctgagaaattacctctcccttgtctccactcccactggcttcctcaagcgcagatgcctgggaccctgtatgattagtcaaacagtcttaccagtaccatcattatgcttctctaaagggctactagtgaaagaagctgctttaatttattttagtttttgccaatcttcagtccttagaaaagtcttaattatttaaaaaaaaaaagggttggggaggtggttaactgttctaaggcattcaacaagaggaaacaggtaccttttatgaaaaggactttcaagttaagtccacagtttaactgaaataactttacaagaacgtctccacataaaactcttaacaccttacccctggcagccggatggatgcgatctatatacaacacgtctcttaaaatgctctcacagaaacggtaataagatactcttaacttccttaagtcaaatccacattcggccgcgctgccacctgcagaattagctgaaggggaaacaataaaggtcctgccggacagccatgagcagccctggtgctgctccccggatgcccccgagccgagaagcgaaggccacgctgggaatgtcgtcctcggaggcagagtacggggaagggatggttctgagcaggtgggcatcatggaggctccagattctcgtgtagcagtcctggcccactgccaccacgattccctcttcctcgtgcacatgcaggggcagataggcggactcattcacgtgaccttcgtactgccttacacatttagtggccctcagatcccacagcttgatctttccagtcatgtctgatgccatcaggcattgctcttcttggaggatttgcacagaggtcactgctgagtcatggaacaggcgagtggccctccaccccttgcctcgatttctacaacgcagatcaatggcaaagatctccccggagcgacagccattaaacagcaaaggagccgtactagcaaactgctgggccaagacatcactgctggtatcaaatgactgctggtgtcccgtcgccacgctggtcaacaggacctgctgagacaagcctgcactaaagcagtgatatgcccgggtgttgagggaccacgcacaggaccaggcctctgggatctggaaactgcagagcatgccaggctggttaactcttgtgtgaacacttaagaaccgcgacgctgggagcagcactgcacagcttggagcatctgtgattccctcgaagcacagcagaacgtgagagtccaactggttcagcgaggcccagcacagggacttcaccttccggttggggacgtagaggtttctgagcacgtacacgtggaacgaagggatcttcagagttcgcaggctgatgatgccgtacttggagccttcgacttcgacctggttcactacgaagagctggtcgctgttggtactcgccagaatgaagttaaatcggtcgctcgccaaagaggagggatccaagctccgaatttggacctttttccgctccatgcagctcacacgcagctcgttggctaaacgggagtaactggtgacgttgaggaaacctagctggctttttcggagcatggaagatgcattaaatcccattctggctacctttttcagcttggcctcttcctcgaggagtcgcagcctttcagcctccatttcctcctgcggaatgttcctcgtgacaggaaattctgcaggatgttcttctccgtgacaggatgttcttttccgtgacaggaagttccgtccgggtgcaagcggaagtgttgctactttttatcctctctattctaggaggaagtccattgttacagatgtgtattacaaatctcttttcctactctgtgggttgtcgtattctctcagtggtgtcttgatgaaaggaagttcttgatgttaaattttttcctttctctttttgagacagggtcttgctctttcacccaggctggagtccagtggcacgaccacggctcactgcagcctggaactcctgggctcaagtgattctcctacctctgccctacttagctgggactatgggctcacaacaccatgccaggctactttttttgtaaagatggggtctccctgctttgccgatgctagtctggaactcttgagctcaagcagcctgtccgcctcagcctcccaaagtgctgggattacaagcatgagcccacgcgccctgcctgtatttcttatttttttattttttattttaagacggagtctcgctctgtcggccaggctggagtacagtggcgcgatctcggttcactgcaagctctgcctcccacgttcacgccattctcctgcctcagcctcccaagtggctgggactacaggcgcccgccaccacgcctggctaattttttttgtatttttagtagagacagggtttcaccgtgttagccagatggtctcgatctgctgacctcatgatcggcccgcctcagcctcctaaagttccgggattacaagcgtgagccactgcgcccggccgcctgtatttttaaaatacagttagagaccagcctgggcggcatggtgaaactttgtctctaaaaaaatacaaagattaggccgggcgcagtggctcacgcctgtaatcccagcactttgggaggcgcaggcaggcggatcacgaggtcaagagattgagaccatcccggctaacacggtgaaaccccgtctctaccaacaattaaaaaaattagccgggcatcgtggcgggcgcctgtagacccagctactctggaggctgaggcaagagaatggcgtgaacccgggaggcggagcttgcagtgagccgagatcgcgccactgcattctagcctgggcaacagagcaagactctgtctcaaaaaataaataaataaataaaatacaaaaattagcggggtatggtgcacacctgtagacccagctactcaggagactgggagggaaaatcacttgagcctaggagtcttggagggaaaatcacctgagccctgaaagttgaggctgcagtgatcaccccactgcactccagcccagctgggagacagaataagaccctgtctcaaaaagaaagaaaaataagtaaataaattatgaatttatccaaattgtccatttgtttcattaatggttagtgtctttcatgttctgttcaggacattagtacctattacatgatactagtaaagttttggggtgtcttcaagaggaggctgatatctccagtccccatctggatgtttcctttgccacaaagcttgctgactccccttacgctatgaatttccaggaattttggaggactggggagagttggtagggactacagagaaatccggtgatatctggactatggatcctgtcggaatctacaggccccagagctgggatcacagagagcacaggagattgaggcccacacacttgccatggaacataacatgggacaagggatttctatgtatcagaagaatgtgtttcaccactgccaaatggaagtcagctgacagatgcagaagtcttgcaaagggctatcaaagcatagaggactgcttgatactgagttatcagtggggctgttaggaaccccatatattctaacaatgacctacagaaagcagatagcaacatggcggcagtcagacatttaaggcattgcctgttttccttcttaaacctcctgaccccaccatcggaagagcaggcacatggaaaaaaaggggtgtgtataaagaaagttggaactac

SEQ ID NO: 316823 - DNA, 4001 bp, Homo sapiens
aatgctgttggctgaagagaggtggttggtcattgaggtcagcgacccggagtagcagcgtctcctccgtgctcagcggcggggaccccgcgtccgtggccaccagtagtaactcatacagatcgcggctctctctgtccaggggcccctccacgcaaaggaaaaatacccctggggggccgccgggtagcaacgcgaagtctccctctccgccttccaaggacagagagatgctcccgtctccaagacccacaccaagctcccctgtggcctcatcttccttctcccagtcaccgtccgcgtcagacaccgagacgcgagccacgtagtcgcccggtcgggcgccttcagagacacgggcgacgcctccctctgtgagaaagagcacgtgaattgctggccggttgtcattcacgtccagcacggcgatggacacgcgcaccgtggcaacctcaggctcggcgcctccatcgcgggcctccaccaccaactggtgccaggcctgtgcctcgcggtccagaggtctccacactcgcaccacgccgctcagctcctccaccgcgaagtaggccgcgtcgcccagtgccccgccgccgctacccgccccaggcacttgccgggcgcggacgctgtagcgcacgaagccattgggccccaggtcgcggtcggtggcgcgcacgcgacagacctcggcgcccggctgggcgtcctcgcgcaccgcggcgcggtactcgtcctgctcaaagaccggcgggttgtcgttctcatccagcacgcgcagctccacgctcaggaggccggtgcgccggggtcggccgccgtcccatgcctcgatctgcagccggtgcgccgccgcctcctctcggtccaagcgccgcagcagcaccagatctagaggctccaggggtgacgaggagcctggcaaaagcggtgacggtagtggccccggagtccggtagcgcaactggaagaacgggcctgcggggtccttgggcaggtcggacggttgcaccagggtgtagccctgagtgctgaacagtccggcgtccggatcgtgggcaactggcaggcggaaggcggtccctggcgggctgagctcggagacgtcgagttgcagggagtcgaggggaaagcggggcgagtggtcattcacgtcgttgacgcgaatctccacctgcaccacagcgcccagcagcgtggcggcgacgaagctgtagtggtcccgccgctcgcggtccaggcgccgcgcagtgcggatgatgccggtgtccgggtgcacgtggaagtcgtccagcagcggggagtcatcggagtcctccgacagaaagaagccgctcccctcctgctgctgcgcggccggcagcccggcgcggatgtcacctaccagcgtgtccgggggaagcccctcatctacggaaagggtgaggttgaacaactgggcagaggagcccgaggccgcccacagccacacgtgcaccaagagccagagcagggagcgctgcgtcctggcgccgctgctgcctgaccgcccatggggtgtatctctcctcccggggagcagaaggagcttcccgaccggagcccgccgctgctgacgcccttcgcccatcttccgcccacaagggctcatttctcctccagctccttgggaaggctctcgggtaactgccagcttgtggcaggatcgcagaaaaatccaggagcctcttcagtgtctgagccagagaagaaaagactttgtttggcaaacaaaccgacggcccaggaattcccgaggttacatctgcaactggtgaaagcgtcctctgcctgcagctcacgcagacagggaagtaagctctagctgcctctgccgcggcagccacctcttctgcccctggatttctttaaacgaatctcatctctttttctctctccttttattccctttacatctgttccttgttctactcggctggttgttcccccctggtaaagtcaggtgcattatttcttttgccaaaaaggaggagattatatgaagcgcgcacacacaaggagaggatggggatctggccggagtagggggtggagtaagggcgtggaggcagggagtcagggcgctggggaggagggagagagggaggggggaagggaggtctgcggccctgtccgctgctccgggggcggggcggtggttccccactgtgtctccgggcgccagggaccgcgcgactcctgctccgacccagcctccgccgcctgccttcccctccctgccgtgtgatgcggcgcacacgagggcaaactccaacctgcgagccgcgctctgcagcagggcggaagaggagcaaatgcaaaagcactgggagacgtgcaccgcggggcgggtgggggacgcgcaggcggggcgtctgcctgggcttggccaagtgccaagtgatgatgggtgcggggaggtgagaggagcggcctctccgcggcctccccctccatccgcttgaccgtccctctgcaggcctgactcttggctcgcgctgagccaagagggtagaggttatcatcactttggggtgccaaacttgtgttctccatttggcgagagggactcccgtccgcagcggaaggacagatggagtcaaaggccgatgcatagctggggccaggatggctttaaaggggagaaggcggaacttggaaaagccttccagaaaacccgagaaatctgtggcacacatggtgcaaaccacactttattatgcgtgctactacccagcgacgtgtgagcctcttgtcactcccctctgccaccaggaatgacgacaatatatccgccctgagaaccctttttctacattcagcgccatcataacacttccaggatgtctgacgatgctgactgatgagcagaaagccctggtggctgacaccccgcaagccctcagcgctcccccaccacccctaggcaaggaagtgtgcaagcgggataactctacggataccactttcaaaactagcttctgtctgagccgaacgcaaatgccaataaatagccatagtcgcagatttcccttcaattaactataataatcggtagaaactgatcaatggcctctaataaagtacgcctgagaaaagactctctggactcttaaaaatggctgaccatatttagcaagtggtttctgcaattttgcatttgggcctgagagaagaattaatttcctagataccgtttctctcctttagggaggaccaaaagccctgcatagtggtttcttgcagcaacaacaaaatgcctttttaaatgtgcaacggaggtgtatgtaattgctaatccacagccacaccgttatctctacctgtgaccaaataacaataaaataattgactttgtagcatatatgttaccgaaaatggggacattattaaaataaattcagctttctttcccccaatgaactctctttaaccattaaagagatttgttatgagtctttagagtctttttatcttcagtctctgcatttgcaccctaactagtccctcccctcccactcttgcccctttataagtaattcttttctgtttttgctattgttgttgttgttgctgttttgttttctgagtcaggatctcactctgtcacccaggctggagtgcggtggtgcaatcatggcgcactgcaacctcatggactcaagtgattccatcacctcagcttccagagtagctgggactatgggtgcccaccactatacctggcaaattttatattattttattaatttatttgtttattttttttacttttgtagagatgaggtctcactatattgcccaggctcgtctcgaactcctggggccagtcttcctgcctaggcctcccaaagtgctgggattacaggcttgagccaccgcaaccagcctataagtaattcttgaacaagcatctggattaatgtttttaaagctgtctcaaatcatattacctcctgcttagaacctgaaatgattccatt

SEQ ID NO: 316824 - DNA, 4001 bp, Homo sapiens
ggccatgtgccatggtttgctaacccctgatctaaagcataagaagtaatctttagaaaaacagagtcaacacttcaggcccaggaataccacttcagaatgacctcagtccagtgcatatcaggggcttgtttgacatcctggatttgagctggtctcacagacaggtttactatccatgtattgctgtctctatgttctattcctaaagacaaaggttatatatatatatatatataacctttttttaaaggacctaaactatttgacttcaaaatgctttcactgagtgaaatttttatatcatgactttatattttacaaaaatttcattttaatcatttgtctttggaaaaactaaaacagaaaatggatttattacaggatccagtaattctttaatcgagatccttttaactttaaatctaatcacactccacgacccccacccctcctcgaaaaacacacacacaaatcaaacaaaacaaaaacctctccatggtacctatgctaaagttgaaggaagttaaagttagaggaatagagtgtctgcacaggagctctcattccagagctcctctctaccaaacaccctgtttcaataaggccttgtctgccctcacaggtaagatactcatctttaagagaataattaatttatatttatggcataaaaattaggttgctggtagctgatccacggactggcacttcaacatctttttagattacttgcttttgagttattaaattatttcagtgaactgacctaggctgttgatactctttttttttatttttttaaatttttttattttttttcttttattattatactttaagttttagggtacatgtgcacattgtgcaggttagttacatatgtatacatgtgccacgctggtgcgctgcacccactaactcgtcatctagcattaggtatatctcccaatgctatccctcccccctccccccaccccacaacagtccccagagtgtgatgttccccttcctgtgtccatgtgatctcattgttcaattcccacctatgagtgagaatatgcggtgtttggttttttgttcttgcgatagtttgatactcttaatcctgtggccaaagaatacatggaaatactggtagcaactgtaagtaactggctgactaatgctcaaaagttacctcacttttatatcactaagtcattcacacacacacacacacacccacacatgcacacacacacactagcccaaatacacctacatcatctttcatttccagatactcctgaaaaacaagttatgacgcctactttcccaagttcttactatatgacttcaaattctctttttaactgtttattattagcattaacagtgttagtaacaagtgaagttctcttagttctggttcatatgatcattgtcatgtacaactctaactattcaggacaacaatcattttcaaatacatttgtactattcttcatcaccaaacaataataaaataaagagaaagaaaccatatgtaaacaacaaagcaatccatgaccgaatattttcatagtattcttacaggtatctggaaacacacaaaaagtatatgattagaaaattttatttatccaaaaatgaatttggattacaaatactatatgtctatcatagatattgataacgtctaataccataaaactttaaatgacaaacaaattcatgagaggatcctagctaagtatttcttccaaggctttatttccctgaagctcagaagtaaattctttggccagtatgaatctcatatgtaatttagcagaaggaacagacttataaaagctgatacttatttttaatttttgttcttacctctgagatttcacaatggaatttattttcacatacacctcatatacacaggcatcagtactttcaaactgctgagtaaacatcttcttttctccgtcttcattctctgatttcgttatctcatccagtctcatgattttaaatatctcctatatgagggtagcttcaacttcatgtctctggcatgaaccctttccttgtgctacaggttcacatatggaaatacctccatgactttccacttgcagcataaagaaagcgttcaaaactaaaaataggcagatcagagagtcactgatgctgagtttgcaggaggaggcaaagtgctgaaggagaagaggaagagttaaaaagactgaggcaaaggagtgcttctctaggagagggaccatatgcaaatggcaacaaaagtccaggcaaaaagacaaggcgatgggcaactgggccagccaacctcatctgacatctcaacaccctctcgacaccttatgggttggattgtattgcaagaatccaaagtaaaaggtgactttcaatgttttgggggttctgtgtgttcccagcagaggaagaaaacaagatatttttctccctgcaatcacctgtactccatcaatgtgaacagcaggagatgaaggcgatgggccacgtgatggccctgacctgctgaaagctaaagctcaattccttttgaccaatattctaactcaagatagaagaccattgtgcagagttacataaatgttagtattcccagagaaaataaaaatctgaataacataccccaggttatgttattctatatactatatactatatactaacaggtgttctctcttggggtacaatcatgggaaaagttaacttataaaatgacaccgttttgtaaacaatgttttacactgagcctgatttactttatatacaccaaaagcttccacgtggtatgattgttaagggccagcctcttcccactccacccacaaagatacattgaaatgcccatgaagtccagagaggagagctggttgttgatttttttccaagcaattcacatttaagcatctccctcttttttgggaatgagtatcataattcagaatcatttgacttttatcttttagctgtaccttcccatatatgttttgtaaaacaaagagatacccagaatttatgcacagaggtcttcccagtggaaggatgcattcccagatataaacatgaacaggtgcactctaaactcaagggaaacccatcgttttaaaaaaatatataatgaaaaagacaaagagtagggaggcaaagtgagtaagttcacaatataaccttaagggctgtgatttccaatatggactgtgactgactgcactatagctaactgcttcagttttcacacctgcaaaagggtcatagtcacaatgggcaaatattaaggtttggaaacctattctcaatttagcagctttgcttcatggaggaaaagagaaaaccatgcacatagatctaactatggaagtgtgggatgcaccgttttgtataccagctcccaatataatcacttttacagaactgtatatttattgtaaacatactatttaggggacttcttattacattttagagtcccctttataaagacttacaggaaaaacatttcctcagggcttagtgtcagggaaagtcaatgctgcttctcttgatcagttaggaatgtttctaacttggggactgtttgagtcttatcacttcattgatgcagctttaatacatgtgcataatcttgcataatccacttccatgtactaaggcttcctgatttcatctcactattccacttgacttttttcctgatttgtttaattttatcttcatcttactgagttattgtagttttgttagtagctcatattatatttttaagtagatggataataaaatacattaacttaacaaatggtatccaacagaaatggatgttacaagcatacagctatatgattaatacctgattaaagaatttaaacctaggaaatgttttcagcccagaagagaccaacagataactctaaacatgccactaaaatgaattatgtgcaaagcccattccttgcaagttagaacttctacatgttgat

SEQ ID NO: 316825 - DNA, 4001 bp, Homo sapiens
agagtgcagtagtgtgatcatggctcactgtggccttgatctttgggctcaagcaatcctcctgcctcagcctcctgagtagctggaggcacaccaacacatgcaactaattttttaatttttttgtggagatgagttctcactatgttgcccaggctgatctggaactcctggactcaagtgatcctcttgcctaagcctccccaaatcctgggattacaagtatgagcctccatgccctgcctcaaatttacttttcagatggctttgttcagccactttctcctgtctttatatatggtcttctttattcagtaagcagctgtcagagattccatactagtaaacatgcaccctcaaataacttacattgctaattatatcatatggtctttctactggtgctttaattctggagcaatgaaataagaagtcctctttgagaatgcagtttttctattcatttgaatgcttaaagcatctgcttgcctggcctttttcaagaaggtacagtgctttgaatgtggtaagaattttaaaaaatttgctgtatgcatgaatgaccagcacccaacctggagctaaaaaaatttttttttaaatctatcaaaacaggaagtttcaggggtaggtttcctgtggttggagatacagaagaatcggacgttggtgtgtatcttgcaaagtgacaggcatggcctagtctgccccccatctgagttaacagaaacgttagtggtctttgaatcataatccaatgtttacttggatgtggagtaaggggtgaggaactccatgctattaagatcattaaagacctctttgcttgtactcgaatgtttcgagtttcgttaataatatagctaaaacaatgcttcgctaataatatagctaaaaaactgtaaacaaccctgaggtccacaactagaaaatggataaacgatggtacatccatgcaatggaatactactcagcaataaaaagaaacaaactacagacacaagtaacatgaatgaatttcaaaagcattatgctaaatgaaagacgccagacacaaaaggcgatatagcctatgattccatttatatggcattctggaaaaggcaacacttgcagggatagaaatcaaatcagtgggtgccagggaataggaagggtggagggggctgaatacaaaggagcaggtaggaactttctaaggtgatgaaaatgttctgtatctcgatcatggtgatagcaaaaggcataatgtttgtcaaacctcatagaagagtacacctaaaaagggtgaatttaatgtaagttacacctcaagaaatctaatacccttcccccgcttccctttgcgagttcccaacaaagagggagcagaggttcaaagcgcgcctcacagagaccgcaggcctggcgcccagtctgaccccggggaccgcagtcaccccgtggagcgggaggtaagggaaggatgctctgggtgggaaaggaagccgaggccgcgtccacaccgccaggctggagggaaagccctcaccgagttgctgcagagagatgcggcgaagggaagcttcagccactgccgcgacaccccagccttgcgtcccacatttccggaggctccttaccgatgttcccttcgatggagattttcttgatgcgggtcccctcagagctggctgagaaagacgggcagcttctcttgggcggggtggccattccttagtcttgtggcggcccagagctcgtccggcaaagagggctgggaggcggccacgggtgcgcgcactggagctcgcggcgccgctaagccagatcctgacctgccgggtcagctagtgagctcaccggcccgccggcgggtgtcggggtttgactttggcgcgcggaggcagctgaggacactggcgggcctgcggggcggccccgccctcctcaagccgcgctccctagctgcccctcggccctcgcccgcctccagcgcgggttcccgcgtgcgcgctccgcacgccaggtcacgtgaaggccggggcggggccgcgcgtgtggcggaaggcctctaccccaagcagccaggcgcccgggcagggcgcgggaagaggttccggagtcgggtggggaggaagggtggaccccagaggcctgagggcgctggagggcagagggcgtcacctgcagtgggccgtgccaggctttggaaaacccgcctctctagtgggcctgttggagatgaacagacgcgtctggacagaactggatagacttaaagctttgaactcatctggggagaaggcactgtgtggtaggaaaatcaaatggatttactctggcttctcagcctagaggaagactatcaggcgaagtgccgtccttgggaatcgcactgcccacttagagagccaggctgttttcttctatgtgcttttcattaattaacgaagtctagtgccagaaataccgtcattagcccatttacctgccagtgggaaaacaggcactgagaggctgcttgttccaagtgtcaaagtcagtaagtgaaactgggatgggaatttaggtagtcagatgccacccacaggaggcctttccagatctcccataccgctttccatttgatttggatgcacgaccatgctgtatagaagttagcacgttgggtaggtaggtttctgttcagctgttaactcagcctgcccgacacctggcacataggtaacaaaatgtactgtatgttgaatttttgaatgcctactcatgtgccatgtactctgctagaatactcatctagatgggacaaatgcagtgtaggatttgtcccagctagatgagtgcatttttagtcagggtaaagacctaatgaggcaagagaatagggaattagggtaaccaagggttaaggcataagcaaaagaacagcaggtgcagcaatttctaggcaagactaggcagcatacaggccacaccttcactcctgtgattacaagacagaagtttccacatcgcctctgattgtcctcggccatctccatttcagcctctgattggtcgcaggccaatccttcatagggtgcaaccaattggacgactgtaaagggcacctagggatttaccaaattcttttagcctagtaacccttaagaacactgcaattgggactcttgaagcacttggttcgcttcaataaatttgtgcttttgttacttcgttcttttgttgttttgtctttcgttgcttcttttgttgctttgtttctacgttttgttcaattctttgttcaacacgccaaaaacccagacaactcagtcaagacttcccatccagtaacactaataaaccggatattacccagtctggaagttatctggtccaaattgtctacagaaaccaaaggccttgctattcttttttacattgcaactatcatcagacctgaaatgcatctaaatgtgtagccagaaggggaaaacggtgactccatcctcagaaataaagagcagaaattaaaatgtgaatcctcggggatcacattttccaggattaaacagcaagaatcattctatgtaactgccctatattattctgttatgcaattattttgtatatattacttttacttatccctatagtgattaatagcaagatcctaggaatataagaggcctgaagagttgtcatcaggtatagcaaggaagttgggagaaaggtgctgcggaagctaataggtatcacatttcacagccaagcttgggggaaaactcatgaaatggtaagagtactggcagctaccgagaggaggaaggcaagtctcttgagaccttcaacaggaaagcagagctggtcctggatggatgtcataaagaggcttggggttaaggagtagaaatctccaagtgtggtttccacaaaaaagacccacacaagaagtatcttacaatgatgaagagtttaagcactggaaaatgaaagatttcaaacaccagttctaccagtttctggctgcaaaaact

SEQ ID NO: 316826 - DNA, 4001 bp, Homo sapiens
tgctgaatccaatggcctctatcattctaattaggtactcttattagaggataaggctggagagattgaccttgatttaccttttttccaaccaaatgtggaaaaccctttagcacggtgattgttaaccagggtcccacattagaatcacctggggggggggcttttgagactccagacgcctaacccacaccccaaacccaaccaatttaatcaggatatctgggggttgggggatcagggtcccatatttttcgaagtccccagtgtgatccaagatgaagccaaggttgagacctgctgtctaggatcatccctcttcacctcaagtaacttctgctgcaaggcaaactaggaaagccaacctagagcatttcacaaccacagcttctgacagcagtcacaacaggaccccgaatactggaacatgacaggagcctgcaccagggtccacaccgagggtccaacagagcttattagtaggggattacccagctccccatgggagaaccattttctcaaacagtttgcacttcaatacaaataagttcaacaatcttaggagatgccaccagtgcctaaattggcctgaccatcaggaaattttttccttctttaagagacaaacctcttgggaaggaaagtcagtgtgtatgtgggcaccccaccggcccccacccccagccaatctctagagaagcagacagaagcatcaattcccgtgcggcttggaaagcaccccgcgggctccccgctgcgccggctcacgcccactgcacctgccggcgctccgccgcacctgccgtgcggcgccctcccctcctaccttccagcagctcgtccaggctggtgaccttccggctgccgtcgatggtgtagatagtgcggacaccctggggcaggttcacgttgtccgacagggagcgggtgagctctatgaggagcgcatcgaaggaccggaagcggtcgctggagatggcaaacaccaggcccttgaagtagcggtccccgttccggtagaagcgcgccttcttggccttcttctccgagctgagggcctgcagggtccgcgtgcggtagaagctgcagtgggcactgtgcgccggactggggatgagcccgttccccttggggcccgagctgctgctgcccccggaggagctgggggcccctctccgcgaccccggccgcggccttttgtcccgttcctcaaagtgctccagctcgatactcctggtgctggccatcgcggctgctccgagggcgtccgcaaaaagacgttccgggccgactaagggtgcgagcgccggtgcagggacgtctgactgcgagggcccttaacgcgccgggacacctggctctggcatcccgccctctccgcgcaggtggggccgaggagccgcggaggagccgacccgcccgcgccctcagctaaaagtgtccgcagcgccgagctgcccaggtcattgtccagtgcgacttgctccgtgcctcccgcctgccggggagccccacgcccccgcaagcgcctcctccacccggccacgcctcacaagtcccgctcgggagccgaccgggagaggcaaagttgggccgcccgaggctcgcgctgggcccgcgggcgcccacaaagctcgggcgtctgccgagcgctcccgggagcgccgaggggaggaaggaaggaagggtggggcggggcgcggagcgtgggagaggcccccgggggagtcgcgcgggcccaggcccggggtgcagcgccgccgcctcggccgcgcccggatcccgcccgccgggcagcgcgcgccgttcggggctgagagggccgtgtctggccccttccttccctggagcgcggccctagcgggaaataatgcagcccgcctcccacgcagcggtcaggcccggcccactggcaagcatccgcgctctggcctccctccgccgccgacaggctgtcagcgctggaggaggcttcccggccccggggatgccaaaccgcggagaaggggaggagggggcggaggagggggcggaggagggggccgagcgccggcgcgggaggagcagctcctgcgggtcccgggcagccccgcccgcctgacggctcctgcccggcgccgcgcgttaatgggcgcagccgcgacgcgcgctcctccgcctgggaaacgtaaccgcgcaggccaaaaactacaaaggaaggagattcaagggcagggagcacatccccagccagcatcccagtgaggaccccaggccaaactaccgcagaaatccgaagcccagcattgacttggggcacaccattcattttttttaaaaaagatttgttgctttattagaaaatcctttgagaaaacagcctccactgtttccattgcagattcgctaatatggtacgttcagtaactttgaatgaatgatgagaagttattgggtggtagagggggttatgtaatcaacgaatatttatcgagagcgtaccatgtgtcaggcattgtttctgtcactgggatgccctaacaaaggaaagagagactctgcacccactccccccgccccgcatatttaatgttgtcaattaaagcttcttacctaagaggcctatcatttgtgagcacccatcatagtggaaatcttaatgccgtagtgtctattcaacaataaaaacatcttttccaagacttaagagaaatactagttacttgcattttgttattaggaaaaataaagctcaaatatgtttgatcccaatttggcacgtgaaaccttagaacattcaacacctggttttctgagcagccctagacagcaatccaaactgacctttcaggaagaaaggcatagttgctttttttcgggttgaactgagtcctggaagagcatgaataaaagaaggtagaagcacatgcaacggtctagcatctgtgaagttggtgcgccccaccaaacacacgcacacacacgcatacacacccttcatggcagctccagaaaggtctcctgctcggtgcacaatactactcctaaggcagttctgggcatacacctgggcatacctaacttcctgcggggttggggcatgctaggaagtcagagctgatctgaggcttcaatgtagtttttctagaggaaaatcctgcagcatcattaggtccaccaccttaaaaggcctcaacctagatcagttaaatcagaatttctggagacgggcttctccaacagtatttttttaaaagtacccctaaggtatatccagagtttccaaccacaggctgtaacaccaggaatcaaataaatcagtgcttcttctcaaactttaatatatttacatgtcataggggaatctcgttaaaatgcagattgctattctgtagctctggggtggagtttgagattctgcatttctgatgagcccctgggtaatgccaatgctgctggtcttggtacaagactttgagaaacaagaaactaaattgcaaatttattgagataagtttccatctaagtaccagtaactccacagagcccatcaacttgccttaagatggccatgttcatttgtatcactgttagtatttcttagggggaaaaagactttgtaaactattgctgtagaaacaaattatcctaaacttaatgatttacaacaataaacatgcataatctcagcatttttggcagatcggaaatctgggagcagtttacctcaaagcctcatgtgattgctgtcaagatgttgacaggggtcacagccatctaaaggcttgactgggtcaagaagatccatttccaagacagcccattcacatgaatggtaaggaggcctcagttccttgtcatgagtacctttccatagagttgcttaagtgtcaccatgacttgtcggttggcttcctctagagcaggggtgtccaatcttttggcttccctggggcacattggaagaagaattgtcttgggccacacaggaaatacactaacattaatgatggctgatgagc

SEQ ID NO: 316827 - DNA, 4001 bp, Homo sapiens
tgcttctctgtgctgataagaaggccacagccataaaatactctggccattccaaatagtcgtcccgtttcttgcaggaaacttcactcatgttgggtctagaagaaaaacatgacaaaacagaagttgagagaagcattttagtaagtctgttttccagttcaacccaaccacactgaacctttaaatctctaaacatgggcaacttcagctacatttatcaatcagaaatcacagcacatgggccctaaacagtctctggtcttaagtaaaaacttaagaaatttcctatttcagaagtttgaatttgaaacctatagcttcacgttcccaaatatttcatctatttactgctttctcataggattttttatgccagcctacaaattgttgtgtcctttacctgtctcccttacaaagcggagtcagcacaggaggagggtggaaaaaagaaatatttattgatcatctatagattccagacattgttaaagtttatacacatcatgtcactcaagccttactcctagctaaggtagacagtgccatcccatcttacacagactcagagaacttaggtaacttaacctaaaccacacaggattatcatccatgccagacggattcaaagaaaacatctgaagccttcccaactctgatattaaccagataatttttcccttccctttctcctcaataatccagatgggacagaagttatcaactccgagtaatgaattacatgagaagaaactatgaaaaacgtcaagtgctactcctaaagcaaggtttttggaacgtagtttaccaggggcaagcagagactgtctacggcagggagagcccacgaagggggtcctaggacttcaggggagtggtcgctttcaaaaggaatgaaacaagggcaaggaaggaagacaacacaaaaacggggtgggtaccacggagaaatcttgagaaaggcgaggaatgtggtctaaaggaaggcaagcatctcccaaaacttctgcttcaggctccacactttatttaggcatctgctacagtgcagggcggcagtgcctaagacaaggatgcagtggagagtgggtgctgggaaccacggtcacccactgattacgctgccccacatctgagaggcctggcaacccccctaacaggaaaagacaggtgctgaatcagcctggtttcccacctggctttagggccagcatccatcatcgctgtggggtgctggagaagtacctactaaataggagggagggggagccatggggggcgagggaagagcaggagagggaagggtcctgttaatcccctgggcgccttctcctggtgtggctgaacgcccactagagccctgtgaggactgaggcccagctgtagaaacagagagaactggagctcgaatacaacgattcaggaagacacatccggtcaccgtcccaggcacaccccacgccgctcgcaaccccgtcagctctgatccagggcctacacccggcattcccaacccacacacgggcgcaggaagggatgtggtgttcagacgcccagcaccacctcccggggcactccaaggggcccggcctcgcacaggccgcggcgcccgccgagaaatcgaccctggagtgactgcggggaccccgagcgcccccaccccgcccgcattctccgatctaaaggctgagcgcggccgaggcgcccccagcgtccgcggccccaggcccccgcccggcagccagcgccccgcgccacgcgctcgggacggtgccacgcggcggtggctaggggcgcgcgggccgcgtacccgcacggctggcccccgcccaccatccggtgccggctccgcgcgcaggccggtgctcgtccccgccgccgccgtgctcagggaaggaagtcgggggaggaggcggggccgccgcggggccggaagggggcagcggcccgggcgccgcgcgttcgcaggacggcggctggccccgggggcccgaagccctgaggggagggagggagggacggcgggggcgggtcgcacgccgcaaaggcgctgctccgcgtcgccgtacgcctcccggtccccgtgacgcagcccgcggtccggccggcggtgttcagagcccgagcacaaactacttcccgggtgccagaccgccccgaggtcgccccgctgcccgggtcacgcgtggcgctgggtggccgcgagttgggcgctcccgggcctgactgcacgaccgtcgggggctgcttggtttggtggtggtggcggtggtgaggttttccccaccatccgtgttccatcaactgcttagagacacggctatggagattgtgattaaaagacgaccccaagaatctagtgccgtgaaactggcggggcgggaggtggggagacctggtttgggtctctggagtgagcccgctgtgtcgcagcgtccccgtggggacccttggccggtggctgggtcacagtttcacacactggatggggcagggaactgggtccggcgggggcgctgtgcctcgaggctcagtgcctcgaagctagatttgcatttggctgcgcctgacaggctttcagtttctgctcaaattgtgcggaagggcctgaggtgtttgctaaagcctgccgcgccctgctcgacccgtatcaccgcacaggcaccccacctgcatgttacctcctggtaatgctcgcccacttatatagtgcacattttgttgcagttgtttcaaagatgagaaaaacagggcaataggaaagaccatcagtgacatttctggagtcgtatgccccaagcaacttaatctggttttcatgaacttcgttaccctgtgcagacgtctagccccttacagtggttctagcacagagaatgacagaagaacccctttctgtttcattcatgggacttgaggggactgtcagcactccataaataacagctactgtaataatcgccagttctgatctgcacatcccagatttgaactgctattccaaacaaaagcttgttaactatattaatttagcctaacggaggaagaatgatgagagtaaacagttggttctatctaatttctcactacagcagacacatcattcttcatctcatggtccagcttgtagattcaataattaaattatgtactgctcttggtggatgccgggaaagcaaaagggagaaatacttcatcgttaactatagatttttttttttttttttttgccttgataagactcaggcttgaaagagccacatagattaagatgatgatttttaatttcaagttgactttacatggctgtcttgttgccgctaaaatgtgtcatatatcccgagcccctggtttccctcctcctcccaaatccaccgcttggtctttgtcacactcatctacagtctttgggtcttcatagatccatttctcttcttaccaacctacaacccatacatcaccaattgctgctgctccttcaaccacaacatcattaagctttcttccttcctctgctcggtaaagactgtcatacataatttagttacttctcatcactctccattttggtcaactcacacactcccctctgccataaattcaagctcctgcttgctgaaaacacattaccctgaatgttcccgcatttcactgaaagtccctcatcttaaagatgacatcattcataatacaggaaaccctcctggttcagagtttcacaacttgaggtttcaaatattgtacaccaatagtgaagccacgcggccaaaggggggagaaatatattccttggtatgtctttctcattaacaccttgtaactccaagtgtgactgtaggtgttaaatctctcttgctaataccttgtatttgggcttataattgaggatctttctccacctactacagatacagaggttaggtatgtgttcagccctatctagattggccttccttgagggcctcacacaggttgaacccaatcagcacattcctaaggac

SEQ ID NO: 316828 - DNA, 4001 bp, Homo sapiens
ggcgtgggctctccctctcccaagggagaagggctggggagtcgctccgtccctgggaactcaaccgcctcccgagagcgcgcaggagctggccggggaataaagcacgagttggccgagcaggaaggctccaagggcgcgctgcatgccgggacccgtttccacagttacccacgtgcacccaacccaaccgcggccgggcgcggccgcgactacaagtcccagaattcggcgggaccgcctttccccttcatacccgttgactggagacaaaccctaaaggaaacccctcaagcgccctcccagcacgcctgggagaagtcgcgccccccgggcgtggggcgcggcctagggcccggccatccctctaaggaagcgggttccatggcaccaacccccacacctgatagccagaaattagacaactgcgtcacagactatcaaacccacggactgccagggaccccgacacctccccggcgccaagcccccgacccggccatcagggcccgacccctccggctcccgctgctgaaaccccgcagcccgcacccctgccccgcctcctagtcccgctgccggagcccgcgccagcgctgacctcgcttcccgccgtccggggggaaccacggccagttccaaccttagggcacttaccccgtctcctccacctcagccccgccccctcctctctccgcaccccgaagcttggactccccccttcaagggaccctgcctcgacagggagaggaagtacctcccctaagcacagtctgacacccccttagcccggctccggaccgaatctggacgtgacagtcctcctgcccaactccgccccacctccccttcctccccgactagctcctcacccccatttcatattctccacccctgcccccactctgccaccccaaatcctacccacctttttctcctcttcctcccaatcgccctacccttccacacctgccccatctctttaccccaacatcttccactcccaccactctccgttacccaccgcccttccaacgcccctcccgccccgcaggactccccaactaccattacaccccagtccctcccaccacctcgctttcccgttacatcagccctcgtccagtcgcccgccctcctgccccgctcggccgctgcccccattcccccaccccattgttcgccgccccccccccacccccccgccaaccagcccttcttcccattgtccccgcccccgcgcccccctcgcactcacccgcctttctcacggagccgcccgcaccactcagccctttggaaatcctcacccttgtgccccgctcgctcgctcgctccctccctctccccgccggtgccacccccccacatccccggccctgcccgctacagcccaacgctgcctccacctccatgcaccccggacactccgatctcggcccttcatcgcacgtccagccctcccttcccccaacactgaaagagagccagtccccacccccctcacctccgccctccccgcaggccggtcccttccccccacgcccgcccccgccccacgccgcccgcagcgtcaccgcccgccccggccccgggaggggaaggggtggttcccaggcaggggctcccggcgcgtttcgggacccgaggcgtggggcggggactgcgggagccgagtggcgagtttggcagccgcccggccccggcccgctggctggctctctgctactcactgacagcggcggcatccgagtgcattttcaggcagctcacacccggctcgccgcccaggctcccgcgctcgcctcgcggtccccccaccagctcactgcacctcggctcgaagctgaggacccgccgccgggcactcccagcccgcccatctcgccttctccattggctaaaccgcggctcaggggccgccctgctgcgtctctcatttgacaaaaggagtgcccatagcgccggtctggagctggcaacgaggccccgccccccactggccaatacgattggtcctggggccttgtctccgtaacgcccctggcggaggccatgctccggagcagcgggttgggcccggctgctgtcagtcacccccaggggtccgagagcgcgtgtaggggcgaagctgggaaattggtccaccttgaccctgaaaccccgcccagtggcgggcgggattggtggagctggagacccaccaagaaagatgggtcggcgtctgaaacaaagcacgcgaagtgtttcccaaagaatagagcagcgcagcgcagttgggggcggctcgtaccagctgctggaagtagggaaatgcgtccgtccctagcgcccggcgcgacgcggccgggtctcccgccacttgtcccacgacacttgtccagttcgcgccgaactcggactgggacttctcttgtcagctgcttcctaccgcaggaaactggattaagaattgccgcgtcttaatttccagcaaaccttctggtggggagcaaatttccatttctcctacgaagatccatcctctccccactttcgaaatgtacttcttttccagagtccgcatacttgtttcgcagagttcgcacacttctttcctctagtcactaatgtctgttaaagaggcttcgaatgccacgagcattgtccgtcacacacatctgtatgccccagacatcagacagaaatacagggccgcgctctgagctgcggactgagcctaacacatggacgagtccagggggcagaccaccagcccgtgaaagacccccggcggcatctaagaaaacctgtcactcccgcggagaggccgtccagaaattgaaactggctgttatttggcagagggagacgttaattttggtgaattcttctgaccctaagtcaagaattcgcaccatttccatgagtcctgccctgatttttcaatacttgaagctaacttatcacaccgcattatggtaacagaacaatatttcgagatattaacggaggattccccccaccccaacccacccccaccctaccctgcctccaccctcatcccagccaccaactccaacaacaacacacctacaaggcatccccatatcctaaggccctgggccatctgggagcctcaaagagtaggtgacaccacaaatcacaggtaacagaacgcacggtctttttggttttagatttctacagcccaggcttttgggtttccaggctctgaaatttagattttaaatcaggacacaaatgttatgctatttggaaggggctcagacaaaccagtttctgtgtcccacagcactcccatggtaaaatgctccctccatcttaatcgctaatttctctttaataaattacatccttataatactatttatataatatttttatcattcaaacatttatgaatcactttatggaatctcagaactgtacctgaagttatttattatttgcttcaggttctttcgcaagacaagaatctctcatagaacatccttattgatcacctttatcatgacagtacctcagcggggccccacagtgatgggtaggtacctctggactctgagataggggattgcttgttgggcagatctagcagtaagaatatccgcccttactctgagcagggaagctgctcctgcattctttattctatttatgtttcagcttaatctacatctaggaaataataaattatatgtcatttaatacaagtttcaaatcttttgtgtgtgtaatatttatgatttttttttttaccgtttaccatggtacttcaaagactgagacacatgttattttgcacagaaaagggcttccttcgtgacacctctaaattacaataagcccacaattaattatagctagtcatttgctctattaatttatttgcagcatactttataataatgtgtataagagttaagctagatgaaggatgggtcggctgctttgccccagctcccaacactggcctggcatatgcatggtgtccataa

SEQ ID NO: 316829 - DNA, 4001 bp, Homo sapiens
ctggtgaaggatgtgacgtttagggagtctacttatggagaggaaggtttctagtattaaggagagaaggaattgcagcctgcagctaataataaaacaagcaaacaaaaaaagtcttatggttctccactttttacagttttcttctattctcatttgctttccaagcttcttcgaaaattgaagacgtcacatattacctttgctcaccttcacatttccaccctaaattccactaacccacctccatcactcatttcaagacagttattttttcaaacaccccaagaaataccaacacatagtttatattatcgttacaagggttacgtgtacctccactgtgttctcatatttatgcaagggaatgctggaacccagtgcttacacacactggatgccaaaattaaatacaccattctaaaggctgctttacattgtgttgcttcttaaatgttttcccacaacccgtgcgcatgatggtacaagaccaagcatttattccacaagtaaggccacaaaatgcagggggaaattcacttggggaccaagaacctaagcgtgaagagggctgcgcctggcgtgggctctccctctcccaagggagaagggctggggagtcgctccgtccctgggaactcaaccgcctcccgagagcgcgcaggagctggccggggaataaagcacgagttggccgagcaggaaggctccaagggcgcgctgcatgccgggacccgtttccacagttacccacgtgcacccaacccaaccgcggccgggcgcggccgcgactacaagtcccagaattcggcgggaccgcctttccccttcatacccgttgactggagacaaaccctaaaggaaacccctcaagcgccctcccagcacgcctgggagaagtcgcgccccccgggcgtggggcgcggcctagggcccggccatccctctaaggaagcgggttccatggcaccaacccccacacctgatagccagaaattagacaactgcgtcacagactatcaaacccacggactgccagggaccccgacacctccccggcgccaagcccccgacccggccatcagggcccgacccctccggctcccgctgctgaaaccccgcagcccgcacccctgccccgcctcctagtcccgctgccggagcccgcgccagcgctgacctcgcttcccgccgtccggggggaaccacggccagttccaaccttagggcacttaccccgtctcctccacctcagccccgccccctcctctctccgcaccccgaagcttggactccccccttcaagggaccctgcctcgacagggagaggaagtacctcccctaagcacagtctgacacccccttagcccggctccggaccgaatctggacgtgacagtcctcctgcccaactccgccccacctccccttcctccccgactagctcctcacccccatttcatattctccacccctgcccccactctgccaccccaaatcctacccacctttttctcctcttcctcccaatcgccctacccttccacacctgccccatctctttaccccaacatcttccactcccaccactctccgttacccaccgcccttccaacgcccctcccgccccgcaggactccccaactaccattacaccccagtccctcccaccacctcgctttcccgttacatcagccctcgtccagtcgcccgccctcctgccccgctcggccgctgcccccattcccccaccccattgttcgccgccccccccccacccccccgccaaccagcccttcttcccattgtccccgcccccgcgcccccctcgcactcacccgcctttctcacggagccgcccgcaccactcagccctttggaaatcctcacccttgtgccccgctcgctcgctcgctccctccctctccccgccggtgccacccccccacatccccggccctgcccgctacagcccaacgctgcctccacctccatgcaccccggacactccgatctcggcccttcatcgcacgtccagccctcccttcccccaacactgaaagagagccagtccccacccccctcacctccgccctccccgcaggccggtcccttccccccacgcccgcccccgccccacgccgcccgcagcgtcaccgcccgccccggccccgggaggggaaggggtggttcccaggcaggggctcccggcgcgtttcgggacccgaggcgtggggcggggactgcgggagccgagtggcgagtttggcagccgcccggccccggcccgctggctggctctctgctactcactgacagcggcggcatccgagtgcattttcaggcagctcacacccggctcgccgcccaggctcccgcgctcgcctcgcggtccccccaccagctcactgcacctcggctcgaagctgaggacccgccgccgggcactcccagcccgcccatctcgccttctccattggctaaaccgcggctcaggggccgccctgctgcgtctctcatttgacaaaaggagtgcccatagcgccggtctggagctggcaacgaggccccgccccccactggccaatacgattggtcctggggccttgtctccgtaacgcccctggcggaggccatgctccggagcagcgggttgggcccggctgctgtcagtcacccccaggggtccgagagcgcgtgtaggggcgaagctgggaaattggtccaccttgaccctgaaaccccgcccagtggcgggcgggattggtggagctggagacccaccaagaaagatgggtcggcgtctgaaacaaagcacgcgaagtgtttcccaaagaatagagcagcgcagcgcagttgggggcggctcgtaccagctgctggaagtagggaaatgcgtccgtccctagcgcccggcgcgacgcggccgggtctcccgccacttgtcccacgacacttgtccagttcgcgccgaactcggactgggacttctcttgtcagctgcttcctaccgcaggaaactggattaagaattgccgcgtcttaatttccagcaaaccttctggtggggagcaaatttccatttctcctacgaagatccatcctctccccactttcgaaatgtacttcttttccagagtccgcatacttgtttcgcagagttcgcacacttctttcctctagtcactaatgtctgttaaagaggcttcgaatgccacgagcattgtccgtcacacacatctgtatgccccagacatcagacagaaatacagggccgcgctctgagctgcggactgagcctaacacatggacgagtccagggggcagaccaccagcccgtgaaagacccccggcggcatctaagaaaacctgtcactcccgcggagaggccgtccagaaattgaaactggctgttatttggcagagggagacgttaattttggtgaattcttctgaccctaagtcaagaattcgcaccatttccatgagtcctgccctgatttttcaatacttgaagctaacttatcacaccgcattatggtaacagaacaatatttcgagatattaacggaggattccccccaccccaacccacccccaccctaccctgcctccaccctcatcccagccaccaactccaacaacaacacacctacaaggcatccccatatcctaaggccctgggccatctgggagcctcaaagagtaggtgacaccacaaatcacaggtaacagaacgcacggtctttttggttttagatttctacagcccaggcttttgggtttccaggctctgaaatttagattttaaatcaggacacaaatgttatgctatttggaaggggctcagacaaaccagtttctgtgtcccacagcactcccatggtaaaatgctccctccatcttaatcgctaatttctctttaataaattacatccttataatactatttatataatatttttatcattcaaacatttatgaatcactttatggaatctc

SEQ ID NO: 316830 - DNA, 4001 bp, Homo sapiens
ccagattattggtgattttcttttcttttctcctacttgcttatgggggttttctaattttgttttacagaaaacatgcattacttctggaataaaaagttataactttgttttttggactaaggggttgttactttctaactgtaggaatacatgtattgtaaaataaagaatttttactattatgtttgaagagttgtattaaagctttaagagttatattaaagatctatcaaatttgtgtctttaagtctttactggagtggcctgtaggtcccaattttagctttagcctctttaattaaaaattgtgcagagaagacctttgaggttcatgaggatatttgtaaccggctgggtggtttttcttagccaagcaaaacaaaatagtcctagggaaataaaattagctgggctcaaaggaaaagagatagctctgcatttggtcacctacacctcaaattaatcctaccccttggcaggatgccacaccacacggagtcaaatgaacaaggtgcaggcagatgccctcccagctcctctctctaagcctactccaccttcatcagccactggcttttcctctccacttcgtgtaagtttggagttctggcctgtaaattaggtcatcaaccacttcaccttgaaaggagaaaaacacgaagagcttaagcagtttatctatgctcttacagctctttagtgtcagagcagtgtgttcacctagaaactgctgttaaaattccaaatgacagcaagtcaagcaccgctgctgttcaacagtttccttctcacattaaaaatggaataatggatatatccacgactgaaaatcctactcagtaataaacaataaacacgaacacactgatttaagcaacggacataaaagaatctcaaaaacattaggctgcgggaaagaaaccagacacaaaagaatacctactgtatggttccacttacctaaaggcaaaactaacttggaatgataaaaatcagatcagtagttccctggagtcaggggagagtgaggaatacctggcaaataggtgcgtcggaattcagggggaggggcgatattgattacagggtaaatacatttgctaaaacacacataactgtgttcttcacaatcatgtaagataaggaacttaatcccaaggggcctactggcaccagactagaaagatgcagccctcgggtattctacttttgctacttttgtttctatcatggagagaagatgttagaaaatttggaaaggagtctcctcagatggattttgtggcacctcctacatagaggtaggggaggaagtcgaaagcccgcccacccaatagatccagaggcaccgaccttgggaggggagaagggtggacagcggggacactcaccacttagcaggctctctgggtgatagccacagtccagcaattctgaaatgctggccgggttcttgctgctcaaactgccagttgcaaccatggtcaacggctctgtttccttcgcgaggcgcaacggcctttcctgagcgctggaaaaaatgaggcgagaagagacggatttgcaaaagcaggcgagtcgtgcagaggctcctaaaatgcccggcgtcccgggagcgaactagcggaggaactcctttgccaaaggggtggaaccggcctctgcaactcaatttgacaaagccctgggagcggagccgcaacctgaaactaactcaacagttcgcaaaacttggaagcgacctgccccgcggagcgccccccggccccgctgcccccaccaaggccgcagcttcgctcacctgccaggagttcgcgggggcctgcgcgctcgctgccgggtaaacacaggcaggtggcttcttaggagtcccctctcctggggactcggtgacctgcagaccccagcagccagcggcaccctgctcacccctcccgggccaccctgcgccggctcctcgcagtagcatagcctccggggcagcgagaactttataggtccagtccccaccctgctcaggcccgcccacctgcaccgcccctccccggccagcgccccgcccctcccctccagagtctggtcccctttcaacctctacacttccagggagcccgagcctagccacagggagttgaggataagcctgtggtagagcggacacctgttgcttccagggtagatctcgggccactgggaccgcaattccgggtgcacgactcgtcaaagcctgaacctgattgttcagtgcgacccctccccgagcgtccgcgctttcacactcaggctgctcccggcagcgggaagctttaagcgatctgtgcatttccttgtcctggggctttgctgtgtcatcctgaacacttggcttaaatctgttgcaacgtccactgagcatcatttatgcacttatttctggcctctaacccagtcaactctactctgcctcccagggtttctgtatcctcctctgctgcaagcggtcagatctagttttcctttcccgcatcgaaggctcgccagcattttaagaagggccttaatgaccccacgcactccgtggctccctggcattcttcgtgcacttacatctgtggctaatgcgttttcttcgcaggaagggtgagcctggcactcttctaattagaccttgccccagagcgcggggagcttgaattgagcgggagtttgccaagaaacacacaataccattagtaggatcttaggtactcctctatccgtgcatcgagagcaactgtcatttccggaggcagaagtttctggcgagccctgttgggaggatctttggtttgggatattttgaagaggtttcagagactgaagataaagagttttatattctgctggggatcagcagataatccctgtgagggctccgtgcggtcctgcacaggaacacacagagaggcagaggagccctggaaagaggcaacatgcccgcatagcccatgagcaagaagccaaacctgatttttttcttccaaagttattaagccacggttttctcgctttggtgtgccagtaggagatgatctgttcagagagtcagcttggggtgcgttaggggatgcctggagggagaaggttgttcctacagtagagatcccagtgttggctcccaggccctctaggattatgtgtagaaggatttgcaggttagaaccttgaaaggcagtttcagctgtcctggcataaaactcttagaaaaacaacaacagaaggggtatagagggtgtgataaacagatcagtgggaggacattcggacgcagagcagcagaaattaaagccagcttgacagtccatttttaactcagttcaggcagctgcactgcctgaaggtcaggcgagccaaggaaggagatgctgatagactggtctttgaaggccagtttccacttctacttcaataaacagaaaagtggaaaataaacaagcccatttaagccaattaaaaagcggtttcagtggctagggtgttcaggaccaatggatgggcccatggtcaggagttggatgccagccgcctgacagtcagtccctgggcaggccacagagcctcttgtccttgtctgggcagcattactaatgaggctgccacttaacctgcctccaaggaggatttttagaattaatataatgagtggtctgaaccaatactagcgaaataaagaaattactcgtttcaatttccttagggtatttaggcataattcatagagtaaatgcccccatagggccagaaagattattggaacttacagaaagtagtagttgctcttggcccacctgactaaatgaaattttgcaaagccctttgggatttgacttcagaaaacaatttacttatgtacaaaagacttcaaataatatcttcttggctgaatgggccttgctctcaggacatacagggcataaggaatgattgaggtaaaacacatacctggaataattaagaatgtccttttttatctacttaaa

SEQ ID NO: 316831 - DNA, 4001 bp, Homo sapiens
caaaacttgggaggccaaggcgggcagatcacctgaggtcgggagttcgagaccagactggccaacatggtgaaaccccatctctactaaaaatgcaaacattagctgggcatggtgacagtcacctgtaatcccagctacttgggaggctgaggtagaagaatcgcttgaacctgggaggcagaggttgcagtgaactgagatcaagccactgcattccagcctgggcaaaagagcaagactccgtctcaaaaaaaaaaaaaaaaaaagaagaagaagaaaaaaaagaaaacctgaatctgatcaaaacgctagtagtaatgattaatttacaagaaatttagaggccagcaaaatatgttaaatgacaccacagggattaggacacatacacacacacacacataaacacacacccaacaggacacacacatacaaaaacaaacaatcataagaccacaaatcttacaaacgaataaattaaaaggggatgaaagaaattgcaagaaccttataaggcttatcctccaatcacagtagtgtcagaaccatattctgattcaaacaatcttaaaaaggaagaagaaaagaagaagggaggaagagaaatggaaaagagaaaaaaggagggaagaggaaaggcgcaaaggggaggtaaagaggaaaaaaatgggggcaagggaagggaaaggaaatcatggattctgtattggaacagaatggtggagctacttgatgaaaggcatcaagctcctgaaaccctgcctggagaagagctggtgggttaaaatggcttccagtacccggtataaccctctccccttgagtgtggacaggacctgtgaatttaatggcatagtctctttaatgattcggttatattatgtaagacttcatcatagtagactcgggagattcccccaaagaggcttataccttctttaaaggtaccctataccttctttaacggtataagccaccttgttgtgagaaggccactgtagctaagatctcagggtgaaatctaaagacatgggaacccccagccaacagccagcaagaaagcaggtaacctcagtcctttagctgcaagaaactgaattcttccaacaacctgaatgagcatccatggtgtcccatgaggccacagctctgacaccttgatttcagctcgatgagatgctgaacagagaactcactttacccatgcctgggcttctgatccacagcaattgtaaaataataaacttgtaatgttttaagccactatacctgccccttgaccaggaataaattaagttactggagtaggaaataaatttctattgtcttaagccactgaaatttaagggtgcacagaaattacctgggggaatcttattaataaacgcagattctgattctacaagtctggagcagggattgaaggtggaagcttcttgctgctgtcaatgtacaggttttactggctgtgcttagatatgatgtcccttaatttctcctcaacctccattacccagctcccacctttgacggggactccttaaatgcctaactaagcactcctctctgtctcagacttcaggcctttcgcggttgtccctttcctccgcccctccccacgcccggccttccgggccagcagggggcccgtgcgccacggccttgcgatcccaggaggttccccagattcccgcgccccgagcccagcactcctgggccacctccctgtccggtccgttgaagaagacctagaactcccgctagacagctccgccccaggctcttcccaagggacatccccggctcctcaccgcggactcaggaccggtggtgtccaaagacccgcgagctgcgcgccccgcggggagggagtgaaacagagacctagcgcagagcccaggtggaagttccaggttaccccagacctggcctaggactcggcgctctgagccaccgcagccagtcttttatgcatccggcgggagtttcggtttcctttctcctctcagaagcacttaggtttcagtttcccttcagcacgaattaggcgaggcactttcgtggaaagtttagcatccttcccttcaatcagaatcttaagaaggggagcatggcgagacgttagttaaaaggtatgaagttacaatagctaggaagaaccagttctggtattctattctgcagtagggtgtgtatagttaacaataatgcatatttcaaaatagctagaagagagaattttgaatattctcatcacaaagaaatagtaaagttttgaggtaatagatgggctaattatcctgatttgatcatcacacaatgtatacatgtattgaaacgtcacattgtaccccaaaaatatatacaattattatgcgtcaattaaaaataaaatgaaactaaaaaaaaccttaaaagagagagacaaaggcaataaaaatgggctttggaatttgggcataaatatagagtaaattgaggcagaaaaatttgtaacatctaaacaagataaaatcaagaagagttagaatttagaaattgataaaatgtaaaagacactgtggaatctgaaaccccacaatgaaattggagatcttgctgcttctacttgtatgcaaaaagaaaaaagaaagtatgtaacaatacatgaactttgagtttctgttatgagaagctgatgattactgttctgtataaactgtaattggtactttcatgggccaagaatcaacattaaaaaataaattgaaaatgcagaatggtcacatttatttgtgcctcaaattgatgaaatgttctcttaatttttgcctgttgatacttgcagtgtgggtttcgatactcatctcctttcctttcagtgccctcgtatgcttgatttcattaatgctataaatatgcattcatatattggaaatagaagagggtgtggaggaaagacagcagtgaatttgggtaatcagcatgataagaagccacaggctgctttgtctacaaggaaaggaaagagccaaggtccaggcactgctccacagggaacacagaacagagagagtagtgaatgatactttgtcttgtgaaaaattagagagtcaagttgttaaaagagggggatatggggaaggaggacatttctcacatccatcagacaattacttgtttattcatttgtttagaaattcacgtgtttgttagtgatgagattaagaaagaaaataaaagactctagaatttaacacatgattggtcttaaatcagccaatattcctgtctccttcactgtgatctctgatgtacctgcctggggtaggctgaataataccctgcactcctccctccaaaagaggccaaaatcctaattcctggaacctatgaatacagtaactttcatagcaaaagtaactttgcaaaatagattaaataagaatctttagaagaggagattaccccttacccgggattatccaggtgggcccaaggtcatcagaagggcctttataagagggagacaggagttcgaggggcaatgtgatgatagaaacagtcagtgacagaatgtggggacactacacagatggcgttgaagacagtggaagggaccacgggccaaggagtctggtggtctctagaaactaccaaaggcaaggaaacattttttttttctagagcctccagaaatcagccctgataacaccttgacttcagcccagagagactgattttgaacctctgagctcagaactgtaagagaacaaacttgtgtggtattaagccactaaatttgtggtaatttgttacagcagccatagagaactaatacaatattgcaaactgtattgtaggaaatgaataacatatttgcaaacagcagaaataatggattgtgttataacaagaggtagaattaattcagacagctactatgtgctaagcaatatgctaataccatatcaatgatcacagcaagttcatgaggtgtgtactatgatttctgtcat

SEQ ID NO: 316832 - DNA, 4001 bp, Homo sapiens
aaaagggtgatatcagtaaatcaaccagcaggtctccatacttacaaagcagaaaatgagcctgcagcagggaaaaccacagagatttccacccacatcaacatagccgtggatgataattaacatgggtattttattaaaagccataaagctaatcctgagaagaatttttaaaaatatataattcatattagaagtatttctttcacagggagtcgtcggagtctgtctaaagtagataaaacaaaagactgatttgtaagcatataatttataagcaaccaagaaagaaatgtatatctttggagtggtaacgcctcaggagaactaaaactgtgagactaagtatgaaggggaaagtagtagagaagggcatttaatttttgttttatgtctttctcttctgcttcaaataaaactgatcaattatgacccagcataccatggggtatcatacagcaattactaagtaagactgacaggtaccaataaatcatgaaccaagaaaagcataccagtatgacagccaaaatatcttttaaagtgtatggatctagagatagacagatgatggatcgatggatggacggatggttggatggctggatgatggatggatggatggatggatggatggatggatggatggatagagagataggagctatagacaaaaacttgtctctttgtagagtatcaggaaggattcacactaaactatccccaatatctttgggatagaaggcgaagagccttggaagcataactcaccctcatttattttagtaccctcaactctcagcacctgagttccaccaaacttcaaactgcaaatcttagattgaatggtatgttactgttttcaggagaacactcgaaatcatgaaggtctgtatgtcgttgatgttatggtttggacttcttattgtgtctttaaaggacttgcttctgtttggttctgaccgctttttctagcagtcattaggagctttcataatccttaaggccccatcacggatgatgtcagcttctttgattatggaaaaccttgagaagtttattataaatttatcaatgtaactttgtaaacaaaagagaagcgggaaaaaagaacaaagtacctttccagagaaatagtaaaaccttatttccgctattaagagcttaaatccggccgggcgcggtggctcacgcctgtaatcccagcactttgggcggcctaggcgggcgggtcacgaggtcaggagatcgagaccatcctggcctaacatggtgaaaccccgtctctactaaaaataaaaaataaaaaataaaaaaaaattagccgggcgtggtggcgggtgcctgtagtcccagctactcgggaggttgaggcaggagaatagcgtgaacccggaaggtggaggttgcagtgagcagagataacgccactgcactccagcctgggcgacagagcgagactgactcaaaaaaaaaaaaaaaaaaaaagcttaaatacaagacggaaaaaagggaagcggcttgctgcctgtcaatgtccaggttcgaatggctgtgctcagatgtggtgacccttactttctcctcagcaccccagatccccaggccccctcgggtgcagaggacccgttaaatgcctgagcactctcctctctcacggtggttgtccctcttccctacctctccgcgaagctgccgcccgagcccagtgggcgccccagcttccctcgcccggcgcgcacgaagccaccaggccacctccccgcccggtccatctggatgttgaaggaatcctagaacccccgcgggacagctccgctccagggtccctagcgacacccgacgtcacccgcaatcctcaccccggccgccgaacctgctaggtccaaagagcttcggagctgcacgccccgcggggaggaggtggagcagaggagaccgagcgcagagcctggcgtcggactgggcgctctgagccacacagcagccagcgcctgagtttttatctagggagttagtttcggtttcttttctccaccgcgaggccttttcgatttccgcagttttctggaggtagaatataggtctgcattggtttactctgagaatcttagggaagtaatagtagaagcgatgatatgctatctgggacatgcatgtaattgtaaagggaaagaaagcagagaaatctgggactctaaacaaggaattgaggctgagagtaaatgcagcacgctaagcactatgaaagtctgcggtgaggtgtggcgtttttcttttctggcaaggtactggacaggcaaaaatggagtaaaaaaggattaggggctttgagtttctgtcctaagaagttcattttatgaaaaatttccaatagtataactgtccagtgtgaacatttgaaagaccaatcatctatcacagagaatttaaattgagaagaagaatgctctttagttttgtcatcaagctcattaatgtttgaaattcgagtttcaaccccagcccatcatggtctttagtgctccagacgcttaattccatgacgttatgcatgtgcagaatatattgagattcaaggtggtggtgagggtgccccagtaacggcatggggtaataaatggagagaaatcgaaaccggaagttctgtcttcaagaaaaggaaagggtggaagtgacttgttcacaatagaaagagcccagaagaacaaagttttttctcagactctggaatataaagtggcttcgaaaaggaggtgaaaacattgctcacttctgtcaggatttttctttaattttatgtttggttgaaaatagttatgattctctttctcaatgaggatgacattgagaaagaacctgaaatgactcatgattaagtcatgagttcatctcagatgaattcctctctagcatctgatactggacctttgtatcataagaatgcatttgctagcagcagaaaattgggctttgctgtaaaagcattcattgagctttttatgtgccaggcaataggctaagcccttaacatgtattatcacattaaatctcacagaaatcccatgagcaactttactgttgctattttatggatgaggtaaataaggcttagagaattcaattacttgtcgatgaccctacaggtagttaatggtagccaagacttcaaaatttaattccaaagataatatctacaatattctctgtatatattatctcattccagttcttttaaatactacagtgtcattattcctcccccaaagcacatacaatttaatggggatttcctcttttggttgtagaagtgggccctacatgttcttaatataattgactgtctgctgttgtttttctctcttaaagatatagatgtatcaggtggggattccctagatgttaactccacacatcccacttcccaccgcaaagtatatgtacaatgcacataagcagactctactccaaatcaatatccagttctcttccactttaataatatgttaccataactccagcctggacattatccagaaacttgaaaatcataaactccatttccactttttagagacttcccccttgcctcaatctctcagtctccttaggagccccactctttcacctccccaggatcaactctgtgaacaggcactgaaccttcctctcactaacattctcaactgcttcatccactctctttcctctgcaccttcactgcaacttgatcacctcaatctagtaaaccattttttgcccttaccaggacattgaaggaaattgtctaatatttttcacctcagatttactgtttatgactataggttcctgatcttttttacagtggcccttaaaaccctacagcatcttgctgttctcttcaagtccactaagaatatatctgttttaaagagactccttttaactgtctgacacctccatctagtccaagaagcccatgacatgctccacatacaatataaccactcccttttgag

SEQ ID NO: 316833 - DNA, 4001 bp, Homo sapiens
tggaagagataaacagactttataaactgctagctagactaaccaagaacaaaagagagaatgccaaataaataaaatcggaaataaaacaggagacattacaactgatataaaagaaatacaatggatcattagtctgttataaacaaccatatgctaaataatccatacgaagaatttttttttaccaacaccaataatcaatctaactttcccaaattcattttaaaatccaccaatactttataataaatcatattaaactgtggtttatacctgagatttagattatcaattgacttatttatcttttctgaggctcatattacctccgagcacattttaaaatttatttcaagattctatcatttatataattatacagaattatacttttcctccatgaatgttggtgttttatatttttattgagatagaatttactataaaattcattcctttagagtgttccatttagtgagtatcagtggattcttagagtgggatatactgatgaccactgaatgaaggaatgaagtacgaatctatgccacaacatggatgaatcttgaaaacattatgctaaataaaagaaggcagacatgaaggatcacatatttcttattctgttcatagtaaatgtccagaataggaatatacatagagacaaaaattagatcagtggttgctagggactgggaggaggagagatttcttcttgcggttataaacatattctggaattagataatggtgaggggtgcacaattttaagaatacactgataaccactgaatagaacactttaaggcaatgaattttatggtaaattgtatctcataaaaatataaaaaacccactaacattcatggaggaaaggcataattatttataattatataaataagggaatcttgaatcatgaagtattatataaatgagggaatcttgaattgttaagtattaaaatgtgcttcagaaatgatcaataagtcaaccagtaatctaaatctcaggtatgaaccgcagtttaatatgtttttattatggggtattgatgaattttaaaattaatgtgggaaagtcgtattgattatttaattaatatgcttatatataattggctagttatgtggttaaaaattaaggtggaatcttaactctcaccatacaaaaagtaatttccatatacattaaatgatatcatatgagttttattcaactttaaaggaacacagaggctaggtccttgcctggatcagtggtgaatttatcctgtgaaccaaggattatggtggagtatccacctcttcacctctagcccttcttctagtcatcattcacttttcctttttccaattctttaaatttcctgtgttctgtgtgtatcctctcaccatcttttgatcaaacataactctcaagtaagtttattttttattattattattttttgagacagggtctcactctgttgcccaggctggtgtgcagtggcatgacctaagctgaatgcagccttgacatctcaggctcgagcgatcctgcctaagcttcctgagtagccagaaccacagacacgcgccactatacctgattaattttttgtattttttttttttttttggagagatggggtttcaccctgttgcccccaccaggtcggtctagaactcctgtgctcacccacctcaaactccccaagtgctgggattatagacatgagccactgtgcccggcctcaagtgagtttatcataggttaaatcactgcagtgaaccaccttatttatttctttagtatcaactcttcaatcctctgagcagccttcatggtacagtaaaatctgcccatgcctattttattttcagactcttgaaagaccttgcattttcttttacttatatttttagaactttggaataaaaaagtttctgtcttacctggaggaactgtgaacatcaaggaaaggactccaaagacaaaaaacaagaccctcatggttgaataggtaaagcaggttagagagaatcagtagctgagatgaagaggacttctgtgtacattcagttctctgaagaggtgagttgttgagtgattattgaacctttcaggagcaagaacatttctgtgtttcaaggagattttatatcaggagaaagcatgcaatcatcacgactatcagtcatttaaagtacatttatcaaaggtcaagagggtgtgtgcaaaggtagtagaaagcacagccatggcaaaggcaggagagagacttgaaatatcagcattgtcttatgcattctggaggaactgtaaaagttaaggaagcagttatagaggaaaagcattcattttatttttctgataataggaagaagcacgtaatacaagagcatgcctatttattaatattttggcaccgtgtgttagcatgcttaagcaatggaattaaatatgaaattataaacagattagtgagatacagaacaacttttatttgattatctttctgtccaatcgatcaaatgagataaactaatttttctattgaaatctaagttcacacaaattgtttgcacatcagttatgtgtaatatgagaggaattaaagaaagaaaagtgggccttagggaacccataatacacttcggaaagcaagtaatatatacaaagaaacggcaatgcaacacgagcatatttctggcaaagaggcacaaattacttcttagacactaaggaaatgaacataaacaccagaatactttgggtgccgtagggaatgcttaaagagggtatgagtaaactttatttatttatttattttttatttagagacagggtctcacactgttgcccaggctggagcgcagtggtgcgatcttggctcactgcaacctctgcctcccgggttcacgtgattctcctgcctcagcatcctgagtagctgggattacaggcacacgtctccatgcctcgctaagttttgtacctttagtagcaatagggtcttgccatgttggtcaggctggtctcgaactcctggcctcaagtgatccacccgcctcggcctcccgaagtgctgggattacaggggtgagccaccacgtctggccagaatatcaacttcagaaactgcaaagtacatgcacattcgtggtcttacttgaccttcattcctttctagatggtgtcactacaggtgaagtaacttttctcagtaccaagaaggaagttctctttcttccatggcttcttcttggtgctacttctataatacttcagagtgttagtgaatggaacacttggttacattatttcagaaggtcttccctgcctttagagactttgaaaatgaaatcttgagtcagggatggggaggtcttggaagaggcaaacttcccaagtcttagcctaaggagggccagtgaggggcatgaaagctctggggatgttttttcctaaacctccattcaggtccttcctcctgagttgctggggcagcggtgcctgggcacaagcctctgccagcaccctagaaactcaaagggggatcttagtgtcattgtgctggttattgctgactgctccatttactgaagccagaatggcctaggatcattagcatctctgatccagaatccagaatttactgatttttctcacctctctgggaattatttctttcttgatcacgaggaaaagctttggaagtacagtttacactgcaaagcaatacaatttatgagaacaaataattgaaatcctttatggaacactaagggcataattttcactgcttgatattttctatgaacatttgtttgccagcctcttgtaggttggtgcaaacgtatttgtggtttttgccattactttcaatggcaaaaatcgcaattacgtttgcaccaacctaagagatttggagccaggaggcaggcttggaattctgcccaggaagcccaagaacattgtgtaatccatgggctaccaatcacggatatcaa

SEQ ID NO: 316834 - DNA, 4001 bp, Homo sapiens
gctctgggaggcaggagccgctggggagtggacagccccaagcctcccaaggagctctggctgtgtgcataggacccagggagcacctgagccggcggggtgctcaggagggcataagaggagcaagcgccacaccccagcagtaaaacagacaggagggtggggccggggcagaagggagggcaggaaccctgggctggggcaaaggctgcgggggctgggagtgggcagggcacccagtgacacaactgccaagacagccccgggtgaaggttgtgccacggagccccaggcagtccagctgggacagggagctcttccagaaggccccgctggtgccgcccttcacctgctgcagccctagccaccccagtctccagatgggaccgggagaagcttctcctggcagcttaagagaaaagctctggaagcaggccagggtccaccgagagaaggggggacaggcagcacccaggtccctcctctgccatggagacagggcctgctcaccccacgccccacgcttgggtctcctggcggggagggtgccctccttcccataccgctgctggcccctcttccacgggtgctgcccaggagggcccttttgccccctccgaagggggaggggacccggagtctggcctcaagtcgggagctgcctcagccacacatgcacactccccacctctggggaagcccctggcatccccaggcagcaggcatggctgtgccatgctctgacgtgacaaagaagctggcgggccaggccaccttgtgcagccctgggggtcagaacaaccatgccgtttccaccacagacgacatccccgtgtgaggggacagtctcctctgcggaccctgacctgagtggacccctatccccagagaaaggcctgaggctaaggatagcccctcccacctcagcgtccctggccaggacacagtaagtgtcaaacgtccagaactccggtcctgtccctcgctccctccagaggctgggctgtggtccccctgtccctcgctccctccagaggctgggctgtggtccccctgtccctcgctccctccagaggctgggctgtagtccccggggcccgcctgcttgccgcgggggaagatgagagccagccctgggagcacccgggcccagaacagggaagggctgtcctcaccccagcaagagctgggcagctgggtggagcagggctgggacacgcgcaccgggacggcagggcccggcctggctctccaggaggctgggactctgggccacagcatgagaagggctagggccaggggcccaggccagccctgcttagccacacctgctgccccagccactgggagaggaagccggccatggggaccccagctgaggtcccgctcgcatcaggcacagcccctgggtcgcagccatcgcgcggcactatggagatgctgtccgcacctcccaggtgaggaagcccgcagcctggagcggccccacggcgcacaggccccggccgccccacgaaggcacgtcccgcgagcagggctgggaccccgccctccactcccccgaaagcgccggtgccacctccgctcaggctcccgcccacggggcagaggcagggctgcagccgggtaggcatcgggcccgggcgctcaccgtcgcacaggaagccggccagcccccagatgaagtcggagcagaggtggcagaaggtgggcttggtgagcgtcaccttccggaagctgtgtcccggcgcggcagcggggcccggggctctgacgcccgcccgctcgggtcccggccccggccccggccccgggcgcgcgcggcctcctgagcccagcacggggctgcaggccgggctgccggggcgcggggagccgccgcccagccaggcgcgggccccgggctcggccgccgccgccattcccggcccgagcggcccgagcccctttaggtccgcgccgggggtacaggagccgccgctccacggcccggtacactgcttccgactgcgcctgccccactgcgcaggcgcgggccgcggggcggggcggggcgctgctggtgggcggatctgggggctggcggggcggggcctgctaagggtcgcagccgtgccccgtcgatgagcggggctgggggcgggccctgtgatcgggcggggcggggcctgctaaggggcggggcctgtgcgcggaggccgctcgcgaaccagccgtggggaactggtccacgtgggctcggtttgaccgcagccgggccagacttctccggacgccgcacgcgcggcgttgtacctgcggggtcccggcccgcggctgcgcagacaggcgcctcccacgcgagacgcggatgctgtccgaggcccccggccgcgcaggacgcccccggcgaggggcagcgctgcgggcctcccacagtgggtcccggaaagcggggtttgcggtgcttgggcggctccgtccgtggggtcttcgcacgcgcagacttggccctgcccgaggcccaggacccccggcgcccgaccgctgtcctcactgcaacgggggacccgcctgcggcccggggctgtccgctcgcgacccccacccgggcctcacgccgagcgcccagctctcctgcctcgtgcgcgccacgggtcttgttcaggtggcgctggtgtcctttgagagccgcgtccacgcgggtcacccctccccgccgctggcagcagtctgggtccttgcccccgtgggcctaactgtggataggagtctgcgaagcgggggaccccaccccgggccaccgagcggggacctgcagagggcagggctccagggccatcgcagcaggcggtctcagggggcaggaagagcagggaagggcctgtggggagacgcctgaaaggggctgggggctgtggactctggagggaaggagccgggagacctgtcctaggggctgtgctggtgagggcacccagaccacaggggattccaggaatggagggtgagccggggacccagtctgaggagggaggagcaggcccctgagatggtgaggggggagacgcagtcctcaaccagggaggattctgtttgtccagaagctgctggttgagctgctggggtaggaccctgggtggaccccagggtaaagggaatgcagccaaagcttcagggaaccttcaccctccaggagctgcgctctgggacagacagcaccctgaagaatgagggctgcctgggggcagcaggaaggcgtccaggcggaaagccggagcagaggccctgtggcagggtgctccgcagaaatcctttcctgatgcccacctatgctgggaggcccggagtcaccacccctgcattccctgtctcctgtgccagaccccaccccgagcctgccctcagccaggccccaagaccccctgtgcctgggccctgggagagctaggacccagccttgtggcccatgaggaggaggtggctcactgagcccgtggtgctcatggcagtgaaccacggtgcaaactgcagctggcttctgaggaaaaactgtttaaggacatacctttctccatttaggagacagtggagagcatcaaaaacatcttaaaaaggaaaaccctcatctaccatttctgccagaactttctgctttctgacgcacacgttaattaaaatggcgggcaaagcatccttccagcaaacactccacggacttcctagaacgtcctccaaagccaccagcagcttctcgctgaaggggccttaaaactttgaatccgctctccctctccctctccctctccctctccctccacggtctccttccacggtctccctctgatgccgagccaaagctggacggtactgccgccatctcggctcactgcaacctccctgcctgattctcctgcctcagcctgccgagtgcctgccattgcaggtgcgcgccgccacgcctgactggttttcgtgttttttttggtggagatggggttttgctgtgttggccgggctgg

SEQ ID NO: 316835 - DNA, 4001 bp, Homo sapiens
ttagagaaatcaagaactaagtgttccctactttaccaacgcattataaatgtcattaaaataggctgtaatgactcttaactacagtactgaactgtgtgctgctgagtgaaaatgacaaaggcagggttccagatcctgctgtaaacttgcacaagccaccttaactctgttctccacttctcattccttgattggagccgcgtatagtcttttttaagttgcttccagctctgagtctgtgacatacagctcagaggtattaacgttttgtggggcgtaatggtgggggagggtgatagcctaaagagagtctgtcttacaatgtcattgtcttttttacaatgcctaatatcgtaaactaaataactcacaaaattaaaatgtgacatgcttttgctttctattgaataattcaacatatggcaaagcctcaaaaagtacaccctatcctggcttatactctacaatgacactaaacatatccctggaaatcaatttcaatgaagaactttagctgaaaaattcaaaacagctatacaggtgacttgacacagtgattctgtatcacaagtacacaataaaatgatacaattatgcaaagtatttggctactcgggcttttgtgggttttgcctgaattatccaaacaggtctttgtacttcatcaatgaaaacacacaagggacaagaaatgattttcacgaaattgcttaaattaactgctaaattcctctgtacctttaaggaaaggaatctggaacaccaagagtttgtgtaagtatttcaactctcaacctccacatgggcggtgtttcgccataaatactaaaaacacgttttgaacatgatccctgtatttcaaaagctacttatgaagaaaagtgggacatgcatagaaaataaatgatgaaaaaaaaaaacaatgccttctaatccctccccatgggacgatgttcagtaaccagttttaaccaaagcaggaaatacaggagatggcgggagcgtaggcagagagcggaagtttgctagtatctactttgaagtgtttgaatggaccaaggcacgctctctcccgccaaactataaactcagtcgccccaaaacaccagccttccagcccatcaggtatattactccacgttttcctttctcccggcaggtcctctactcccacctcccccgagaactccctatttgctggcttctctcaactcccgccacccccatcccagcctacattatgatccacgcgctgctctcactttccgccctccgcctttcccgtctggagtgcctggccgcgcccccacccaggccctccccacggcccctctggctgggaagtgcctgctgcccttggaagcgaatactcccaccgcgccctcccccaccctctcctccggctccaggccttcctcgggaaccgaggccacgaggtccgcggttcactcccgcccgacgccctcgcaaatgactcccgctcggttcggcctgggggaggaggcgccctcatggctactgcaggcctctccaccctccggactgggctgggcagcggccccgtcgcacgcaaccccccgcgcccttgccgggccgaacgggcgccgcgcttctcctacccgccgctagtgaacccagcccagagagaaacaaaggctcgggctccaggacccgctcggccaggccagccccggcccgctccctgccaggaccccaacaaagcccgagctgccgcctcgcgcccccggcctggcttacccatcggtccccgcacgcttcttgccagaggggtaatcctcccctaggtccaaccggtgccgcttggacatcctcgcactcttcgaacgggcagttattaaggaagaaagctggctgctgtatgggcacagtcgaggacagccacttaactctggaggacccccacccctcccgctactacagcccacacggtgcggccggaaccaacagctaaaatggcggcggcgacgagggctgggcctgcgcgcgcgcgcgcttccgcagcgtgcgtgcgtgcgagtgtgcgtgtgagcgaggtgcgcgcgcacgacgcccaaaggcgggaactcctgtcccgcccgctgcctcattggtccgacctttcttgggtctcctccctcttcctgtagctttcccctcctcggagcggctgttaggaagaacctgaaggccttcactttccatttcaggctatccttgcccctctgagtcaagaaattgagaaagtctagtcctagttaggaaatcctattcatttctattaccccggctttaagggaatctcagacccagagaggttgagaaacgaatgaagatcgtacagctaataagtggcagagccgggattggaacccagctatttagtaactccagatctggaacttgcggccactgcgctaccctcagttgcagtgaggggccgcgcgatggttcacgcctgtaatcccaacgctttgggagaccgaggcgggtggatcacgaggtcaggagttcgagaccagcctggccaacacggtgaaaccccgtctctactaaaaatacaaaaattagctgggcgtggtggcgtacgcctgtaatcccagctactcggtaggctgaggcaggagaatcgcttgaacctgggaggcggaggttgcggtgagacgagatcacaccagtgcactccagcctggacgacagaacaagactccgacttgaaagaaaaaaaaaaatcaattgcagtgaggaaactgaagtgagaaaatgttaaggcttgtcatgatctattttgcccttttcttgcccagcacggacaccatgcacccaagctatagatgtttttaactagaatacagagaattcgcagtgagggcacaatttgcttttttgttttttgtttttctgtgcctattaatgcactttcgcagtgttaaataacaccctgcaaggtagttgttattttgtagacgtagacgcaaaggctgaggaaggttacatctcctagccataagggctgtacctaaagccataacaaggaggtggggcaagatgactctaaggatttttgtggatctctccccctagaatatgtctgcttcctcagttgcatttgttcccagaagaaatgcacaagaaaagatctgtggaccatctgcagcagggtgatctctgttgttcatggaatggcttggtttggctgccctggaagaccatactctggttcttatccaaatctcaggactgcaattgctaggattaaatgcaacttaaatattgcaactgatgaggggtttgtgtgtttgttttgagacagtcttgctctgtcgcccaggctggaggacagtggtgcaatctcagctcactgcaacctccgcctcccgggtttaagccattctcctgcctcagcctccctcctagctgggattataagcgcccgccaccacgcccggctacgcgcccggctaattttggtatttttagtagagacgtagagacgaggtgtcgccatgctggccaggctggtcttgaactccggacctcaagtgatctgcccacctcggcctcccaaagtgctgggattacaggcgtgagccactgcacccagccagcaattggtaaggagggtttttatttttttgtaccaaatccacattggaaagtcaacacaaagaaaaatgagtatatttttcacttgtgaaatattcagtacaactttctatcctaaatgtaccatagtccctactttgtccctggttttgctttcacagtacagtaagatattctgagagaaagaccacattcacatagcttctattacagtatagattctccttgacttatgatggggtgatggccatcgcaaagccatcgtaaactgaaaatgttgtaagttgaacatgcagttaatataccgataaacccatcgtgaagtcaaaaaatctggtcaaacaattgtaagtcaagactgtctgtatgttgttataaatgttttattattagtt

SEQ ID NO: 316836 - DNA, 4001 bp, Homo sapiens
gctgccaggggttgacacttgtgttgtgcgaggtgcgtgtgccattggtaaaatggctttctcagttttggcttcccacaaaaggagcggaagggggagctgtcatgattcccagtgcccacagagccccctctcctggccacagcgcgccagccacaactggtaccgagtgtgcgcgctcgtctctgtgcgtgtctatttgtataacagtttgcaagtggctttcaatctatctgtctgtatgacagagacagaggcgcctgcggaaagttccctctctcaaaaacgccttcagtgtcctgctgtatcgctggcgcctacgacgctgtcattgtcatctcatcattttgcttccttccgggtgatttatgtacaattctgcgtgagtgagaaatgcgcgtctactggagttgttttgtctgtgaccttacttctttgaagagagtaagtggttggaagggaaggagaccctgaaaaggagtaatgtcccctccagattgtaaaatataatggttaaacgcccagtatctcaatgtctagactgaaatccctctctgccacttatactagctgtgtgccttgggcaaatcgttaatcaatccgtgcctcaattacttcattagcagaatgggaaagcaacagcatctagctcacagagttgtgaagattaaatgagtgaatatgtaaaacgcttagaactgtgcctggcacgttattaggtgctataggttaaatgctattaacatcttcatcagttgcatcacagtgttaaatggaaggaccatcctgaccactttctccacaggaaagcactagatcttgatatgtgcccacgccccagagcaaaggcgagacagaatcctaaccctttgactccgtgcagtgcaggaccagcagccacccagacaccccccgcccacgcagaccctgttcggtgaatccctccccagccgcctgttctctgtatctggggccacgctccgaatgttgcaagatgcaatggcaaaccgctagcccaagagagctggcccctgcctcttctgtctgaagaatgtgtttgggggttttcctacctgccccaggtttttgcccttcttactgccgccgaatgccagtccttggtacatgcccgcagatcgattggcggcctgaccaggcgtctccccgcccagagaggacttgatggagttgagtttggcccgcgaactgccgatctgtgagctctccaccatcagcaccgcggccagtaggagcaggcagcaggacgaatccttgctccgcatcaacgcggccatctcccggcgagggggtccccaggaagacgcaaagcccggaggggtgggaatgcaaagggagggaggaccccaacacggggcccctcacttgggtcgcgggggcttgcagattgtgttccctcaacccttcctggttcggggacccaggaccctatgaactcagtctcacgcctcaggacagaaattagcggaacccaagcgagacccgcttctccaccaggacaggaagttctgcaataactggaagcaatcaaatgcgaggcgctttctcgccaaggaggcgtgacccaaggtgcaagaaaacccagccctgtggatcgcaccgcttccgttccttcttgccccgcacctccttggtcccgccgggatctcggcggtttaactctcctcttaattgatcaggaggcccgcatcagctccttctccttcaactcagttgcttttctctcctctcttttcctatcctttatgtgtcaaactttgcaggacacagtgctccttttcaaagttagcaggcgctttagtaggggatcaggagacgtccccggaccgaatcctcgagatctgaagagaatcgaggtcccccacacgcgcactcacagttgccccgaagcgttgtcccctgactcacaagagacagcgaatcgctgccagcgcagcgatgcctagggagcggacttgcgctacgctcgccgcgggctcccgctttctctctctctgctctctccccagtcctctttgctttttatagcttcccacagtgaggactttttttttttttttacctccgcccccaattcaagagtgacaaagagtgaaaatttttctctcactccccaccgcttccgcccccctcctctctgcgtgctgcttctgcttctgcggctttcactccagcttttcctcctcctcatcctcccgctctgtctccacccacaactactggaaaagggggatctagcttttccatgaggtgaatggaacataggggctcctaattcctgacaacaactccagcggttggaggggtctttggaaactggcagagaccaaaggtggaaacggagtggggcaagctgacaccacttgatcgctgccaccctttcttagatcttcccacccatcttcagcccctgactccgcgaggagagctggaaaagccctatggaagctttagagaagtgagcatctgcgcatctgctcattagtattgtgttctttgtgagctcacgtttggttttagactgtgcctcccagggagtgtgtgaagctggagccacataggtgcgccagggggtggccaatgatccggatagagggtctggaaggaaaggggcagaccaaagaggggaaaagatgagcctgttcgatttgggtctttttagtctcctccttcggaaccccgggccccgccgcactcgtagaatatgtctatgtctctgagggactgggaagaaggggatgctctgggtacgctccaagggtttggacctcacagctcgaatgagcatctttaccatgccaggcaactgctctttttgcgaataggaaatcccagataggaatgaacgggggcagggagcctttgagatcctgtcttccttggcttcctgccttctagccccagtgaattacaagagaagccattcctgtcagcccccgggtctctccaggtccaattcccttcggccgaaggtcgaaggctgctccgggaacgactgggacgcgctggcgcttgggggcgccagtggcagccgttcagcgagccacggaattgctgcaggagacaagcgctgagttcggtgatgtctggtggccaagtgcgagactttccaagcaaagcaagggattgttcgaaagttattgcatttctgcttcgcagacactaatgtccaggagcagagaaatccaagcattgagccacaacttgaagttagaaggcagctagccgccaggggaggatacaagcagcatcctcttcagaatttttggacctagatttcacagctttcacacctgatcctggcgcatgtccatgagtacgaattaaacttgtcgctaagtgagaacgttggtgactcttattttcccccaaaacaacgcagagttctaaagtgtggatttagagctattttctcccagacagctccagttttgcaaatttctcagtcctgacctatgagtctgtctgccctgaaattcttcattttcagattttttttttaatacacaaggaaacggggattaaaatatgcaccctctggcatgtgttcttatcttttgaatttcctttctttaaggtagagatttttcacattttagtgtgtggggttttttttccactttttaaaaatatgccaggaataacaatatgggtgacccctgaaggacatcatactaagtgaactcgaccaatcacagaaagacaaatccacttataggaggtacctaaaatagttaaatgcatagaatcaaaggttggaatgatggttaccaggaattggaaggagaggagaatggggagttactatatcaatgatcataaagtttcagttaactaagatgaataaactctagagatttgtcatatggtattgtacctatagccaacaataatgcattgtatttttaaaaacttattgagaaggtagatctcatgctatatagatataaattttatatgtgtgtgactttatatacatgtat

SEQ ID NO: 316837 - DNA, 4001 bp, Homo sapiens
gtagaagcagataggcagtagccatattctgaataataaatgtgaaccacagctacaagcctgcaattaaaagtccagaactttgagttcttcttcagtgattggttaatgttatttctacattctacatgctgtcattctacagtgagatgacgtaacaaaaggaaataaacaacttgagttccatccatttggaaggcggtgtattagagaatttctgcccctgtgaattgttttcatagagttgaaaagagccaaatgtttagaatgtggagagggaaactaaagtcaagatttcaggtgtgtagccaaaacttctttcggctcttaagtaaggaaatttgttctagcattttctcaaggttaagatacatttgtaaaatatatatcttcttttatgtaaaccaaaatgaaggaaataggccaaaagaagaaaataaaggtttgaaaagtcatagactcttttttcttttggaaaacaattcatcatattaatttgctttatttgtcttagtattgttatcttcaagaacacaactgaacaatacattcattcattagcagtcagtaaatatttatgaacatgcaatgtgttaggcacttttctagcccatattctcaaaaccaacaatttaagaaactctaatattttggtagctttctccatgtacaacctgtaaatgtacattagcaggaaactttaataataataaacaataataataaaataagttggttttataataataaaattaaccagaatccaactaactagaacctgctagaatttgttttcttattactctttgaaaatagaatcaaacttggccaggatatgaactctaccaggaatccagagaaacaaacaaaccaaaaaaaaatccaattcttcctattgtatgtgtcttcaggtcaattacgatgaatccaatattatatgcttttaatcacaggaatatacctctgaggtgcccccaaaattaaatatagatttggaaggcctctaagcatctgaggcacattgttttacatcaccattttcaggtaggtaagtggactaataccctttagaaaatagtttgttcgcatttttaaacaacaaagttaaaataagatagtcaagcctcagttaaacagaaagtatggttaaccacaagttactgctcttaaggaagacaagttgctaaaacacatggactcttctaaacgtcacacagatgaagaagtgcactaaatacagtaaataaaaatacatatggacattttaaaatatatgttttaaaatgcaatattttaaaatataattatattcaacatttattgaattctaactgtattcaaggcatcatgctaacatgaatacaaaaaacataattatcacaccctcagttatttcagtagtttaatcatcttttagttacttatgcagttcataataaatgttactagatgctctctagatgaataacattttaatttaaaaaaaattctttttaaagtcctgccattcaataagtttagcttttttttcacaatcttgtaggttgcaaacattcccttattcatgaaacacactgtaaaagttttatacgttttgctaattaaaactaaatttcaaaatgaccttccatctgcctcctgttctataaactatcccttttagaagtgtcatgcagagatctaattaaagcattaccaagaaaaacacctggctgtattgtcttaacatgtcattttcatatcattatttactgtggcataaacaacaggcacaaaaataggaactgtttttacccaaagcgcagctctcccatctctctctacatggtataatgcctcaaacatgtatacatatttaatattttccaaacaaccagcaaaagtcattttaaaaaattaaatgatgaaaatgacttaccctccgtagttcacaaagaattttttcaaaaagtctcaaaaatcaggttgatgttctcaaagaggaaatctatgcccaatgaagccactcttgtgttgatattctggacacttctctgatggtgcaggaatttaaactctgctgcagctcttcatagccaatcaacctcaggctgggggtgactgacatcacaaggtgtcaccgggaccccggtacacccacacttcctccagctggcagaggcacattttccctaaaaagctcttgtggttcccaaatgactagactagtttccattaaattgaagatcttcccaaaactttattttgatttctaaatatatgtcattcacattcaggcagtcttatgaacaatgacaatgtcttctacccaccgacagatcccagcagacccaaggatgggaaaggcggaggcaggggtgggtagaaagtttcctgttaatgtacatttccaggttgtacatggagaaagctactaaaatactagagttccttaaattgttggttttgagaatatgggcttttatttcttcctttttcctcttttaacaacctctactactcacctccttttcctctcatctccccacccccatatacacacaaagttcccaaactcctactaatctaataaagcgtccactaaagtaccccccttaagtagctattgtgttattcaagaaatttagatctaacacttaacacttaatcattccctgtttgccacattttaatgattctttgaaatcagaattggattaaggggaatactagctgggtagcatccaaggaaactaatcttgaagggactctgtgccaccactgaaaatgtaatgaaatggataaaatgatatttaccaaaacattttcgaggaagcgtactaaaagttgtagggagctggaaatgggtttggcaatttcccaggagcgtgttcaagtgacggcaggatggccactgaacaagaatttagagaatatcagctgctggaccttaatttccttaagagtagggatgtttgcttgtctactgatctataatcagtgcctggatacctagaacagttcttaataatcactcagtactctttgaatgactgagtggattggcttgaaaattagccaaactattaacttgattacagtatctgcataactcactgtaacttttaaaaaaatgctttaattgttaaaaaaaaaattgagctgatgctcctaacatggatctagaaaattagagtgcccaatttattcaggcaactaatgtcagatatatggattatcaacatatttagtgtgaactataatatgcgggggagggtggtgcagacaatgaggaaagagatgtctattttcatttagggttgattagaaagccaaagtccatatggggaagctataaattccctgtgatttgctctggttctgaattacactctctgatggtttcatgggtcttaactgagatctatgctagaagaaccttataatcttatgacagaattggattctgggcagatttgggcagattgcattacaagacattattttagactctcttcaaatccctacataaaaacagaggagcaattagataacaaaattgaaaactgtggataacatttacaataaaactaggcatttttgttatctattgctatatcaaaaaccacttcaatactttgcattttaaaacaactaccattttcttatctctcacagctagcattgtagtcatctgaagactcagttggggcagaacatttcagatgccactttcatagttgttacctgagagctcagctggagctgtaattctgagcactttagttctttacatggcctctccttggcttggccttctcacaacctgaaggctgggggccaagagttcctagaatatcatttttccatattctgttggtcaatcaatcacaaggagatctcagattcataaggagaaatactctctaccttttggtgtcagatcaggatgcacatgtatagggagcagaggaaacgttgaggtagtttttgattagttaccaccccttatgacaagttat

SEQ ID NO: 316838 - DNA, 4001 bp, Homo sapiens
accacgcctggctaatttttttgtatttttagtagagatggcgtttcatcatgttggccaggctggtctcgaactcctcacctcaaatgatccgcccgcctcggcctcccaaagtgctgggataacaggcgtgagccaccgcgcccagcctaatcagtatttttttaaagaggaattcttcacgttacaacataaatgaaacttgggaacattatgctaagtgaagtaagacagtcacaaaaagatactgcatgaatctacctatctgaggtaactaaagtagttaaattcacagaaacacaaagtagaatggtagttgccagggtcttaggagacggggcggtagggagctgtctgattagtacacagttgtgttgtaagatgaaaaagttctgaagagtccttgcacaacaatgtcaatatacttcactaatggactgcacacttaaaaatagttaagaccgtaaatttggcaggtttttaaaccacaacttaaaaaattattaactcttttctttcattttattttcctgtcctcatgggtatagtgttagaaggcaatgtaatggaaaggatagagagaaaagcaaagagcacagggcttcaacgacgtagagaaaaaaatttaagagacaacaaaacaagtggccccatattttcattaataattttctacaattaattgaatctatcgataactttcttcttaacctggaaatactaatggcaaggcaacagtgtagcggttaaaggccttttcgagtctgaaagttcagctactattctgactttgctactaattgttgtgtgaccttgggtaagatactttcattcattcgctaattcattcattaattatcagaaagtctgtttccacgtgggtaaacctggtcaaatgaatcctgcacctctacacagaattgttctgaggaataaatgaaataatccatgcaaaatgttgggcacaactattggcactttgtgctcaataaatgttggctattattactccgaagcctatcgagtaggaaaataaataagctgacttcaactaaaggaaacccagtaccatattcctcagagatttggttcgtcgataatcatggtgttatcaaatcagatactcttcagcaatcattactgactcttgaccattcttgccgaaagtgtgctcttctcttttaaaggaactctctcccagggaaaagcaatgtcatctcaggtattcgatgtttgctttgggaacagttttctacagatctcagaaacatggaatctgagattagccactagagtacaccattcctctcacttcgataggggcctaggccttatgtaggactgagaatggggagggagggggccacataaacaacacagatacaaataaagcctcactgtggtaagacgggaccagacaagtctcctccagggagaatgaaacccggacatttaggacagcggaacgcggagccggcgggcaggcgggtgcagaggaacctcgcgcagcattccccgagccccagcccggagccggggctggggccagggcgggggtgtgtcgggatgctccccaccgggcctggggctggggctggctcagacaggccgggggccccgcaggcctccaggaggggccgaggtgggggcaggggcgggctacgcggtggtctggggattgggcaggaagagaagggacgctgaggtctcaccgcgggccgagggcagtgggtagagcttctcggccttctgcaggaagcgctgggccttctcgcggttgccggcgttcagggcctcccgggcgatctcgacacatttctcagcctcatccctgttcccctccatagcttgctccttcttccgtttcctccggcagcgcagctaagaagggcggaagccgccgccgcggaggaggcgaggcgggaccggctgggggcgtgcggcggcagcggggaggagcgcaggggaccgcggcagcggctgcgacggcccgggcggacgggcgggcctcgcagctccgcctcctcacggcggcctccccgccccccgcgggcccctagggcgcgatccgcatccgtcccggcccaggaccaacctcctgggccggggcgtccgagctgactcggtggtccgcgcacggcgccagcaggctcgaagcggacctgcccgggaggcggacgatagcagccgggctgcccatcgcggggaggggttccgcccgggacccgattgccggcattggtagcgccgtgccctgtgacctccaggcgaggccctcgcagctcaggccaggaggacagggtccgggaaggggacactcgttttcagtaaaattgccaggacttggaggttccgcctctgggcccctcaagcgagggaggatgcggtcaggtgaggaccaaggtgtcagtccagtctcagcacttccgggacacgttagagcgtcgtttgaacctaatcttagggcttgtatggcagccttatttcagctacattttttctgacccggatgtctggctatccaaagtacaaagcagtttaatttgtagcttgcaacgagtggtgcagatcgaccttaatcctgtgtagccaaaacaaggcaggaatcagcccctcaggggctgccctaacgaaagcaaacttttgatttcaccttttccgtcccatttggataacattaccacttggaagtaccgtgtcttgttagtcttcgcggtgggggtggggggaatgtttgctatgtgcaaattttttaaaaaaaaacatgacaaactgtcaaaatgacctgctcaacccaaccacaaggtaacaatttttacataatgctgtgagccaagctgttaattctgctaactaccataactcggtactttcaaataagaaaccctgcttctcttcgataaaatggagatagtatatccccaatgatgttactgagtacttaacaacttcagacttcaaagcagggcctggcacgtagcactattatctttaaagtttaaattcggagttcattctgtggatatacaggacattcctacctattctctccctccccaagtccaccatgctaacagcatactagtgcagtgctgtcacacagcaagcgaagccaatgtacaaactgaaatggtcacacttagcctaagaaactgacaatcccactccagctcctgccaactttttaaattaaaactttagtagctcatataacattaaaaaaatatacttgggctatctcactttgttgatctacagatttgacagttcagtcacaaagaaatgtgcttagttattgctgctagatgagatactcaaaacaagttcctattacaaccaagcaaatttaatacacaactagtttgggatatgacctttattgaacttatccaccagagtggaaataatgtctgtacaaaaccaaatgtttgttactataacttctgcatcacaattaaaatccaaacagttttttaaaaacagtcaactcaatcaaaacccactacttcagaatcaatagcttctttgaagccacagtaacacttaaatatggttaagactcgaatgcagaaatttggttggttggaaagctaattaaacttccaacttgctcaaatagaattacaaaaaggcaaaattgtgtttttcacagagatacagtccactggaatcaccaacactggacagctgttagagtatttagagtcctgagataacaaggaatccaggcatcctttagacagtcttctgttgtcctttcttcccaatcagagatttgtggatgtgtggaatgacacctaggagagtgacaggaattaattctacttaagattttttaaaaaatcacagtatttgaaaccaagaaagtgtatactgttcaacttgaaaggtatctttaaaaacatgcagctcaagtatgaagtaaaaattcattgagttatacatataaatcaaatttcatgatacaaccatacttccatcattgaaaatatacttaaatt

SEQ ID NO: 316839 - DNA, 4001 bp, Homo sapiens
gccaggggaagaggcatcagggcctctgagcggagaggaggtgccaggctggcctggtcagggtggggaggtgggcgtgagaactccgctctgtcccatcccctcatctgaccgacctctgggcaaccccacagggtgtcagtttcaaccctgggctgctggagtgaccaacacagaaagcaggtgtccaaagcaatgggtcccaggccagtgagtcagtgggtgctagggacacctggcctcaaggcttggaatgaacatccacccagagggggcatggcaccttctactaccccacatcacctcccacgccagccccagaaggctgcagatctcaactgcgcaggatacgggataacccagcagacgctcgggagccaccatgttcacctacagactcacagattgtcccacctgggggacccattgcaaactcctgtcactccactcaggcactcaccggccgggggagcacaccctcttgaggctggcaggccctgcctcctgggactgtctgatgcagaaagaaaatccctccaacagggacaaagacttctcccccgacactcctctttgggggctgctgtcccgggtgccttcctgggatgcggcctctctggagggtctgcaccggctccagcccagcaccatccaccaagcatcacctgccccaccacggccccgacccagccacagctgactaaagcctgtcatccgccccagcctggcagggcctctcactctgcccagaccccatcccttcctataccaggtcccctgcagccccggaggacaaagacgccctcccaggctctgtcggtgcccccacagctccaggcaggaggtctgggcacggagggctgagtggagaagtgaccagcgtgcagtccaggccctgcaaggggaggcggaggcaggcaggaagtgctttcctccaggaccacctgaggccctgcagaggggacgcaggagggatccctgccccacaccctccctgggagtcacagacacccgtcctggagggtgctctggcagccccctggcgtacagccccccatgcacacaggccgagcatcccacccagacccgggcctggccggctctgccgcacctgtcctctggagcagctgcaggcccggctcagccctccctacaggcccagcgctgcaggcggcctgggctgccagacctgggggctccatgctgaccctccccaagctggggtgctggctcagggcggggactggggggggacccctgcctcctcccagaggactgttcccccagcaatgtggcagtcactctgccctgccctaccgcagcccagcctctcgtctgcctgggaggggtccagggtcagcgctaacccacgcagcacccctggaggctgggttcgggggccctgctctgagcgtttccacaagcacagctcaaccctcaggtatgtggggctttgcttctggggggccccttgctgctctgctggggggctcagggcctgcgtcccctccgcctacagggccaccaggcagcccctcgggcctcagtctgccctgctggaaagagggttcttccgtccagggcccccacctgcgctcccaggggcgccggggggtccgggtccgcacggggctctcgggtttcccggcggggtgacagcggcggcgattttgggcaagctggcattactgccccgggcctcggtaacccgtgtcgctacccccgcgccccccgtcccccgcccgccccgctcacctgccacgggcgacggcttccgcagcaccagccacctactcttccactgcggggacaggggggagcgtgagccgccgcccgcgcccgcgccccccccccccgcgcccccgacgcgccccgaccttcttgccgtcccgcagcttgacctggccctccaccagcgccgcctcggtcatcttctgtcatggttccgcgccgccgcgctcgccccggcgccccagcccagggtcactttcaaaatagctcgcagggccctgggctgggccaggagggcgggcccgcgggcagggcggcgacaccggcgactccagggccggcgcgggcggggctccttctcctgcgggcggctcccccacccccacgggcccctctggccccaccgtcccgcggcggccactggagccgcccgccctctggagcaagcgcaccatctgggctcagacgctcagaccagcgcctggcggggcgggggtcgggcggggacttctttttcaaaaagcagagacaaccacctagcagacatcggccccgctctgggcactgctcccaactttaaagttggtcttcaaacaatccggcttcccagactggcatctgcccctaccccaggggtcactagacacccggacaacagactggccacaggcagcccaggcctaggatgctctcacatccccaggcttcccccacactgaggtgacccctccccaggcaggcagtaggggtcggggagcccctggcagcctctgtctcttcctccatttctgttcccattaaaagcctgcagggaccccagtgcaggtgggcgggtccaggacccacagtgccgcctcagggccccaggtctccacctcttctgcccccatcccaggcaagagcaggccctggttaggccagccggctccgatgggcagaggagctgcctgctttgtaaaggacctgccagcagccctcccagctgggtggactttgcgcttctggactccccctccttgaccctgtggctccagtccagctgtccccaagctctggcctgggcattagatgtcacatccaggttcttctgcagagaggccatgtgctttgggggacctggcaggtccgtgccttgggtgtcagccccatccgagagacggcctccaccaccctggggttggggacacccagcagatacgggaacagcagtggggaggggcgatggcaccctagaagataagcacctggacaaacagcaaagctccgtccacatgccctaccctagaccccatcctcacggggctgacggttctcgggggagaagaaggaaggggtagacagtgtcccgttagggaggagacgtcttcatttcatcccatccagaccctaggctgggctctgtctgcctcgcactgaggagcaaatggaatcagggcagcgtgaggcctcacagccaggactgagccacatcggctgacctcagagcagggctcagaggcatcgggagccctgggcgcccctccccactgcccctgtgatccaagagacaggtctccggtgggccacaagggttggctttggtgcttcggtgatgtcttgtcagggcctcatgcaaggcgggggacaccaggcccaggaagcagaattttgcatcccccacccacccccgcagtcacctgtgcagccaccagccgccttccgcagaacagttgctgggtcacagagccccattcatgctccccacacatcccaggcccccaaggggctggcccaggacagccggtgcggaggcgggggccgttggggctgtagccacagacacatccgctgccctgggcgcctggcacttgcttatccctacagggagaggcagggccctgctgcattcctgagtgctggcccgggcccaggctcctgccatgcctggcagctgcacctgctcccacacagcctggaacacacaggatgccggagggtagacaactcccttccctgctccatgcggctccagggctgctgaaaggtggaggaagcttcctgcaggaggaggaggtggcctggctgccactcccagactggccgagagcgctgtgaccctgggcaagctcctgccccgctccgtgcctcagaagttatagccagaagtttccccagaagttatagccagggttgctggttgcaaatggagaaataggctggccactgagtaggaaggggttgattggaagcaaatcaggtctccaagaaccaaggggaaggctggagagctg

SEQ ID NO: 316840 - DNA, 4001 bp, Homo sapiens
ctgtggccaggagaagggaggcccaggtcccaccccacatgctgctcgcctctgccctcccagtcacccttccccgccacaccacggcgggggtgccagtgccaggaggcgccacatgtgagcttgctgctcacccgccacatggcctaggccttggcctcacttggacgttgggtcaagcgctgccctcgtggagcaagaggagcatttgagagagcccatggaggcacctggcccagcacccgccccgacctggggagccccaccgtgcccaggcaccagagcccctctggggtccagcaacatccctggccaaggactcctgcagagagtgccgcagccacagccaaggaagtgtgggtgagacaagacgagaccccctcagcccaacgtgtcctgagaccccacagccaggggacctcccgaggtggccttgggcctaaacaccgggctcaggcagagccagtcccgaccccagctgcagagtcagaccagctgcccccgggccaccgagctcgggcaaggccttccctgctcctgggcgtggaagatggtggtggtgggtcagagggtctcttactgcacagtggcagctgtggctgactgtcccagccagaaagctctagggccaagcgttccaacagctcggacccccgagggagagcacctgcaggtacgagcccagcccccgctgctctgaatccctcagcagggcttgcagaagcccaggctgcaatcctggcctggaaaggttctggttccttagctgggggtggggaggctggccatctaactggggctgacaaatcactgtggccccccgccccgggacgtcgcacagcctgccgagcgcaccctccccggccggccaggctcccacacgcacctggtagaaccggccgcagcccaaaggggcccttggtgggggagatgcctcggacgatgcagtcgaacaggaagctgatctgctccccctcggccgaggacaggaagaagacgccagcccctgcagaggaaggacagagacaggtcagtctggcccgagggcgggctggggaccctgaagaggaggaacacaggaaaccgcagcaaactccaccaagagccgacaatgacaccctgcctggccccacgaagtcagatgcccagagccgacaccccgcctggccccgtgaatccgggtgcccagagccgacaccccacctggctctgtgaagctgggtccccagagcctctggactccccagggaccccgccgcacccttcaaacttgggcgctggggtgagtgctgccccgcccatcctaggtcctgcagccgacagggcatggggaggagggagggggtgccctgccctggacagatgggtgcccccgcccacatacctgccttccgggcttgcttggggggatggggggatgtggctgctctgccacccagcaggcacttgatcagtccctcctctgccccaaggtcccagcgaccctgcccccacagccgtcttgagggcaaatgaagcagccaggagaccccagagacatcaagtagggtcccctcagggctccaaggccacaggagaagggagctgtgccacctggagctggggtcacatcccaggaaggctgccatgtgaccacacttccttcccccgggctgttgggagggctgcattcagatgtttgtaaaaggtgtggcacggcacctgcccacacatgctgcagccgtcactgctggccagcaccgcgtcctccccacctcctcggtcatctttcaggggaagctggagctgccagtgtgtgggtgctgccctgaggccgtgtgcagcatcctggggccagcatccacccctgcacccccacagcagcaggagggcccccagggaccagcccagcgtcactggcagagcgatgcagccgccacccgtggagaagccccagctgcgagtcacgggggcgctgccctcccggccaggggtgaatgaagccctggcggccgcgtgaatgggccactgggctggctgcacccggctggacactccggctggcgtcacctcacaggaatcccgcccgctccggggcctctgcccattgcccaaagaaaggtacgcaggagggaaggcgccggggtgggcaggagttggggggaagggaaatctcggcattagaacccccgctgcctgctgcccagtcatgctctgccttcacggaacacaggctgtagattccagggacacggaactcaggccagccccgacacgtggcgacgctgccggccccttggcagccaccccgggcacacgagggcgagcggcaccttgtgctgtggatgcttccttccacgtagtgtccccaaaccgggtcatgggacagcgccattcctactttagcaaaaaggacactgaggcccagagaaggcacgccacctgtccaccatcacacagccacgaggtggactcaagtccaagtcccctggccccctgtgcaccttctggcccgatagagcttccagtcctactgtgggtgaggggtgctcctgatcagaattggaggtgggcatggaggggaggccaatgcccgctgcgatgccatccaggaggatgccccgagaggctcatgagggccgtgatggggtggggcccccaagctgggtagggtgggcagaagagagcctgcaccaggccctgggggcaggcaaggagaaggccgtcatgctgtctgctggctggctcactcagtgccaggcagtcgctccctgtccccgtggtccacccctccctgtgaagggctcagccggcacagccccagctctcacgaaaggccaggctctctaatcctgagcttacagacagctggcagtggccacgggacaatgagtcccccgactataaaaaaccacattacggaaggagtggagccggccccgcattccatgcggcgtctgcggagcgtcactcaccccgaagacacggtcaaccgggcaaggcctggagcacagcccaccgccagcctcgggctcccacgtgcccacgcgacaccctcgccagccacccccatcatccatgccagcagagctgacatcagtggccctggaggaagatgcccatctccaatgctggtctgccaaggtcttgggccatggcctcccaggacaccgcacgactaggctctcgctgggcctccctgggttcatgctccacccccgctcccacccagccccccccggtcttgggaatgctcaaagctccctctgcacaccaggtctgcctgccatctccactcaggaggctgccgtccccaccctccacacccctacatctccactcaggaggctgccgtccccaccctccacacccctacatctccactcaggaggctgccgtccccaccctccacacccctacatctccactcaggaggctgccgtccccaccctccacacccctacatctccactcaggaggctgccacccccaccctccacacccctggccacctagaacaccccagacctttccagactcaggccacataacgacacctttcatgatgcttttcttggcctctggcccccttcagtcccctgaccccgacagcccctctgtggtgctctcacggacgcctcctctggggttcagccccacctgctgccgtcccggctgccaggctgagcaccttgccggcagggagcacaagccgtctgtggtctcagtgtccacccaagcgcccataaccaggagacccccagtgctcggccttgggtggaaagacataggtgagaggctgctgaccgcccccctgccccttccccaagacagggtgcgcatgtttcctgtttgcctgtgtgtttggggaaaggggggagaacagggcctgccccattttgctatatcacacaggtgtgactgcagcaaagccggccactctgtttcccctatccctgccctcagaggccgctccttctccagaggctggtccactccctccctggaatcgaagccagcca

SEQ ID NO: 316841 - DNA, 4001 bp, Homo sapiens
caattcttcgaactaccaatcaatggggtgaggtttctaagcacacgagctactacacagaaacacatgataaagggagcagcactggaaaggcatgtatttgcgtgtgtgtgcgtgcttgtcaatgtctgtgcggttatgcagatccatgagggggtttcttaatgcagtttaatggaatccattcggggtgaaaggtgttattttgtctaaagaaatctccccctcgcagtccagctcccagacagactcagcaacagggtcaccatctggggacgtctgatagatctggaacatgcgatcgaaaggaccctcctcctcgtcgttgtccacctcccggttgccgggggtaacggcgttgggcatcatgtggatgtaggcagctgcgatttccttgtggaagacgatgtcttggttgtaggagatgagctcattgctgatgttcaccgtctccaccggcgtgcgggagcagaagtggctgcaccccagcagctgggcaaacaccttctgaaagtcggcgttgaaggcatagatgacggggttgagtgaggagttagcccagccgaaccagacgaagacgtcgaaggtggtctcactgacgcaggggaagccggccggagggccttcggggtgtccactgcagaaagggaccatgcagttaaggatgaagaagggcagccagcaacacacgaagacccccatgatcaccgacagggtcttgagaaccttggtctccttcttgatggaagcgcgcaggctggtgtcgggcgcgcaggctgcgctgctccggcagctctgcgcgtgctctgcggccctctccagggaggaaatcctgcggatctgcacctgggcgatgcggtagatgcgcgtgtaggtcacgatcatgatggcaacggggatgtagaagctgatgagcgaggaagagatggcgtaggttcgattcaggctggagtcacagttctctgcattcacgtcgggctcccaaaagtcctcctcccagggcgtccagttggccaggttgtttggcaggtccagcccgccccaagaggccgcctggtccctgtgccagttgagctggaccggaatgaaggagatgaggatggacaaggtccatgccaggccgaccatgaccaaggccatgcgctgagtcatcttgcgcttgtagcggaagggcctggagatggcccagtagcggtccacgctgatgacgcacaggttcaggatggaggcagtggagcacatgatgtcgaaggccacccagacgtcgcagaacgctccaaagggccagtaaccggccacctcggcgactgccttccagggcatgaccagcagcgccacgaaaaggtctgacacggccagagacacgatgaagacgttggtcatgttggcgcgcaggtggcggctccgcacgatggctgcgcacaccagcacgttgcccagcagggtccagatgatgagtagggtcagcaggcaggcggtgaccacctgtgagggccccagtggcggtgcccccgccgagccccccacggcgttcccctgcgccagctgctggtatagagcgaactgccccgggtacgcggtgccgttgctgcctggcggcagcatttcgggctggactgcaggggcggtctgtgcgcggtcccaacttcagccctgcgacccccaggcagccccatcgggcaccccgaggatgcgccccctcagccaagggaccctcgagccccagagggcgctcaccatgagctgcgccgggctgcggagcgcgcggggacttctcttgcctcctgaagcgcctctggctccatggccgtggtgcgcccctccagtctccgcgatggggacaggaagcggctggtgctcgctgacagccagggctgttctcgggagtctgtagcgcgccggacggcagcggcagcggctgtgtctggttcggagcgagagaagagagcaagccgccactgaggggctggggcaggcagtcgcgggcgccaggctggcactgaggcgctgccgcggtccctggccgctcccaggccccgcgtcccgccccccgagcctccgcgctcgactcccgccccacctgtgccttggcgccctcgctcaccgccctcagcgcgccagagtgtaggggcgatcccgcaggtccgaggggcgccccagcgccagaccctagtccccgggccggggaaaattctccccgggaaaaccgaagggtgcttggcgcatccctggagccttagccctggccacgcttggggaacaagaggtggggtaaggatgaggacgcgagggcttccggagggggaaagagcatttgaagggtaagcggggcagccttggattacccacagacccgagtcccaatccggactttattcctggctctgcgactttaagggccctacataactttacccggccttggtttccttctccacagcgtgggataatgattcctactcctgggacagtgtcagaactcatggaagccgtctaggatgaggtgtccagtagacagtgtctcctaggaacaggctcccgcttcccccagcccctctctcaacaccctgaggctggggcttcagctgacctcttgggagattgtccttttccccaccaccgcccccagtccttgaacgatttttcctttggggaataattcggaatgaactcagaagacaagaggaggaagagagccccccacccccatagagttggaggcctcttctttgcagggcacttttacagcctttctctttttcaaccttgagagggatggataaatagctcagtgtttaacagaaaaggaactgacggggcccaaaacccaaactgaaaaaaaagaatgatggaaaacaataaagagggaaaacagtgttcctgagctctgagtgcacctcccagctgacaagttgcatttgtgaagtgtttcggcctctactggcgttaagctcagctgaaggcagctgggagagaaagggatgtgacagcagccagctgcatagctccggctgcgacctgctggcccagacacctgcagcatggtgaggtctagaaacagactggactttctcctcccttcctagtctccccctccaccaaacgcacctgtaccctggaccaacatctgcaagtggcccaccttctcagacttaagctgctcagcctacacagtcccttcccccaacctccttccccctcagtgctttttgccgctggagagggcaagaccatctgtccaggtgcctaaacctgaaactgaagggccatcctcacctctggtctctcctcatcttctgggagctggaccactcctctggccatggacatccctgtccagaattgtgcctcctccatcctgtttgatggtggcactttcctggcctccagtctctgccctgaccctctgtcttcccagcaggcagtgatctttcctgaatgtgactatgttcatgtcactcccctgatgaaacaccgtcagtgtgtttcatgatcagctccctgtggcccctgttcctggccaggcatgcaaggtcttttcctcatattgcccttgtctttgtccacagctcctgcttcttctcctttcactactccgaatacagcctggattcaagctgccgccaccaccaccgccaccaaaaaagaacacccattgtaaacggtcatgtggtatttcctcaacctggaatgaccttcccctatcttcttctcctggagaacaccaagtcatgatgtcagacaagagcttggattttggagacatgggtttgaattccagtcattcattcttttattcagcaaatatttaacaagtactgacatgtcccatatgttgttttacccactggttatacaatgggagggagagagagagagagagagagagagagagatgctattctaaaagcttgaagtctaggctgtgcacggtggctcacgcctgtaatcccagcactttgggaggccgaggtgggtggatcgtgaggtcaggagattga

SEQ ID NO: 316842 - DNA, 4001 bp, Homo sapiens
gtgcttcaaaggtaaaacacttgtcatccttactccaaatctatagaattgagctataccagactttaagagaaagaaattactaacatgagggagcctacgctagtggaaagaatacggggtttgtattcagagacctgggttcaaatgttacccctgctacttgctgtgtaagcttgagaaatttaagtaggtttattatccctccacctggaataataacaacacctgcacctcaggattatcctgaagtttggtagaattatctctgagaagccctctctgacgccacttcaaagggtatttggtatctctttcctttttataccaaggaagtttgcacgtctcactggtaacgcattgcactgtttaaaattgcctagttacttatgtgttgccctgatttcctgtaagctcctgaggcccaggagagtgtcttggtgattattgtattccaatgcaaagcacagaaaaaaacgttttctgaatgttgttgataaatatttatgactatcagcaatatctagcattgcttcaggcactttgcaatttttgaataaatgatagcaattattttatgggacttctaaaatcatgattcttcatccctgttagaattcaaattcagaaatggtctaaaacatgtttctgataagttggaatagacattttataatctgtgtgagtaaaaaaattaatttatattgcaagttggatttcttgaagtaatgatagaaaggagagttttactcctatttcatgaactcccaccagatgtatagattataatgctgcatgtcataaaatggctttgattgaatttaatggtggtagtgaaaatataataaaacttcactgaatatcaactgtcatgagaattactggcgttttctcacaggagagatgacacagttccagagctactgagggggaaaaaagtgctcattcttatagctgttcaacagaaagccaagaacagctagagctccttctgaaatgccatagattcaagtgaggctgaggtgacaccaggacaagtatcatgcagagctctggggcacagatgttgaaggccagctgtttactaagccacagttatcctgtactttgcagtcccaagcctaatcattacatagctctgcagaaggcccgtctgcactgtgatttggaagagcctcagcatactggaaaggtacctgcagccaaggccagagtgatgcgtgtccagtttctgagctacagttcagaaatctgaccactacatctctctttcagctccactcctgaacaattccatgatggttatcaccgtttccaaggcaggtgaatgacttcgaagactacaataaaaatggcccaggtgatctcagcatgaaacaaagacttcagaatttgtgaagctccatcagattatttcatttattgttactaatgaaatgagatttagcttcatttcatttagcaattagatttggcatcattagtgattgctaaatttcatttcatgtgggacaataaataataagtaatagtaagtaataaaatactaaaaagcaaagcctaattgaagccttgtttgaaagcccaaggtggatttttgaaatctgagttatctcattttttatcaaaactaatcaaagtgcccagatagttaattgtcaaatttccacctcagttggccaatttttcagtacgaggtctttcttcttcccaatctatctcttccttaggtcgtaattgtccgttatcttttatacatactatcaatatgacaagtcaaaaaggaagcatacaatctaatcattaaggggtactcgcttcttaaaatcaaactggcttcatctttgaaattcaaagttctttctaaatgaatcagttggttctgagtaaaaaggatatttcatcttaccttaaaaggcttcaaaaggattttgaaaatccagaatttcttatctttctctttgaagactgaaagtggcccactgtcctggacttttgcatgacaattttgtacttgccgaaatttaaactcagtttgataattttctcaaccaatcactgtttaggatccctgatatggggttataaagtgtcatcgagtctatgaagcacataataacttccccacttccttcacttggtgatatgtatttgctcactgaaccgttcggttccaaaaggactagacttactttcacttaattaaacagctcctatgaggctgtttcacatcttaaatatagagaatcagtgtaagatacctgaaaagagccacttaaactctgtcaccctgacatttcttgtcttaccaaggttggcaatctaagaaaactctaggtttctttagtaaatatgactgcctatttaagacccctatcattcttgaggtaggtattaaagtttctgtgctataattcaagaaactgtccacatgcagcagccttgacgttgcctgagggatctttaacaatctataaacagtaactcccctgaaatctctctgatttaactgaaataagcagtgacataaaagcttaaaaatctatcaattgagtattcaaactacatttcaaaaacagacattgaaaatgtcaaaagtagcaagatgtccaaaggtgcataaagacaacagatttagctgtccattatctctcaattatctgtgttagctgcagaatgcaaagtagaaaactagactttatgtctaacaagttttgcaacatgagtgcaccattctcttgaaccctagatgtactataatgcaggtaatccctaaactatttcttcaattcatgcattcaaaaacttgaccgtctttctctatatacttgtttagaattttcaggaatatgccaatttttgtgttacaatattaaagaaggtgaaacacataagaccactaatgctatatcactatgcaacagtggtatctccagaaactatatatacaaaaatatatggtatttatatacaaataaagctttatatgtagggaaaaagtaaggttaaaaggaagtgaattgaatgggaaggaaatttgccttgaagctgttttcatagtgaatgctttgtttttattcatatagcatgtttacttgggcagattaaagggcctaagaacttttaacaaggctcgagtcacttatgggagtgacacccttacccacacacacattcatcagtggaggttggtgaactaaacctgcctttcttttccttaatttgaattaacatgaattatggttagagatttcaatagccatctattaataattgaaagaaaaatataatggatatacaacctttaaacagaagtatcatccaacttgatctaattgacatttacagacgacttcatccaacaacagaagaataaacattcttttcaagtgtacctgcaccatttaccaagatagaacgtattctgagccccaaaatgaatctcaataaatttaaaagaattcaagtcgtacaaattatgtttactgaccacaatggaaggcaatcagaaatcaataacaaaagaattctggaaaaccgcaagtattttaaggctaagtggaacactcataaatagtcaatgggtgaaagaagaaaccaaaagggaaattcaaaatatatgggatgactgaaaatgaaagcatagcatatcaaaatctgtgggatgtcactaaagcagttatttaggatgaaattatagcactaaataaccatatatgaagagaagaagttttgaaacaatgacctcattttccaccaaagaaggaaaaattaagttcaaagtatgtagagaaaaggaaataataaagatcagaactgaaattaattaaatagaaaacagaaaaacaatagagacagtcagtgaaaccaaagctgattctttgagaagttcaataaaatttaggagattctttccagactaatgagggaaataaaggagaagacacaaatgagcaatatcaggaatgagagaaatgacaattctacagattttatagaca

SEQ ID NO: 316843 - DNA, 4001 bp, Homo sapiens
tcttttaccactggatgtacaatagtttatcaatgatccatttaaaatgctgggctgaaaattaggcgaacactccagatgaggcttgggtggcagaaacaccatacctccattatttctgccaatgtagatgctttgttttggagcctagtttactgctataagaattggattaggtttatactattcctcctgatgaatttgtgagcattggaaattttcaaattagtccttcagagaatagctctgaccataccaattctctgattggaacctgaagtggctactcaaagcctactaactcaggtcaaccttcttcactctgaagtaaactcttagcatgatcaaatcttatataatctctcactccgtcatcattcttcccactctcctatttgttcatcctgcttctcctcactactgaggtcacctgatgacttcttgcaggcttagtacctctctagtctttagaattcagttctgaactaaagaataggtaatttaaggccccatagcttagtgtttttaaagccatcaccaaatcatcccttcaccagtcagggcttttctttgggatccagttctgacaacttgtgttttgttttgttttgtttttgtcttatacctgagaacttgtctttatttttaactcctattctggtaaccaagtccttgtttttttctgaatatatatttgcttgttatattgccaaagaccatgttccactccctccagaggctaaaggtctcattgtgggctgcagctgatggcttctcagtcatgctgcctttagacagatttccctgatgcccactatttgccctttagattgaatttcttaacatcatctaccctggatttcctcatagatggaacctgcccacttatcttgatactgtattatttagagttgaatttcatgatgccacctatatgcttatctggagtaactgttgttatctaggattatattcatcagattccacattcttcctgccttactgtacttttccacatccataactggacctattcccaagaatccctctccagccccagtgcatggggatccaattccctatcccaacccactccagtcttcccagtaattttgcaatcaataaggctaagctcaaatgaccctagagatagaatactatattctgatataaaaaacaaactactagctctgcctcagtggcctgtattttcctgtctctaagtcttggatcctactaaaattaccgactctctctttcctgctgcataaatccaattcactctttaagcttcagcttaaatactacatttttctagcaaacttctcaattccccaccctacagatgggatttaaactgcttctgaagtccaaaagcacttcattcatgtgtttctaatgggactggccccaatgtccctggcattattgtgcatttgtctcaacttatttcccctttgaaattgttagtctcttgtggacagaaactctatcttagcctatctggtatactcatagcccctctcagatcttgccctaatcaatatttcttagagaaagaataaactaaaaaaaagaatacttgccttttctcgagacacattgattctctttgtcaagcagcacatgcagctgctggcaggtggaacgcagggtgcctgaggtgtgctccagcagctggtgaagggcactgctgagttcctgacccagaaagaccacagtggccatccaagtggccccaccagccccctcacaaaggtcatcacccaagagtgcctgctttagcatctggttttgtctccaaatctgcttcaatatttggcccagtttacctgagcccatgtattccatatccattttatgatccaaaagtggtattttctctcctgccagcaaagcctaaaggttttgcaaattcaaactttgtgattgttatttctcctaaactctaggagatgatccgagtcagctagcccagcactttctcacaacatagtggttattcagtttggtgttgactagtgaaaagttactaggtgaccgaagaaggggcgttcctgtaccatgggtgctactgtgtacagaatacattaatcactggggtagagctgactcacatgatccaactctctgtgtaagttttacaaattcaatatactgtggaagtaccaaatacttttcaagttttgaggcaacaaaatacagattccaggtagggtaagaagtttattaatcaaaggtaaactgtatgaacaatattgctggcaggattcctgtaaacttaaaaatatttatgaatgaaataatgtgatgtctgattttgcttctaaataatcagggagcataggggtgggtagaggtataaaatttgctgtaagaattaataaatgttgaagctggatatgtttacacatggggtcttgacaattcactctaattaatgtgtatatgtatagtatttttataaccaagagtttaaaaagattcctctactggagcagagcctattgcattggttaggaagttataattagcatcttcttatgtggtaaatctgcagagactgagataagaacttggcctctgataatttccctctaattggataaaatgccccttcactgaaagaaagtaaacctgaagagtagctttctctaaactagcaaggattctttaccatatgtaattaaaattcagatacaacaagctctccccactgctgcccatctgcctgccagcgcatcatatatggggctatgcaatgcagcacttgcgggtatttggaggaaaccagaacagtctgcctccctctctccaatcccactgctcagagagaacacacacctaagccaaaggaagagggcagcaagtacattccagagaggctcatgttccctcgggtactggaacaaaatgaaagcttttcaagtggaagccggagtgcttccctcccacaggcaacacattatctcatcttaagccctggagttctaagagctacactcagggcacctggaagacaagatgggaaaaacaagcccagagaataaataatgaagaatgactgccactgccctaaagactgtcaaagaccctgaaggaaaggagcagtattgagtactggtggctgcagagtggagaggggctccttcaccactaagtgtcttatttttcagttaacttctgttcactgaaaaggggacctttttcgcagtatgagttcatatcacttcatggattggatcatttaaatcttctcaaactaaagactcactcattcaattctattttcttttcttactccttaaatggatgtgtcattctcaataataatgtacacatggctttaattcaatgctaattttgaaaacttcctatagcatttactgtgggacaggaactaagtgctggaggtcaggcctttttaggatttcaagagacagatgcatgaacagattattgaaataaagcttagtctgtgttgagagctagagcagaagtataaagaaaaagtatcataaaagctttgaggagttaaaaaaataattctgcttagaggcctggaaaatgtttgaattagaaactaaaggataagcaggctatggagtaaaagaaaaaaaatattccagcataggaaataatatgatcaaagtcacggaggcatgagattacacagtaggatcaaaaatgtaaaagtatggctttggaggaaggttcagttaacgagtcagaggtgacaaatgaagagttcagtaattgtagatagtgaggagaagaaattagaattttggtttacagataagacagaaattgaatatatttgaatcagactgcaatgtgatgaaatctgtgctgtagagatgcagatgtattagatgacagagatataagagttaggaggctcgaaggtctgtataaaacagcaacagagcagatgagagaaggggatggcgtgagaggggatttgaagtacagtggatagaacttactaaacttaccaa

SEQ ID NO: 316844 - DNA, 4001 bp, Homo sapiens
cttgcctaagatcatagtcctcaaaatggtatcatacacctgaaagagcatcagtacatcaaagcagagatgggggtaatggaacaatggtagtgagtgacaggtgaagaaagtgagagtttttggagctaaaataaatgaatagactaacatttacctggtgtgaatatctgaaaaagtggcctggtgttaggtcgtttaagtgattttctcatttgaccttaccaaataatcccaggatgtatatattatttctacaaataagtaaattaggctgagaaatgaagcaagttgcccagggtcacagaattagtatgtaataaaacagaaagtgaaatttaagtttgtctgatgcccaaaacacatatttttttttttcacttctaagcgtgttatgtttgtctgggaaaatatggtctgtgaatatcttattttatacggacaaatagggccttattacctctttgcacaggagagaaaatttataaaatagattggtctttctcacttttttgaagttatggtctcctagagaatctgatgacagttctagaccatatccaaggaaatgaaataggtctgaacatacacattcaattttaagtacctcccaaagctcatccataaaatccctagagttctacagacacgggtttaaaactcataatgattttcttgagaatataaataaagtgaatctgaggctaaaacattctctccaaatcttctaacaccctacagtcttctagtttttcttattatatttgaactcgtagtaatttgcaaagtattcatgatctggacaattgctcattttaactactttcgtatctactcaattccttcctctttaaaaaaatgtaatgtgtttgtttcttaaagctataagaaataaacaatattaataatagtggccatataaatttttataggagtgatttaagctgaattactgattacaatatctttgggaggtatgaaatggaaatactatgcatgttgctatagtctaactgtttgtgtctcctcaaaattcatgcattgaaatcctgacccccaaggtgatggtattaggaggtgggtccttttgggatatgattaggtcatgagggtggagccctcatgaatgagattaatgtctttataaagcaggcccaagggagcttgttcactttttccaccatgtgaggacacagcaagaaggcaccttctatgaaccagaaagccctcaccagacaccaaatctgctagcaccttgattttggatttccaagcctccagaactgtgagagataaatatctgttgtttaaaagctactcactttatgatgttttgttgtagcagcctgaatgaactaagacatgtactaactatagaaacacacatataagtaggcatacttaagcacttcccacattgcatttacttactccttttccattatgttattcttgtgctttatattctctgaatcattgggaagagtactatttatatatttcttggagatatcacatattattgaggatgtggtcatctcttctcttgggctttctgaagtctcttgaatttctgtctctgttgtctgaattatgccatgagtctcttccctgttgccatttatgttctcaacagtcatgtgttctatttgtttatcatcttcattttctgcattatctgggaacattttattctgtgactcttcttgccccagtacacgtccattcagtgatgtattgttttctttttccactaatgctgaactcatatgtgttttatttttttctaactggacctggtttgtgtaatgactttcctctccatttgtgggagaaacagtagctgtttctatgacatttagttcccctcttgcagcaatgtctgctgctttggtatcttgaatggaggacattgtctgctgtggagtacattcatcatgcatgccgcataaattacaaatctccttttcttctttctttagaagtgcagcagtgctccccaaatgttcagttatttttatgaggcagtctatgaaagtaatgatttctacacacacatacatggacacacaaagaataaatacaaaactaaaccaaattatgtttctgcactgacatctaatgaaacatggcaagataattttagaaacctacaaagacctttactgtgcatttaagccaaactcctgaaggagaagtaattgtataactgtcactcttttaacaattgtaggattgacaacaaaccatttttaacatggtagcaaagagtaaatctaatccctcttgcttataaagatacttcgaatatttaaagacaaatgtcataacctcttgctcccccaataagaactgaagtcaacatctccctcaattgtttttcatttggtatgattttgagaactcttcttttaccactggatgtacaatagtttatcaatgatccatttaaaatgctgggctgaaaattaggcgaacactccagatgaggcttgggtggcagaaacaccatacctccattatttctgccaatgtagatgctttgttttggagcctagtttactgctataagaattggattaggtttatactattcctcctgatgaatttgtgagcattggaaattttcaaattagtccttcagagaatagctctgaccataccaattctctgattggaacctgaagtggctactcaaagcctactaactcaggtcaaccttcttcactctgaagtaaactcttagcatgatcaaatcttatataatctctcactccgtcatcattcttcccactctcctatttgttcatcctgcttctcctcactactgaggtcacctgatgacttcttgcaggcttagtacctctctagtctttagaattcagttctgaactaaagaataggtaatttaaggccccatagcttagtgtttttaaagccatcaccaaatcatcccttcaccagtcagggcttttctttgggatccagttctgacaacttgtgttttgttttgttttgtttttgtcttatacctgagaacttgtctttatttttaactcctattctggtaaccaagtccttgtttttttctgaatatatatttgcttgttatattgccaaagaccatgttccactccctccagaggctaaaggtctcattgtgggctgcagctgatggcttctcagtcatgctgcctttagacagatttccctgatgcccactatttgccctttagattgaatttcttaacatcatctaccctggatttcctcatagatggaacctgcccacttatcttgatactgtattatttagagttgaatttcatgatgccacctatatgcttatctggagtaactgttgttatctaggattatattcatcagattccacattcttcctgccttactgtacttttccacatccataactggacctattcccaagaatccctctccagccccagtgcatggggatccaattccctatcccaacccactccagtcttcccagtaattttgcaatcaataaggctaagctcaaatgaccctagagatagaatactatattctgatataaaaaacaaactactagctctgcctcagtggcctgtattttcctgtctctaagtcttggatcctactaaaattaccgactctctctttcctgctgcataaatccaattcactctttaagcttcagcttaaatactacatttttctagcaaacttctcaattccccaccctacagatgggatttaaactgcttctgaagtccaaaagcacttcattcatgtgtttctaatgggactggccccaatgtccctggcattattgtgcatttgtctcaacttatttcccctttgaaattgttagtctcttgtggacagaaactctatcttagcctatctggtatactcatagcccctctcagatcttgccctaatcaatatttcttagagaaagaataaactaaaaaaaagaatacttgccttttctc

SEQ ID NO: 316845 - DNA, 4001 bp, Homo sapiens
  modified_base (2654)..(4001): a, c, t, g, unknown or other
ccaggtttgcctagacagcgtcggaaggtggggggagacattcagccagaatttcacggaagaacaagggcacagagaggccagcgagctcccttgcacgtcagccggggtgcgcactgcgcgcaggtctagccaggaagcgggcaaagacagacagaggtatgcttttgaccgccaggcgctccgtgctggcagctgggaggctgcaggggcccgggcgggcgggcgacggtggcgcgggggcgcagaggaggcgagccgccggagcggtgtcaggcccggacgctgcgcggggcccggtgtttcgcgggacgggggtctccacccagcccaggggacgacgcgttttccgggggtggggggtgggggtggggagggggcggtcaggcggcggggtgggctggtggagaggcaggagagctctgcccgggctgctcccacagcccaggcggctgcccgcaaacccgcgcgtgcgcagtaggcggcccacctgctggtacctgggccggctctgggatccccgggatgcccaggaaagaaaggcagttctccgcggagtggagtctctcaccgggcctagacctagaaggcaggaatcccaggccggtcagcccggtggagggggcggggcggagacacgcccctccgtagccagccaggtgttccccgcgaaagagaggccaccgccctgccccgaaccacccgaccccgtcccaaccccgcgtcctaaagctcctccagcagagcccggtattcttcctcgctgaggggtgcttccagcgaggcggcctcttccgaggcctccagctcccccggggcctccgtttctaggagaggttgcgcctgctgcagaaactccgggctcgccaggagctcatccagcagcaggccgcaggggagtgcagaccagggcgccggctcctggagcgcctgggagggcgccgggatgccttgcatctgcccctgccgcgcggaggcggaggcgtccgggggcgcgggctggggaggtggagctgccccggcttggggttcccacgccgccccggcgacctggggaccccggccccagccccaccacggactcccctgggacgtgggtggcgcaagcaccccttggccctgcggccccgcttgagcgggcccaggctgtgccaccgcgcaggggcccggcaggccgtcgcgctgcgggtcccggtcctcccggcttttgcccgggtgcggaggccaccgaggagcctgagggtgggagagcgccccgtccggaggagccggggcggcgtaggcgaaatccccgcgcgccggggcaggttgggagatcccctctgccggcgcggcctggctgggctgcagcgcgggggcggccctcgctgcctggctcacgaaagccccctgtgggagagccccaggcgcgcagggcacgtggggtgcgggaagccccgttccccacgcgccggtgtgggcgaaggcgacccacgagggagcagggtgacccccgccgggggccgcgctgcacaggccgcctgcctgcgcgggcgccctgccaccctgtcccgggtgcctggcccttcgattctgaaaccagatctgaatcctggactccgggaggcccgtctctctggccagctcctcccgggcggcgatgcctggaaagcgatccttctcaaaggctcggaggagcagggcggtctgggatccggtgacggcggtccgctttcgccggccttctggcgggccgcgtctcccgggccagggccgagattcccgccggtgctgcctcagctggcgtgacctctcattctgaaaccaaatctggaccctgggctccggaatgccgatggcctgggccagccgttctctggtggcgatgcccgggtacgggttccgctcaaagcaggctcgcagggcctcgctttggctcggggtccaaacgagtctccgtcgccgtcctcgtccccgggcttccgcggggagggtgctgtccgagggtgtcgggagggccatcgcggtgagccccggccggaatttcacggacggacgcgggcagagagaggccggcgggctcccgtgcacctcagccggactgtgcactgcggcaggtgcagccaggaggcctgcccggacagccagccagccagccagccagccgcccttgtaaaggcccacaggcaggcaggctccaccccttcatgaatggcggtgagcccccctgggacagcccgccccaccccggaagggacccagggcgtcgaggcctggggccggccggcggggtggtggtggtggtggtggtggtgggggggggggtggtgggggagggcgtggtggcggtggtggtggtggggccggagagacgaagaggaagggggagaggggggaggggggaggggggcgcgtttcgggggccggctctccggacctctccagggatcccgcgggaacgggaagccgctctctgggctcccacgcgtcggcagcagggagaaaccagcctgggagggtggaggggagtgtggaactgaacctccgtgggagtcttgagtgtgccaggccctctctccgtgaaggaggcaatgcctgtgggcgtcgccgttgccgggacggtctcgcacacgcaggcgtgtggctctcgttcatttccacgtagaagaccagannnnnnnnnnnnnnnnnnnnnnnnnnnnnnnnnnnnnnnnnnnnnnnnnnnnnnnnnnnnnnnnnnnnnnnnnnnnnnnnnnnnnnnnnnnnnnnnnnnnnnnnnnnnnnnnnnnnnnnnnnnnnnnnnnnnnnnnnnnnnnnnnnnnnnnnnnnnnnnnnnnnnnnnnnnnnnnnnnnnnnnnnnnnnnnnnnnnnnnnnnnnnnnnnnnnnnnnnnnnnnnnnnnnnnnnnnnnnnnnnnnnnnnnnnnnnnnnnnnnnnnnnnnnnnnnnnnnnnnnnnnnnnnnnnnnnnnnnnnnnnnnnnnnnnnnnnnnnnnnnnnnnnnnnnnnnnnnnnnnnnnnnnnnnnnnnnnnnnnnnnnnnnnnnnnnnnnnnnnnnnnnnnnnnnnnnnnnnnnnnnnnnnnnnnnnnnnnnnnnnnnnnnnnnnnnnnnnnnnnnnnnnnnnnnnnnnnnnnnnnnnnnnnnnnnnnnnnnnnnnnnnnnnnnnnnnnnnnnnnnnnnnnnnnnnnnnnnnnnnnnnnnnnnnnnnnnnnnnnnnnnnnnnnnnnnnnnnnnnnnnnnnnnnnnnnnnnnnnnnnnnnnnnnnnnnnnnnnnnnnnnnnnnnnnnnnnnnnnnnnnnnnnnnnnnnnnnnnnnnnnnnnnnnnnnnnnnnnnnnnnnnnnnnnnnnnnnnnnnnnnnnnnnnnnnnnnnnnnnnnnnnnnnnnnnnnnnnnnnnnnnnnnnnnnnnnnnnnnnnnnnnnnnnnnnnnnnnnnnnnnnnnnnnnnnnnnnnnnnnnnnnnnnnnnnnnnnnnnnnnnnnnnnnnnnnnnnnnnnnnnnnnnnnnnnnnnnnnnnnnnnnnnnnnnnnnnnnnnnnnnnnnnnnnnnnnnnnnnnnnnnnnnnnnnnnnnnnnnnnnnnnnnnnnnnnnnnnnnnnnnnnnnnnnnnnnnnnnnnnnnnnnnnnnnnnnnnnnnnnnnnnnnnnnnnnnnnnnnnnnnnnnnnnnnnnnnnnnnnnnnnnnnnnnnnnnnnnnnnnnnnnnnnnnnnnnnnnnnnnnnnnnnnnnnnnnnnnnnnnnnnnnnnnnnnnnnnnnnnnnnnnnnnnnnnnnnnnnnnnnnnnnnnnnnnnnnnnnnnnnnnnnnnnnnnnnnnnnnnnnnnnnnnnnnnnnnnnnnnnnnnnnnnnnnnnnnnnnnnnnnnnnnnnnnnnnnnnnnnnnnnnnnnnnnnnnnnnnnnnnnnnnnnnnnnnnnnnnnnnnnnnnnnnnnnnnnnnnnnnnnnnnnnnnnnnnnnnnnnnnnnnnnnnnnnnnnnnnnnnnnnnnnnnnnnnnnnnnnnnnnnnnnnnnnnnnnnnnnnnnnnnnnnn

SEQ ID NO: 316846 - DNA, 4001 bp, Homo sapiens
gctctctgccggttacagtcggctgggaactgacctgtgaactgacctggctacggtgggtactgctctactcatcagaggtcctgtggtgctttgaacgttagcatgctggtctgcttggttagctgattatgccaggaggtaaggccaacgctgtgggttcttaaggcatgagagccagctatcattaaaacccccttccttcctcctccaacaatgacaccactacagaaatcatttctgatgacttctctatcagctctccacacatgttaagctgcaaaactaagggatacttggcaaaggcctgtggatgtcatattatcattggctgaaaagtacaaaaccaaatgaaagaagcccctcaactgcaggttcttccaaggtgggtctgtagctcatttccaggaatctgagtcaggctgtgctttgaatcatcactcataatcagtcatagcgctagtgaagcatctcaggttcagacctgaaggacatggtctatagattcagcattcttcctgtttggaatctgagagtttggggagtgcaaaaactattattaagaaagaggactgaatccttacgcttacactttaaccatttaacatatgagactctcaggatcaaagttcacctgtaattggtaatttggaaattcagaccttatcaaaatggcatgagtttagagcattcaatttacatgaaatgactgccaaggtgtttctcaattagctaacacatagacaactacaggtggaggaaaaaacaagtaaaagtaggaactttttacaagttttctgaggttttgctctctggttaagaaatgagcaactctccttagagacaacgcctgagtttaatatgcctcccacccccaactctatcaggggaaagccattaggatgatgtaaacagagggtgattatctagaagcagcccttgttttctgcacgtgagaagcaacaagtgtcctttaaaggcgagcacagaacaaaacgcccagacctccacaggcaggtttccaaaactagctacacagggggtttccccaaacacctcagtccctcacaccgagtgcccttggctacccttggcatacccagacccagatgtgggggaggaaaagcaagccagtaagaaaaggctgtggagccaacttcacaagaaggcgctggagcaagccacagagcttggcgttcctcaaagttcttgcatgcctggggaaaaggggtcacccagggaaaactattgggcttcctcttcctaaaactccgaatcctaaaccctaacgtggagaggtgaagttccccgaactctacacgtgtccgcagcgcacccctcacggaaggcgcccgcctccccgcgcgccctggggcaagtgggtgccagcccctgctgcgacgggtcgcccaagctgcagggcggtcgggccagaacgttcccagctctcgtcttctcccgaccgaggggcccaggcagcgtctccgccatccccgcacccgccccagtcccagtccccgataagaaagacttgcaccgaccgtggagctcggcgtgcgcagacagctgccgggtccgcgcggcgcctgggccagaggaagccggagccggcgagggtgggtggcgcggagggtggccggtgtcccgggctccggcgcggcggcggcttcggctgcacagcttccccggcttcagaaaacctcctgggcactgcttctcccggggaggtctcgctgggaccccaatccccggcgacgaccgggtgggatggatgaagcctctccaccgcctctccacaatcgtcagaccagcgggatgactgtacgcgcgcgcgagggctcgcacgaaaaagaaaactccggaggaacacgcctccagtctgtcctccccgtctcctcccaaagctccagaccttccactccactctgggaccgcaagagcgtcctaaccttccagctatcctgggacgcggccactaaaaagcacaaagctgccgcccccttccaggccctgaagggcaggagtcttttttaactatttccttcctgaaagaaaaggtgggggatgtggaggagagagggtagagtttgacagacaagactcagaattccgaaaggccttgcagaggaacccatcctcttagtgcaggcagatttgatctgtgacggaacaactggacacagagccagggcccacgggtggtttcttctccgtcttccctgccgcctttgcttggcttgcgtgctccctcttaagcttagaggccgttgaggagccgaagtggacagcagtttactggatcaggtggtttgcttctatcttgtcccttgtagccagcatcccacggctacagacctccagcccagggcaaagaaggagcctcaggagagactatggaaggttccagcgcgtggctccgtgaaacctcaagaaattcaaacaatgaagaagccgaccttacagaaagtgggtctcaacgtctttatcacggcagatactttatcctaaattgggggtgggagaggagatgagggacaaaggccactgcctgtgacatgtgagtaaaaactggggtctcctcagggaaggcctgccttggagtccttcagtgcactgctagagtcagcacatggtagaagtgtgaggttggagcactggtcatgttatatcccatgctgttccggctatctgctgcagctaaacaaattactataaaacgtagtggcttaaaataacaacactcatttactctgcttatcagtctgcagtttgggcagagcctgtctgggacagctcgtttttgctccatgtagcaggggctggaggatccacttccaagacagttcacttgcttggtgttgagtgttagtttttctccacgtgcgtctctccacaaagacttgtggagacttgtggtttgggcttcctcacagcatggtggcggggatccaagagtgaatgtccccagagacagaaagtggaagctgccagtttcttaagggctgggcccagaaactggcaccgtgtcatttctgcttgattctattagtcaagcagtcacaaatcccagattgaaggtgagggtatatagagcccaacccttagtgtgaggagtgtcaaagaatttagggaccattttgtaaaaccatcaaagagatctacagaaaaccaccattgaaagaggccttaatagtcatctagtagggttagactagatattaccctgttcactaatcttacagcttctctaggagggagaatcagccaaccagaataactaatagcttttataagtgccattgtttatattaaaaaaaggtgaccctttgggcatgtggcttggcaagctgacaatattttcgggaaagaaaaacttactgcttcctcccaaaagaggcagttcacatcttggcccgtgaaacatgtgctggatttcagcccttattcactctgtggccagacacacttggacagtgcatcacctgcatatctgaatatgtcaatctgtccagtctttgctagaacacattcatcatgacccacctattgagacagctgatctcactgtggtgtaggactagttactaaaaattcttccttcacacctattaggatagccattatagtaaaacaaaagcaaaaacagcaaagaacaagtgttggcaagaatgttgagaaattggaacccttgtgcattgccagtctgaatgtaaaatatagtgtagcagttgtggaaaacagcatggcagccctccaaaaattaaacataaaattaccctatgatccagcaattctactttttggtacttacctaaataattgaaagcagagtctcaaacagatatttgtacacccatattcatagcagcattattcagaaaagccaaaaggtgaaaactagccaaaagatggaaacaatccaaatatccatcagtggaagaatggataaacaaaatgtggtatatacatgtatgtatatgtatataaatacatgtacataa

SEQ ID NO: 316847 - DNA, 4001 bp, Homo sapiens
atttgccaactactccacggaaaattctcccaccccaaagagagtccagtccatttgacataactgtatacagaagttttacttctgtctccaacagctgagtctgaggttcatggggccatttttgtcatttgtcaccctctttttgttgctgttctctaggactatgtcattagcagatcagagaaagacgcctcattcatacacaagaatttgctgagtacacactgtggaagcaggaatgtcctaggtgctgggaacatagagatcactaggattaagtctttatttcaaataccctagagttctgctcacctgttacaaggagtgctacctgagaacagagtccagagattctgagcaaaagcacctgatttcctcatcgggaacttccttaatgggagagccaggacagcagcctagctttggcagtttggctccattctgctctctttattcaaactattgcctattgtgtactgtcttccataggtgtctcttctggaaactgtactgtgttttccccctcaatctacctctttttaaaagccagacgccatctcaaaagggcaagctgataaaaatggaatgtcggggcagctataacctctcatcaacaaaggcggctgccgtgtctaagcagcaggttggaggctcacccaaggattaaataaatgaattaacagttagagagagaatgtttttcaggcaatatcctttggcaggattgtaattcgcattcagtcaagctcccatttccccttggcaaaaaattcatttaatatgagaggacagtgtggcttatttacccattatcatatttggcagttcttaaagttgcaatgcacctgttactaaaactccggagttgtgtcagagcctcagaaacagtaagagtggggagaaagtgaaggaggttgaaattgaaatttaggttaattttcacaactacctttgttcacagttccctttccatttttcactaatttttagaacttctgaattcttacaagttatcagaaggaaggatttttttctttgtggcttaagagtttcaaacagacaaacaaaaaatcaaccatctgtttccctaatttccaagcaattagccaggtgttaattactcctcttgtcagagtaaaagctgaagcttccatgaaatgttctgctagtttaaaatgaggcatattcattcacttatacacagaagtacagtttgagagttatgaagttttatagttggtagcagattagctctaatggccagtaagaaaataaacatgcatcagaaaacaaaaattaagcaactatacatacccaaagacaaactttgttaaatgcccaagtataccagattgaaccaacagggatgtgggggcagtttcccggagacctggagcaccttttcattggagtacttacccacacaagtagaattcccatttcctgcgagagtaccttcaggacagctccagtgctgcggtgctgagagactaacaaaactaaattttgaaactactggcaacagaatgataagagtgagcagcataatcttgatgagtttgaactttcaaaagaaaacagcttgattttgctggagcatggcccgggcaaggtgagtatgattgaccccagatgcggctgcctgagcggaggcctcagccctggggcatcttttactctcctgttgtgctgttgtcctccaagctctttcttcaactgagagaccttctgaatgcagcctgccaagggaagccacaggaaagatttctttatctatgtttctttggaagccagtaagaaatacctgacacccttatgacaaatttcacagagtttaacagccctgctctggctgacttcactgtgacagagcaaggcaaaggcttagagaggaaaaagaaaggaagaactgatggaaagttccagctacaacccttggattggggctgaaagaagaaatatggagatacgattcctctcccaacagtttctctttttgaaaagtggaatgactcagctttgctttttaaagctcttcaggctccacctcctttcctttagtgacacttgagtgagcctctgtttgcaaatgcgaatgtgggcaattcctccacacaggaaagcagggatgactgccaaagaggagataactcgctactcaccataaatatcctgggcagaactgggagagaggagttgggggctgtggaggtgctcatggtgaatggcgggaactgctaaatattggctatgttttaatgtctggaaggatggagacaaaattaaaccatgcagtataaatcaataataagcagcactgttgatagtttggattgataataattgatcattcacatgagcaatagtaaagatagttcaccttcagcccattatttgaacgaaatgtcaataccagtgcacattccaggagctttatcttatttttctctttctcctgtatagtttatagcggaatttgaaagattattctttccaaatcaaagggaaatccctgaggccaaatgaagagatacagtatggacagacaccttttctttcagcatgagcatgataaaacatcacgaggggccaggagtgcagagaaaggagtggattgttattatagggacattggaaaaaataagctaacagtgcaaagctgggaagcactggaaatccagcacagaggaatgcttttccttctaagataatttaggctttttttttttcacatctctgtgatagaaaataagaactggacgtatctgttagctgtctcctcaaccactttctacttggagcaacagtggttatttcttcaggagtacaactagggcccaaaaatacccagaaggcaaacaacttatagcagatttgatgcacgatggaaatttctgtcagtttactccatcctggaaaatggactttcatttaagttaccctgaggtagtgttccaagtgctggtcaaaaatgtacgtaaaagcaatagtcacaaaaacaactgtcacactagtgaacaccccattacagaggagaacagactaactctaagccttttactcatacttaattatgtcctgattattctccaaagactggatcactttcctgaaacagcttaagtcaggatttctcctatttcagccagcctctgccaggcagctctgaacccttacaggagaaacagaccctggggaagggggaaagagaagtcctttaggtggttatgcggaatattccattgctttctggactgagtcagactcaagactcataatgagcatcctacaaataacctgcactgactcttcgagttactaactttattaataagcttccctttcagcacaatacattgccagcatcccagatgacagcaatggaaggggcttagaggacaatcaagcatcacgctgtgtcagtggagtggagtggagagaatgatatgaagacaaacatgaaatgatccacagctctgttctgtttggatttggaatctctcatattatttttggttggaaaaaggtttgctttcttaattacatgtcacctgggctaatgttgtcattaatgttgagtacaagctccctaggagatgacggagtcaacagaggtatagcagatgctatggctgatgactgatgatgaaaatcaatcgcagctaattcatcatctacagttgcccagatagcaaaatcataggacagagctacccaactgggaaggatttacagagatatttaataagtttatattccagccgggcgtggtggctcatgcctgtaatcccagcactttgggaggccaaggtgggcagatcacacttcaggagatctagaccatcctggctaacacggtgaaaccccatctctactaaaaatacaaaaagttagccaggcgtggtggcacatgcctatagtcccagctactcatgaggctgaggcaggagaattgcttgaacccaggaggcggaggttgcagtgagccgataacacgc

SEQ ID NO: 316848 - DNA, 4001 bp, Homo sapiens
gggtttaaaatgtatattttacatacttattcttcattagtgttatgtaatattaatgtcctaaagtcagttaactgtagcaacaacttatgagtttttcagtcaatttaattcccaggaacataaatgaaaactggtgccaataaaaaaacaagtaagcaagcagagaagctgccttgaattttgacaaggtaaggatagtttacaccaacgcaatgaaaaataagcctttgtgtagtctataagagtttttgaaatagttttataaaagtctttaaaagtgccgggtgctgtggctcacgcctgtaatcccagcactttgggaggctgaggcgggaggatcacttgaggtcaggagtttcagaccagcctggccaacatggtggaaccccgtctctactaaaaatacaaaaattagccaggcacggttgtgcgcacctgtaatcccagctactcaagaggctgaagcaggagaatcgcttgaacccggaggcggaggttgcagtgagccgagatcacgccactgcactccagcctgggcgacaaagcaagactccatctcaaaaaaaaaaaaaaaaaaaaaaaaaaaaaaaagtctttaaaagtcaaagcaaactggtaaaccattagcaaaaccacaagctaccatgaaaagatacacaaaagtatctggcaaccaaggtctagagctggttccagagtgtgaaaggttttctgattgctaataaaccccattatgcacacaagatatcttcacttagctgtgtcgtttctaaaaaggcaacagggcccagaagtttcagtgagccagtcctggcaaacccaaattatgaaaaatataccctctgcttaaagattaactacaaacctaccctgggaccagcttgcttcagttaagtttaaaatggtgcctaaattgaaatgaaagtctgtagcatagataaagagaaaaaaaaagtcaaatggaaaagtaaatttaaaagtttctatttccaataaactgcgtctcagaaatcttccaggagataaagactcggaagaacagagggattgagacccattcgcattctctgaggcgtgcgcactacgcggaaaggatgaatgaatggaagacgggcgcgtgtgaaatgcagcaggtccggccggcaagccgaccggctacagcgatctgtaggcctcgctcctcccccttccctcctccatgacagcccagtcccaagcatggaggggcgaggacaatgtgataccccttctcaccaccaccatccctcattctacttggagagcttcaccgtgacacacgagtgttccttcccaccccagacctttctcgcttcccctggcgcaaacaccggcaactctccggcgcgctggattaacagacgctcgcccctctcaactcccctaagcgaggtcgaagctcctccgcgcgtgccgcggcaccactcccgcctaacccaccctccggcaacactcgcccaccagctccccagtccaccggtctaaggaagacgtgcgcgcgccccgcacccgagccccggagctggggttctgcagggagggaaaggctgctccagggctccctcctccatctcactccaggccggctcgccgcccaccctgcctgcggatcccagtactcgctgggagccggccctgcgccttcctatcatgaagacaccatcctcgcatacccagcccagaaccccagctaccctccaccctgtagacacctcgcggttccgcaggaggcgccacgccgcccctcccccacaccgctcccccagttctcgggcccccaccagaaagtgtgcgctacacgccgcctcggccatcctccgggacgtccccacttgtccgcgggaggtcaggtccaacatgaaggggaaggggcggcaaggggtacagtgcgcgccgggaacgccgtcccgcggagtcccccagtcagaaggaagacggagcgcggggacccgtgggggtgggggccaaaggcaatactcaccggttcgacagtcgccatcttagatcgatctgatcgcacaaccgctccagaagggggggtaagaggaaaaaaatgagattcaaaccggattggccagcttctggccacgtgacggatatgtccgtttggccctggcggcacctgcgcaagactgcggctgcgtgagtaacgagaggcttctgggaagtggagtctctcccccaccttttttttttttttttttttaaggtaaagaaattttttttaaaaaggactggtcacgtggccgatgggtagggtgcgcggttctcaacgcggcggacactcgcttgctggagggtggtttcagtcctctgctcttccgcctggatagctgcggtcacacttactgccaggcaagcctactgtgccctttgtcgccctgtcctcccatcttccccggaaggttgggaactgcaggctcagcacacacaataaggcttcatttgcttagttgaggtcccaggacaagttgcctgtgtgtttatttagttttcttttgatctcccaccattttctcttagtttcaaaaagaggcggcgatgcagagtcgtttaggcaatcaaccctcccacgtcccctggctcagctaatgctggtggtcattcgttgccatttctgcgaaaggggacggacggaaccgcccgcagtacccgcttgccaccggctggacgagggggagggacgacagcttttactgtcccaaatcctgagattaagacctcagggctaaatcttgcgtggcggtaaaaattatttggaagttctgtgcaaccgttccaatattccgcttttacgtgcacggaaatagcctaagtccagatgccagccagggaagccactccgggccccgctgactaagccctggactgatggtctggagtctttaggccgggtcaactatgactcttgacgttgactcattctccttaggcgagtgacttaatcgctcggcgtctcagcttttttatttatgaaccaaaggtgatgatacacttacctcacaagggtgtgcttcgtaatgactgtaaccggctttgaaaatgcatcggactctagaaatgattcataataagcaactgcgtgccttcctaaagatcaagtgcttctgctttttttttttagcaaagtttaaatttttttctgtttactttgtttgattatgatgtacaccagtgtagttttaaatgttcaggaccattttttttcctttacaactgcagctgccctcaatagaggctttaatgttcatgaaattattgttatgctcacaacaatcactggcaatcagaaatttgtccccacactggcatcctacatttcctttccctctaagatactgtgctgtcatttctcaagaccgtgttttttgcacagtttggctactaataacaacaaatagagatgaagaaatctagtagactcctaaggttctaatgaagaagacactgtctcattactatttcccatgcttttaaataatgttgacaccaggaaaaggagtgtatgcaggctgcctgtgcctgtctgcttatagtgttaatgaggtccagagctgtgtcatacctattattgagtacataatggatgcttgagttgactaacacataattgaggctgtatgagaactcaaagccattgcctgttcatatgttttggtttacctgaatatcagaagtgattaatgaaagcttttgtctagtgggcttagctctactaggttttaaagtagatagaattaacaggccaggcgcagtggcccacgcctgtaatcacagccctttgggaggccaaggcgggcggatcacctgaggtcaggagttcgagaccagcctgaccaacatggtgaaaccctgtctctactaaaaatacaaaaattagccaggcatagtggcacctgcctgtagtctcagctactcaggaggctgaggcaggagaatcacttgaacctgggaggtggaggttgcagtgagccaagatc

SEQ ID NO: 316849 - DNA, 4001 bp, Homo sapiens
ctggggttctgcagggagggaaaggctgctccagggctccctcctccatctcactccaggccggctcgccgcccaccctgcctgcggatcccagtactcgctgggagccggccctgcgccttcctatcatgaagacaccatcctcgcatacccagcccagaaccccagctaccctccaccctgtagacacctcgcggttccgcaggaggcgccacgccgcccctcccccacaccgctcccccagttctcgggcccccaccagaaagtgtgcgctacacgccgcctcggccatcctccgggacgtccccacttgtccgcgggaggtcaggtccaacatgaaggggaaggggcggcaaggggtacagtgcgcgccgggaacgccgtcccgcggagtcccccagtcagaaggaagacggagcgcggggacccgtgggggtgggggccaaaggcaatactcaccggttcgacagtcgccatcttagatcgatctgatcgcacaaccgctccagaagggggggtaagaggaaaaaaatgagattcaaaccggattggccagcttctggccacgtgacggatatgtccgtttggccctggcggcacctgcgcaagactgcggctgcgtgagtaacgagaggcttctgggaagtggagtctctcccccaccttttttttttttttttttttaaggtaaagaaattttttttaaaaaggactggtcacgtggccgatgggtagggtgcgcggttctcaacgcggcggacactcgcttgctggagggtggtttcagtcctctgctcttccgcctggatagctgcggtcacacttactgccaggcaagcctactgtgccctttgtcgccctgtcctcccatcttccccggaaggttgggaactgcaggctcagcacacacaataaggcttcatttgcttagttgaggtcccaggacaagttgcctgtgtgtttatttagttttcttttgatctcccaccattttctcttagtttcaaaaagaggcggcgatgcagagtcgtttaggcaatcaaccctcccacgtcccctggctcagctaatgctggtggtcattcgttgccatttctgcgaaaggggacggacggaaccgcccgcagtacccgcttgccaccggctggacgagggggagggacgacagcttttactgtcccaaatcctgagattaagacctcagggctaaatcttgcgtggcggtaaaaattatttggaagttctgtgcaaccgttccaatattccgcttttacgtgcacggaaatagcctaagtccagatgccagccagggaagccactccgggccccgctgactaagccctggactgatggtctggagtctttaggccgggtcaactatgactcttgacgttgactcattctccttaggcgagtgacttaatcgctcggcgtctcagcttttttatttatgaaccaaaggtgatgatacacttacctcacaagggtgtgcttcgtaatgactgtaaccggctttgaaaatgcatcggactctagaaatgattcataataagcaactgcgtgccttcctaaagatcaagtgcttctgctttttttttttagcaaagtttaaatttttttctgtttactttgtttgattatgatgtacaccagtgtagttttaaatgttcaggaccattttttttcctttacaactgcagctgccctcaatagaggctttaatgttcatgaaattattgttatgctcacaacaatcactggcaatcagaaatttgtccccacactggcatcctacatttcctttccctctaagatactgtgctgtcatttctcaagaccgtgttttttgcacagtttggctactaataacaacaaatagagatgaagaaatctagtagactcctaaggttctaatgaagaagacactgtctcattactatttcccatgcttttaaataatgttgacaccaggaaaaggagtgtatgcaggctgcctgtgcctgtctgcttatagtgttaatgaggtccagagctgtgtcatacctattattgagtacataatggatgcttgagttgactaacacataattgaggctgtatgagaactcaaagccattgcctgttcatatgttttggtttacctgaatatcagaagtgattaatgaaagcttttgtctagtgggcttagctctactaggttttaaagtagatagaattaacaggccaggcgcagtggcccacgcctgtaatcacagccctttgggaggccaaggcgggcggatcacctgaggtcaggagttcgagaccagcctgaccaacatggtgaaaccctgtctctactaaaaatacaaaaattagccaggcatagtggcacctgcctgtagtctcagctactcaggaggctgaggcaggagaatcacttgaacctgggaggtggaggttgcagtgagccaagatcccgccactgcactccagtctgggcgacacagtgagactccatttccaaaaaaaaaaaaaaaatgataataaacggataagtggatttctacttacagagactatctactgttacttagactatccaaaataattctgttgaccgcgttgttattttctgctggttagaagtggtgtcaggttaccttctttgaagagaaaaagacagcatagatgtcctattttccccttccccacccttccccacccttcctctcccttccctacccttcccctcccttcccttcccttctcttcccctcccctcccctgtcctcccctcccctccctcccctcccctcccattctctctctctctctctcttccttccttccttccttccttccttccttccttcctttctttttgtcttttcagggtgttgctctgttacccaggctggagtgcagtggcatgattatggctcactgcagccttgaccttctgggttcaaggggtcctcccaccttagcttcccaagtagctaggactacaggcatgggccaccatgcctagctaatttttttatattttgcagagacaggagcgtctagctatgttccccaggctggtctcaaactcctgggctcaagcggtccccctacctgggcctcccaaagtgctgagattgcaggcatgagccaccattcctggccagatgtcctattttcatgaagctgttatataacagcaaaaaatcaatgagattggcaagaaaatacctataggactgaaagccagtgatgttcttaaaactttttttaaacaacagtttccatttttattaaattttctgttaatcaaaaaactcgggccgggcacggtggctcatgcctgtaatcccagcactttgggaggccaagacgggcggatcacgaggtcaggagatcgagaccatcctggctaacacggtgaaaccccgtctctactaaaaatacaaaaattagctgggcatggtggcaggcgcctgtagtcccagctacgcggcaggctgaggcaggagaaaggagtgaacccaggaggtggagcttgcagtgagcggacatcgcgccactgcactccctcagtctcaaaaaaaaaaaaaaaaaaaaaactccctcttgtcaaccaagactcatacttttacaatacttatggatgctctattctttatggtttagtttctttccattttttacatagttttcaacaatttttctttataattttcaagcacagagtttcaggaaaatctccatttttgtatatactttgttgtgtgtgttttatgaccattaatgtgtctttgcctatttgagattctaccatttcaaagatttaacgattaggtttttatgtatgtgtgtatgtggttgttttgttttgtttttgccaatcctaaatatatagagctgaaattttatgttttatttctctatttattctctattattctttattgctcttcaaaggacttgtaattccaagttcatttacagaactgaccagaaaccatccaacaagt

SEQ ID NO: 316850 - DNA, 4001 bp, Homo sapiens
tctgaccagaaagcaactgtcaaacagatgtgttttaatcactactcagtaaactgcattttcctttggaacctctgaaacacatatttttacattttatagaataaaagactggtcaccactgtgttgtactcaatacatacatattatttcagactttgaacctagagcgcttccgttaaattttgatacatgtgttcatgatttcccccatcgaactgagtcacagagttttgccaagcaaactactaatttcaagtcccttacctaaaaacaatggatggaagactgttaagatcttttacagaattactgttccctgagtatttctcatcgtccacttcccatccatggcaatatgaaataggaaccgggaagaggaacatgtatgcttactattacagtaagtaaacagtattcaagcagtgctacatcgatccagggccctcactgcgctgtctgctattaagcaaagctgctttttctatgtaacttaagtccgtgcccttccgctgcagcagtggcgccgcacatcccccacccctgcggccacttccgtgtttacactcctcttccctccaattccatgcgtacattgtcagcttcactcccgcccaatcttcattggcccagcgcgggcccgtagtcccgcccccagaaatcaacgttctaatttggaacacctcagagagcagattggaaccagaggcctgtcaatcccgtccgttctgtcctttccgaggcgcttccgctgtggtgggaggtttgggggggggtagaggggaagggggcaattccgtgctgagacttccctagggccaagactccctccctcccgcctcgctccttaacattcacccactgtttacaaaaataaatgttcttctctgacgccgcaaccctccaggtcaggggtacaaatatattccgtgttcttcccattctccccctaaaaaaacaacccacgagggaaggggcataaacctagtttcttcgcagccacccgttaaatgagcaaagggaggcgggcccctgaaacatcatcccggttactcaacattattaagtgaccctgtccaggaccgttactcctgagactgcataaggtgggaatgtgcggaggagggagggtcagagcatttttttttggcgggtatcggtccaccggacatcgcccctggctgcctggtccatgcggaagtcatggaattgtggacgaagtctgaagggagaaccgagcgggggtggcgagcgttcgccggagaagcccgccgcccccgaacgcgggcagcagcggcctctccggccagacagcgtggcaggcgcagccgagagacaacagcctcactcacttcctggttcctcagcaactggggtgaagcgcacaactcgtccgcccccgagtgcccaacttaaccgcggctccgttctccagcacccgctgccagcgctcagcccggcagctgctgctgctgctcgccgaacccaccctgaagcgacagcgccggattcgaggcaggttactctccaaggtgatcacttcctgattcgtcgcctccattacttcattcactcccccctttcccccagccgccccagtgactgtgaggtggacactgtacccccagcacagactgctacaggggagtcaccccgccttctgtgcaccccctctcctgctgcaccgatgcacgggagaaaagttcccctgtccttaccggcccggatgagcagatccagctggttcgtgggtccctcatgcagagacgtcgccatgtttatcccggggctggagctgctgcttcacattgacttacaccgtgagcagcggcggcaggggaggaggcggaacccgcggccggagacacacgccgtgcgaccgacacacactcacgcactcgcacacactccgacgcccggatccttgcgcgtcctccgacaggaagccgaggccggcccgcctcccgccgccgggctgagaaaccccaccacctaacggcaggggcaggggcggcaggggcaggggcggcggcggcggcggcggcggctgtggctgtggcggccgccgcagctggcaacgcgatccttccgccccgcgcccaaacaggaagtcccggacgcttgctccagagagcggccgcagcctgcggcgagagacacctgaggctgggaaacggctccgggagccgcgcgaggacacagcccctcggcaggaagaggcacatttcacgctctgcggaagaaaagtctgcaattgtcccccctctggaaaagagccattaatcatattttcttcctggaagcaatctaatacctagtcctgcagctgtaaataaaggtggctatttaacttcttttggctttttcaaaccttatgcaacatgtaaccagttcacttgaaacatctgcacttttaagacaggaacaccaacaaagtcatacctagaacatattctgaaagcattacttggaaaataaggagtttccaactactttctgagaccaacttcgtccttttcccttaacagaagtgtcaaagagcacattaaacgggtatttagtaaacagaacacaccaacctctggagatgagactcccccaatatgctaatcatgaaattcatgtaccctttcatttctgtttggctcacttggaaacaaatttatattgtcatttacttcaaaaaaaagtaattcttgctgaaaactaacctaattacaaatacatattaaaatacaatggacaagggagataaatcgccaatttaatgactataaatttactgaacacaggaaatcaaaccaatataatgacgaataacgcttcattaaaatgcttccctggtttcagaatttaataatacataaattgtttgaaacaaagggttatgctaaagttgtctgcacacaaaacttacataaaggaacagtgcctcctacagagtaagtgctcaataagtatttgctgaataaacaaaaagatctggcattacaaatttaaaataacaaggtgacaatttttatgatccgaattgactgaactgtgtagagaaaaaaatgttttcagtggtaatattaatgcgatatcatcttataaaagcttgcccaacatgagtgcagcatcagaatggatttacatagcccatgactattttttctcatttctcctaatattcatttattctcttggtccttttaccctacccctatcaccatgatcctcactctcccaaaaaaagaacctacatgctatttccaaagtacaactcctctttaaataaggatctctttcttgaattaggtaaacctgccatgtatgggacatggtagcttttatattttattgccaatcaatttaaagtaagcatcatccttagctgggcattgtggtgggcctgtgcacctagcgactcaagtctaaggcaggccattttcttgagcccaggagtttcgggttgcagtgagctgtgatcgcaccactgcactccagctagttattagagaaccacagttagtccactccttcactttacacattgggaaactgaggccccaagaagttacttaacaaaggttacaaagtgtcttgttacttcaaggtcaaaactcttacaaaacagtcttctataaaatttagaagttataaaaaaagttaaatccattttactactattatatttatagtatgataaactgcaaaatggttgattttttttaatgtcaaaggtaaagcaatgggaagttaaaagagaaaaatggaagaaaaaagttttgagaagtgaatgagagaataggaagaggccaagctgtcaagtttttctcatacaactaaacaatgaaattcaaagttggtaccttgagcatgtttagggaaaaaacagggtcaagaaaaccgtaagaaaaatatgtctgtgaagcacaacaagctggaatcatatagtttaggagcaccaagtaaagcttggtctgtcaacatcagaaaatagacaatagttacagaag

SEQ ID NO: 316851 - DNA, 4001 bp, Homo sapiens
tacctaaattatataaggatacacgacatgtacatgtataatttcatgctttgtacatttttactctcaaatatgtttcctattaatttcaaaattagttcatgcacaaatttctatgaagaaaatagaaatgtaattcattgaatgcctaacctcttgattttctactccattgctggaaagctccaaaatagtacctccactgtcaaccactgctgatgtcattgttattccctgaggaagcttcaaacgctattaatcaatgaaattaaaggttcactgatggttgccagtgttataggtttgcattatcatgttttaaaagtcaatagagatggagtggagtagatatccagaaatccagtcttctaaagatgattaaccagaaagcctaaaaagaggaagaatttgaaaagttattttaaaaattacaggaaggacataaataaagcataacttattgtgcaatctaattttaacacttaactaagaaaaagaagacaggcttaacatccccgtgtcaaaagagggcagtaatgaacattctgcttcttaagagttagtaatcaagttcatgaacatactgaattaagttcttaacaagcaattgtacataggtagtattatgatattcatattctaggagataaatataactgtgccaggtgcggtggctcacgcctgtatattccagcactttgggaggccgaggcaggcggatcacgaggtcaagagatcgagaccaccctggccaacatggtgaaaccccacctttactaaaaatacaaaaattagctgggcatggtgaagcgtgcctgtagtcccagctactcgggaggctgaggcaggagaatcacttgaacccaggaggtggaggttgcagtaagccaagatggcgccactgcactccagcctggcgacagagtgagattccacctcaaaaaaaaaaaaaagttataactttctccctttataaagatgctgttttattcctgaaatatgttagtttctataaatgttaaagatctcttattcatttaatatataaaatgtgccagactgagaaaacttttaaaactatttgcctatttaacaaatcaaaagattattgatccttaaatatttcattcttcttctttgcctcatctggtttgtctgaacaatcagaactgtcttttgcttatggcagcaatctcattttgtattcacactttgaatacaggaactgtatgtaagagagatttatttgaattgcttatattttcaaataaagtagtttaaaaataaagtagttaccacttggaatgccttcaatattattttatcatactttcctcaattttttgatattagttctatcatactttcctcaattgttttgatattagttcaagatgcaatatagcaaatggtttcaagtaatttcttaacctctcacattttttccccttcctatatgatctgaatttatgaattaaattactcctaaaaaatttttttgatttcatgtatacaaaaattttcatacagaggaagtacagagatttattactaacagaattttttcatgtcaaaaagaatgcagaaaaatcaagcatatctgaagagaaagtatatagttcccataaatcattccattaatattatgcccttgtattatgtttgcctgctggcaatatacagatatggaaataaaataataaagaatttccagaaacttctagaatagaatgaaatacctgaaaaaaagcagaaatttcatcttactgatcagtactattagcctcccttttgatcttataaacataaaatggaacagaaagtctttgtatcttaagaagaaaaaataataaaattccacagtcccatcatactatcaccatataaggtactattcccaatatatataataatagcagaaataaattttacttacagtttgtatgttaagtagtctaagcatccttcactattttcacaacttgggaagagctaaaatctgaaccagtagttctttggaactgccagcgggaggggaaaaaagataatattaatataattatattaaaaagcactatgctcaaacagatgtgattgagatagtaaatacttaataaaacaaatcacttccaaagccatatgtcgcacattcacataaggaatataataaattatttctaggtttttgagaaatcagaagtttttatcaaacttaaaattttaattcaccactacataacaaatattgagtgaggacagaatcaacgtatgaagcctatgctccatattatgggctgcatttcaaacaggttcttttttttttctccattgggcaagttctaataacaggttcttagtaagtggctacaggtataacccctgctccccaggagtataaaatcaagtttgaaaaataggactagcccaaaaaactactataaaacaatgtttaaggaaaaaaaattttttagagttggggtctcactcttgtcaccaaggctggatcgcagtggtgagatcacggctcactgcagcctcaaattcctgggctcaagctatccttctgcctcaacctcctgaggagctgggactataggcatatgccaccatgctcaggtcagtatttcttactttttacttttatttttaaatataagatattgctatgttacccagtctgatctggaactcctggcctcaggtgattctgccacctcagcctcctgagtcactattagacatgttcctgctatgtcaccccaccaacttagcatcagcacccatccaaacatcccaagccctacttctaactcccaagcctcctcaaatagtccgccttctttcaaaggctaatgtattgacttaagcacttgatcgtaggccttgttccatcaattattccctttttccttaaccttctcatactaccattggacttctttccctcaacatataagcatttgcaagatcctctcatcttaaaagtagaaaagttggctgggcaaggtggctcaggcctgtaatcccaacactttgggagaggaaggcagaagatcacttgagcccaggagctccacaccagcctggccaacatagggaaacccctgtctctacaaaaaataaaaaacttagctgggcctggtagtgcaaacctgtagtcccagctacttggtaggctgaggtgggaggaccgcttgagcccaggaggttgaggccacagtgagctgtgatcctgccactgcactcaagcctgggtgacagagcaagaccctgtctcaaaaaaaaaaaaaaaggaaaagtcctcttccattatcctgcatacccttccagctactgctccagttccttcctttctcaggtaagtttctagataagaaatcttttatattttatactcttgtctccactttctaatttctcaagcactcctccttctatcaaagtttggcatccatccccactcaactgaaacttttactaaattctgcttgtagaatccaatggatacatttctgtcttcataggacttgctgcctctgaagcatctgacactgttaatcactcccttcttgaaactctaccttgaatttatcttttccctctctggctactccctttcaattcccccttgcaggctcaaccctcattttcaaggggcctgggacaagaatacaaatggaagcctacataccatgtgtctaaatatttttaaaagttctaaatcaagctgttaaattattattccatccttctatcttgactaataataacctgaaaggccaagttctatttttgagttctcaggttcccttcatgttacgtagggacataggaaggaaaatccataccccttccccttgtctgcagccaactccttttctcttcccacttttagctccactttatacgaaggacttcatatgcacacatatataaagcctacaggtccaagctctggtcacatgactgcaaacagctgctccttggccatcccttaaaca

SEQ ID NO: 316852 - DNA, 4001 bp, Homo sapiens
tttacattttcttataagtctttgaaatacagtttatattttacacttacagcacatctcaatttagactagccacatttcaaatgctcaatataatgtggctattggctatggtattggacagtgagaatgagtctaataatctttcctagagaccactggatacataattacaggcctttcataagtaacagtaagaaagtaaaagactgatgaaggatcctaagtataaaaatggatgtagactgaggcactcattcttcccaccatgtgagtgaaaatttcaaagggattatgtaagtatagaaatttttcaccagaaaataggttgcaactataatctaaggaataaccgataaacttcaggagccagagaattctttccacacataagcaattaaataaccactttttctataaattcatacaattttagagctgaaggagtcaaagcgggacttcagagcttatgaaattcagtttaagtgacttgtcaggatacaaaagaaatacatctgtcactgtgagtcctgagaaaaacactccgttaaacttttattagtactttttctttttgaataacattacctatcctgtgtgtcctttgtgcacctacataggtatcaaatattcgctgcaattcacacttcccagtcatctgtcgtaatagccatttcatccaaaatcgaaaaaagtgcccatagaagaactcccacaaagaaataaacatttttttttcctggaggagggaaacatacaagacaagcttaatgaccttaaactgaattttaaaatttaaaaagtttatacaactgatcaaatctcaaattatgtatctatcatttcattgtgtctgttttgacagtttaattaggcatttaaaaacaatggcaggtgtaatatataccgctattaattgatgatcaaatggccaattaatcactttttcaaaactaaaattcaaacaatgtactcaaactattcaatggcttgaaagagtaacagaatggtttgcactttttgctaaataattgtatttcatatcttagtttcctaacttcccattctttgagaactggggctcaacagttcaagatcaagaggactccaactaatcaacaattaaaatatataccaaaacatcagagttgtttttatagaatacactcttcttatcccatgtggataattcgttacaactgtcccagtcaggtgatgccagcaaataaaaacactacaaacttaagtatacaagttgaacactgagtatataacaccttagctcattcttgattttccattcaataggtcaagggcagaaatactaacaagtttttgttttgctaagtacacactcgatacaactatatcttatgccataagaaaattcttcagcttctaaatgaaaaagtcagggagatactagtgagagggagatacttaaaaacaaaattgctcgtctccttcctgccttaaacattcccacagacacgtcacctctggactagggcctgaggagggactgtcgaagttcgaagtacccgcaggtcagtgcagaaagagcgcatagcacagctgggttgatcattatcttgaaaatcaagccatctagtccgcgctcattaggacaaaagcgcagaactgccgagcagaggggatgcacgcgtagcggcgcctgagcaccccagggctctgggcgtctctgcgccgacccccctcgcgcgccgcccgcgaatgggagggcagggctcgcacaaagacccgccggcccaggcgcccccgggttcccgcagaaccccgcggggctcgcgagcccgcgcgctctcagtgcagccgcaccgaggcatccggggcaagaggaaaagaaacagcagccacctcacaggagcggaagaactagggggagcaggagctgcctcggtttccccactgcaaacagccggcaacggaaacgacggaacactcccttcaagcaccgcgacccggaagtcagggagcgaggccgcggacccgccttcccagggccactgcccgccccgcccctccggcctcttccgattggcccgcgctccacctattgctaacgctggagagaggtcgagctgagtggcccaggcgcgagggctcagatactagggacgcccagacggtttccctggcaacggcggccaggagccccgccccgcgccggagtagcgcctcctagcgctgcgctggagacttttccctccttgaacctcaggtccttagcgcgggttgacaccttgtactattcctaggctccaagcgcggaagaaaccctgtgcttacggtaacttatagtgccttagttacaaaagcgctttcatctgcattgaatcttaattctgtgaagtaattatgaataactccactttatgcacgagaaaagggaaccggctacttgactgtggccaatacgtggcagatgaggaaagtccatgtgttgagaaacgaagtttggactttatcctataatactataggtctaaaagttaatttatcaaatgtttattccctaactggttgtttttgttgaaaaagtaatttcgtgattactttttaaaaacctcaagcagtaagtttcttaattcaacaagtatttgttgattgttagcacaggcagtgttccaaaaggcagtcaaacacgaaacaaacagccaaatatttaatatgtcagatgctactaaatgttaagggtataggggttgttagctaaggggtaatggggagtctgtgggggaagtcattgcatacagtgtggtcaaggaagtctcattattaacgtggcattttggcctcattgaacgaagtaagggagtttactgtgggagtatctggagggagagtgatccaggcaccagaatgacaagtgcaaagaccttgaattgggagggtttttgaaatgttggaggaagagcaagaaggccggggtggctggaggagaaagagcaagggggagagtagaatataaatacaaaggacaactgatactgaaaacaaatttccccatccacccaaaactcctgatacctccgtcaccttgctcagaagcaaccagtattactttcttgtttctaattccaaaaatattatatgcaagtgtatatatgtatattccttccaactccttgaattgaagcaagtgatacatactttcccacatctcaaccagcgtttaaaaaatggactaattgtagaacactagccatgtgcagggtgcataagccgtcatccctgtcccataccaacaatgaacttggtaatgaagtctggatagacactacaatagtaaaatcacagaatcttaaatcttaaagagaacttataactatcatctaatgtaatttttaaaattatagattaaaagatttagaaaggcaaagtgcacagccgatttggcaaattgacctgtaaactaacttctatttcaggaggatctccattattacacaaacttttacatagtagaaggtgagataattctatatgtaatccttttgccttttcaaagtgctatactaagtgtaggcagtgcagtagaggaactctctcctccttgtttccctgctgcctgtttgcccacttccatttatgtctttccccaagagaagagaatgctgatatgttttgtcagaaccagagaaattgattaagctgcatttattataagcagggtcactgtacattaaaacttcttatgcataccttttgcctcttcccttttccactaattcacttgcatgtaactggcagatacattaaacaaatcctgtttctcaggaaagattgtccatctctatttcttattctctttggttttcttctttcttgtggctagctaaaggttaattatatcctaagattaagattctggtttcatggagaaagtgggaccttctccatctaggtccctaggtctctcaacctgtgtgcatctacgtggccttatcagatacacctacatacaaaccaaaggcaat

SEQ ID NO: 316853 - DNA, 4001 bp, Homo sapiens
gcaccagccctgtgcctgtgtggctgctgcacttccagtccttccgagcggcccgcgtccccgcctcttaggctccggctcgggccagacgcggcccttgggcccctagcccaccgccgccaccagccacgccgcagctcaccccaagcaggcctgccccgccggtgcgcgcggcccaggaggcgggctccgcccggcagccgccgcaaatggccattggggcccggaccagcccgcgggaagctgggagtgggcgcgctccggccgggcgggaggagaaggaagcggcggccgggcctcccgacactggccggcgactccagggggctggaggacaggaagttgaaacccccttttcgcagctgcggccccgtggcaccagctcctactgcaccaacccgcccaggccacaggcgcgccggcgtttctggtttccagttgaagagggcaggcgggagggcgcggggcacgcgcgctcgcgcacgcggcgggcggaatcccccggctcccgggagaccctgcggcccgaccctccccggtcaagccatcccccgggctgccggccccttgcctagctccggggtgcgttgggcttgaactttacagatcgccagacccgaagttaaggggaggagaggaatgcctctgccacaaccctgtctacaagaagcgagatgagcacaccctcctctgttaaatattgcaaggtgacactggatcgcctcccacacagggattttcaaaaggtctggcggggggactacagtaaacaagaaaggtgttttccctgattattagtttcctagggaagagcccctaaggactctgcagacggaggggcttttaatctgtgtgcctgaactccaatcagcagctacgcacagaattagaagtgtgtccaaaaggcgtttccgtaaaacagaaacttaataatggcgtggctccactcgctcgggttcattcatttattactgttttcattgtcccctcctccctcccacccggtctctctatgaaaccggaaagggaaccgcgtggggaaaggggtactaaaaagggggcatccgcctgaggagcggcagacagaggaggacggtgaagtaggagcgctgcaaggagaaaggaaggacacgagggatggagagacagcgaggaccagggccaagggcggcgggcgggagagggttaaaggcaacaggagacaaggtcctccctccactgcctttcacactccggttgcgggagaggccaagcgagaaaacccaaatctagatgaaaaccgggggaggggaggggagcacaggtaggcgatctggactgtggcatctctcccgccttccctgtcgcgcagacatcaccctgtgcacacacatatgttctgtgttatataatctatataaaagatgcctatgtagccgcggttcacacaggggcacccacagacctcgcgcttcatgtacccccccccccccagcgtctcctgcacccgggagacccgagaactcagcgatcagctggctgcccgcgattcatcgctccattcacgcccaggcagggaataccgacattaaggcactccgggaagacgcgcagggctcccgggaacagtatcaggcgaaagcatcacgtaccagttttcctgcatccattggatggcttcattctcgttgaactgcttttcgaattcatattcttgtaaagtcaacactgacatgttcattggggctgatcttcggagtcgctacgtgttctctatacaaaataaaataatctgtaaagcgcttgatttcgagtgttctcctgtctgcttcccccacccacccccctaggtcttccccacgccgctcggtctccagcggtcgtctcttctcccagcctctcagctacatccagggctgagcattgcctgcgcctccgctcccagctcctctctctggggctctcctcctcccggcgtccgcatccaccgtaggaggaaatgaatgccttgcggtcttagtgcccgcacgtttgtccatcaccctttttactcgtctacagggaaatctcctccccctcgtgcgatttgagaaattaacccttggcgagggagtgtgcgaaagagcgcgacctctctccgcccgggggggacagttttgtttacagcgaaggtggttggaagagtgggggaagggcgcagagagaaaggaagtggcctggaggtcatccagatcccctaagcccaacctcgtgggccgccttgctttgaatgaagtttcagcttgcagggcgcatccccgcggcgcgtggacccgagagcttggcgagtaaacgattgggaaatagtaaaacctgccagctctcttgcaagagaactccgggcaaatctacgttgagatcaccagtgaagggaatacgcttcccacctcctcgccctacctctgggaccacccccacccctacccccacccccacccgggagctctggcttagattcacgctaacccaggccctgcggacggcagagctccttaatctcgtacagacaggggatgctgagtgtgaggatagtggataggcgagagaggctagtagccggaagtggaagaaagggctgggttaggtggagggtttaggtaccgggaagggggggattaatgaacagaggcagagtggggaaggaagctgacaggagaactggaccgactggccaaatgcaaaaactttatttgcatgcatgagaaatttggctttacttgctgtacttgtaggtagaacagaatatgtgaggagagggctgaatgtactgttgacccctactgggccctcagcctccaagaggaaaaactattttctattccatccatccctccactcatttcccccaagagtttggaaaaatgaaatatgagacatggaagtatctaatgatgtaattgtaaactttacaaaataataaggagccctgcttttaaaaattaggtggatattaggaccagaaagaaaattccccttctgagaacatccccccacctccccagtagtccaaaaagggtactttcattcaatttagatgcctctaacccacaaaaagtgggaactgggagaaaaatttttaaaggaggaagggaccggccgcggtggtggctcacagaagtaatcccagcactttgggaggccgaggtgggcggatcacctgaggtcaggagttcaaaacagcctggccaacatggtgaaactccgtctctactaaaaatataaaaatcaggcaggcgtggtggcgggcacctgtaacctcagctactcaggaggctgaggcaggagaatcgcttgaacccgtgaggtagaggttgcagtgagccaaaattctgccactgcactccagcctgggcgacagagggagactctgtctccaaacaaacaaacaaaaaaaaaaaagaggaaggtctaatgagaaagtaaagaaataatttttaaaatccagtacaatatatagattaaagggctagcctagttgattagcaaattaatgtatacattgacactgccaaagattctgtgtagggactgtcctcatctcccccattaagggttgtctttcttttttctttttctttttttttttgagatggaggagtctcgccctgttgcccaggctggagtgcagtggtgcaaactcggctcactgcaacctccgcctcccaggttcaaatggttctcttgcctcagcctccccagtagctgggattataggcaagcaccaccacgcccgcctaatttttgtgtttttagtagagatggggtttcaccatgttggccaggctggctgtgatccacctgtctcagcctcccaaagttctgggattacaggcatgagccaccatgcccagccaagggttgtctttctagagacctctacagtacaagtctacgtcactttgaagtaaggcccaggccaaaactcttggcaagattgggctggaagataggtgtggccagataagaaagaaccattttagcac

SEQ ID NO: 316854 - DNA, 4001 bp, Homo sapiens
ggcccgcgtccccgcctcttaggctccggctcgggccagacgcggcccttgggcccctagcccaccgccgccaccagccacgccgcagctcaccccaagcaggcctgccccgccggtgcgcgcggcccaggaggcgggctccgcccggcagccgccgcaaatggccattggggcccggaccagcccgcgggaagctgggagtgggcgcgctccggccgggcgggaggagaaggaagcggcggccgggcctcccgacactggccggcgactccagggggctggaggacaggaagttgaaacccccttttcgcagctgcggccccgtggcaccagctcctactgcaccaacccgcccaggccacaggcgcgccggcgtttctggtttccagttgaagagggcaggcgggagggcgcggggcacgcgcgctcgcgcacgcggcgggcggaatcccccggctcccgggagaccctgcggcccgaccctccccggtcaagccatcccccgggctgccggccccttgcctagctccggggtgcgttgggcttgaactttacagatcgccagacccgaagttaaggggaggagaggaatgcctctgccacaaccctgtctacaagaagcgagatgagcacaccctcctctgttaaatattgcaaggtgacactggatcgcctcccacacagggattttcaaaaggtctggcggggggactacagtaaacaagaaaggtgttttccctgattattagtttcctagggaagagcccctaaggactctgcagacggaggggcttttaatctgtgtgcctgaactccaatcagcagctacgcacagaattagaagtgtgtccaaaaggcgtttccgtaaaacagaaacttaataatggcgtggctccactcgctcgggttcattcatttattactgttttcattgtcccctcctccctcccacccggtctctctatgaaaccggaaagggaaccgcgtggggaaaggggtactaaaaagggggcatccgcctgaggagcggcagacagaggaggacggtgaagtaggagcgctgcaaggagaaaggaaggacacgagggatggagagacagcgaggaccagggccaagggcggcgggcgggagagggttaaaggcaacaggagacaaggtcctccctccactgcctttcacactccggttgcgggagaggccaagcgagaaaacccaaatctagatgaaaaccgggggaggggaggggagcacaggtaggcgatctggactgtggcatctctcccgccttccctgtcgcgcagacatcaccctgtgcacacacatatgttctgtgttatataatctatataaaagatgcctatgtagccgcggttcacacaggggcacccacagacctcgcgcttcatgtacccccccccccccagcgtctcctgcacccgggagacccgagaactcagcgatcagctggctgcccgcgattcatcgctccattcacgcccaggcagggaataccgacattaaggcactccgggaagacgcgcagggctcccgggaacagtatcaggcgaaagcatcacgtaccagttttcctgcatccattggatggcttcattctcgttgaactgcttttcgaattcatattcttgtaaagtcaacactgacatgttcattggggctgatcttcggagtcgctacgtgttctctatacaaaataaaataatctgtaaagcgcttgatttcgagtgttctcctgtctgcttcccccacccacccccctaggtcttccccacgccgctcggtctccagcggtcgtctcttctcccagcctctcagctacatccagggctgagcattgcctgcgcctccgctcccagctcctctctctggggctctcctcctcccggcgtccgcatccaccgtaggaggaaatgaatgccttgcggtcttagtgcccgcacgtttgtccatcaccctttttactcgtctacagggaaatctcctccccctcgtgcgatttgagaaattaacccttggcgagggagtgtgcgaaagagcgcgacctctctccgcccgggggggacagttttgtttacagcgaaggtggttggaagagtgggggaagggcgcagagagaaaggaagtggcctggaggtcatccagatcccctaagcccaacctcgtgggccgccttgctttgaatgaagtttcagcttgcagggcgcatccccgcggcgcgtggacccgagagcttggcgagtaaacgattgggaaatagtaaaacctgccagctctcttgcaagagaactccgggcaaatctacgttgagatcaccagtgaagggaatacgcttcccacctcctcgccctacctctgggaccacccccacccctacccccacccccacccgggagctctggcttagattcacgctaacccaggccctgcggacggcagagctccttaatctcgtacagacaggggatgctgagtgtgaggatagtggataggcgagagaggctagtagccggaagtggaagaaagggctgggttaggtggagggtttaggtaccgggaagggggggattaatgaacagaggcagagtggggaaggaagctgacaggagaactggaccgactggccaaatgcaaaaactttatttgcatgcatgagaaatttggctttacttgctgtacttgtaggtagaacagaatatgtgaggagagggctgaatgtactgttgacccctactgggccctcagcctccaagaggaaaaactattttctattccatccatccctccactcatttcccccaagagtttggaaaaatgaaatatgagacatggaagtatctaatgatgtaattgtaaactttacaaaataataaggagccctgcttttaaaaattaggtggatattaggaccagaaagaaaattccccttctgagaacatccccccacctccccagtagtccaaaaagggtactttcattcaatttagatgcctctaacccacaaaaagtgggaactgggagaaaaatttttaaaggaggaagggaccggccgcggtggtggctcacagaagtaatcccagcactttgggaggccgaggtgggcggatcacctgaggtcaggagttcaaaacagcctggccaacatggtgaaactccgtctctactaaaaatataaaaatcaggcaggcgtggtggcgggcacctgtaacctcagctactcaggaggctgaggcaggagaatcgcttgaacccgtgaggtagaggttgcagtgagccaaaattctgccactgcactccagcctgggcgacagagggagactctgtctccaaacaaacaaacaaaaaaaaaaaagaggaaggtctaatgagaaagtaaagaaataatttttaaaatccagtacaatatatagattaaagggctagcctagttgattagcaaattaatgtatacattgacactgccaaagattctgtgtagggactgtcctcatctcccccattaagggttgtctttcttttttctttttctttttttttttgagatggaggagtctcgccctgttgcccaggctggagtgcagtggtgcaaactcggctcactgcaacctccgcctcccaggttcaaatggttctcttgcctcagcctccccagtagctgggattataggcaagcaccaccacgcccgcctaatttttgtgtttttagtagagatggggtttcaccatgttggccaggctggctgtgatccacctgtctcagcctcccaaagttctgggattacaggcatgagccaccatgcccagccaagggttgtctttctagagacctctacagtacaagtctacgtcactttgaagtaaggcccaggccaaaactcttggcaagattgggctggaagataggtgtggccagataagaaagaaccattttagcacggtgcctgagcctgtgaataatcaataaatatttgtaaagtgaatgatt

SEQ ID NO: 316855 - DNA, 4001 bp, Homo sapiens
gctcaaatggaaattatcctacaggggttaacagttcattagaaagaagaactgttaacaggttgagctcattaccagtgagcaaaaggaggtttgtattttcccaaaatgaccataacagaaaaacctgccagtacatctctggattgtccttcatcttcatgtctttcttaaggccaggtattgcaggctacttctattgatgctattccactttactttcggaagaacgaatgatctattcagagtttaacaatgccggcaaagtattgcactcgtcgatgcttgcagacctggagcagcgagcaggctaagccagactttcagactttatactaatctgacacatctaattgtgagcaatattttccatgggattgagattcctatcaatcttccccaagcagaccgaagttacttataagctaatgcaataatttctgtggtaccacataaatgttctttattttaaaaaatcagattctagtaactcttctaagtgaaattttctggccttgataccagctgcaacttaaccgcagaaactccaagatgcatgatgagcaaatgtgcgtgaatttgaagtgtttttgaatttgtactaaatttacatagatatttacatagaaatgactgataaaatgttgttcagggagggatgtacttattttcttccgacattatcactgtaaattaagattttgtaggcagtaatcttttaaattgagaatgagcaaaataaaattagaaatgaatgtttttgtttttttccccccaagacccctcagagtctgaatcagtctttcccaattgtgttcttttatggtagtttgttcttcaattttcacacttattaaatctattttatattaaaatcacatgcttatttctcccagtagtacttctaccactttgggcaaggacgtcttacttgtttttatattccttgcagtacagggtaggaacctaataaatattgattaaatttaacagtttattttcaatcactcaggaagggttaaaagtcaaatgtaaatcgttcttgaaattgtccattgatatactcaaggcttatgaagatacaaacctattttttatctgagtttcttaaccagaagtcaataggtaggatttttatgtttataaattcctgaaatgttatgcaaaatgtatgtatatgtttagatatgtgcatatttcttcagcaaaaatctatagactgtaatcaaatgaatctctctctattcaccctacctcaaaatattaggactcacttccctaggcagctttactcaactcctcaatttatcagagctgaaaaatagttgggaaaaatacaggctaacatctgcaatataatgtctccgattacagcctttcacccacacatgccaatcttattatttctgagctatgtctgcaaagaatacatttttgagagagagtacatttttaaccagcattctattcccagatttttatactctaaagaggccattgtatatttccagtactttgtgatttcatcgaacatgctttcaggctgctgtacccgcaaacatttcccttcagtagaaacaaataccgtctctctcaagccttctccacgcactccaagtcaacatccaaacactcaactcatcaaaggaattgctgcatctaagtgtcaggggaagatccctgaaagtaaactgaggctgagtcacctactagtgatttccaatccgtaccaccagaggaataagagacaaaaatacctgtgctgttactgctgcaaatactgggcagaagaaaaagaatggtcacttgaagcagttccatggtgcccgtagatggtgtcaatatcttctttctccagaagcaggcagggacaattccctcccagcctggcagggccttattagcaaatggaaaaggtgtagtgaatgtgaatagccactgcccattcctacttattttgggggctctgataaagaacgggaggaaatacacacactccctttgggagttcagcagagaggagatttattgtttcagtcccttacaggaactctttttttttctctctcttcctttggcagccacttgtgtttttgttactacattattttgttcttcttcaacagaaaggtcgggactggttttgaacagaaacagatccttcttgagaatggatcatagggccttctaacttttgttttgaaagtgcattctgaagtggttataaaggggcctcatttagcagctactcagttgggataaagaggctttcactgcccgagggttaaattttagagcaaaatccatcaggaatcaacttaacttttctctttccaacttgaaagccagattagagaaggccaccttttggatataagtgaaaaattgtattaaatagattatgctctgctcttgagtaagcaaaaagacttccaaagggtgtacagagaagtttttcagtcttttttaatagaattaagcaaagacatgtgaatgtctattggtcactcctggtttttactaaagaactttgatgatgaataaggaacaattacttataacacctcatgaatgctcttctttaggggacagggttggaatggcagtgggtgaaatgccatcacacatcagtgaagctgggagaggttgactctttaagactggaatgccaaccaggctggataatctatatagcaggggtcacgttgatgtcagttgtgactgattaaaacgtggtgataacactgccatagtcctgggtacaagccccgtgtgtgccaatgacattatatttttcttcagccacaggcttcatgtctcattttagctgatcatccttttacgtacctttactcatgaggctttactggacaacattgtcaatgaatcggtgtagattcattttccccacaaaaaaaacaaacaaacaaaaaaacaaaaactgttcaaaaattatacctttacctgtttgcaagaagggcacacagtttcactgctgcaccatgctggaaaatacttcatacaaaacgagttagactgagtcaactgctcaaaacacttaaaaacgttagcttgttttatccaacgttataccaggggtcagaagagctaagtttctattttgtgcataagattgcattttaccctcttctaattgattttctaaaacagactgcctttggcgttgttactttatttggcatatcctggagaatataaagataggaacatatgtgaatagatgtcacatgcactttccataaataaattggggtgtggccatgtgaaatcacagtcgaaccctcacattgcctcacttcctgctccttctgtactcaagttgtcagtactcagagtcaccactgatgctggtcacaataatttcttcagggattccatggcatttggactcctcagcactaagtgctatgcatttccatttagtacactagatacctattctaagaatgcttgacagtagaatattaaggctacttaaaagacaaagggcctgttgatgaaaaacaaaaactaagaaacatcttaaaatgctagccaaaaaaaatttagaatataagaacagaaaagaaaaaaaaaaaaggagtaataatgaggggaggggtcagccttgctttactaaatcagaagatatttttaaggtaaaatatttaattaaaacagcaatgattgccagaggagacaaacagatcagtggcatagaatagaaagtacagacacagaaatatttatatttgtttctatctacataaatatacacgcagatatatttacagatatgtgtttgcatatgcatgcttgtgtgtatatgcatgtatatatagagagagagattaaatataggtgagtttaacatgtagtgactgtgatgaatagggtatatatttactgtgggatttttttgacaatgtgttaaccatctaagaaaattttaaaattaagtgtctgttttacttaaaataccaaatcttacatgttaatct

SEQ ID NO: 316856 - DNA, 4001 bp, Homo sapiens
tcacttatgctctaagatggtcaggaaaataggaagaaataggaaataggcagaatagtaaatttatctctttattagataccttgattaaacatatagacttatgtatgaagtttggagattgtttttaacggggttcattcatttatcccactctagttaattatgaaagacttgtaaaattaagtctcgtatttacatcttggaacaaggtttattctgaaacatttacttgagtaatttcttaagaaaactttctatttgcatatacaatagaggaaaataaaaggttttaatcagaatgattcattttcatcgtatatcagatatagtccatttcctagcagagtaaccaacatgtagacactcagttgttttcattcctttcattctttcttccttttctggacataaaatctatctagcataattggagccaatgctcacccttctgtttacttcctataggagcaacataaatgacgctttagcatttttataatggacattttcctaaattgtgggtgtaatcagttatctttcatacattagaaaaattggcagaatgtaattaaacaaaggaagcagtagtatgtaaatacctttcctactatttaaagattttcagagttagaacatcatagagaatgaaaataacagctgaatgttattttagagtgtttagtataggttacaacaatatgtggaaactaataaagagaatactggtgaaagctttctttgctaaatgtttctaagattatggcccaagatttaagggtgcttttggatggttaatttctgccttgcttaatcattcatctcatctctctagtagctgtcacagtgattcttgataatatatgtagcctttatatttgcaaatagaaaactcattttctcttttgtaaaattaatatattatgttggatgactgagatcccttccatctctaaaagttagtgattaaagtctataattagttattttttgagttgaaagtaacactcataatgattgccacaaagtacaatgactgtgtaagttcttcttccattccatctgtgaaagcagatgctctttgagtcttctgatacatttcagtagtgtttggccctctcaagtgtatttctgacagtatctagtttgagaacctgtatgtattggcaaaaataaatgaaagtactcaccaagttatctagtttaggaaaagaggttccaagcctgcaccgaagcaccaacatttttttcagcaaaatttttataagcctttaagaaaaatacagctttaacctgagaagaaactaaaatatagaaatggaacaaataaatgaaatgaatagcaaagcttcagttctaaggcagcacatgtcatgttaattattttatccagtcatacctgtattagggggccacaaaatcaagtttaatcttctgttgctttaaaagtaggatgaaagctaaatcagagaggaaatgacacaggcactgtattttgagatacttctagggcgatgttgacaaaactagacttcactatggggaaatgtacaaagtcacagtagtaaaggaggtctaagaaggctggaaaaaacttacaagaaaaacaaatacaccaaataaaccaaggagtttaaagttttatcagaagattagtctgcatacaatgattatacaaccaacaagaaggaatgcaataaggagaattaaccaacatctatgaattaaattcattatttgacactatatgtaatttatgttgataatctctaatactcacccaatgccaattagaagctgtaatatataaaaaataatttttacttgaactttgttagcttgcctttgaaatatattcttaatggtctatagtggaaataactacaaattgctgaagccagggagatctcaagaagcaagatacatttatttcttaataataaaacaaaaattcttcactcagatatcatgttcagtatcaaaaaggctcaaaataaaaagattcctccttgtcagaaagcttggcacagcaaggttccatttaagcactgttgtagacctgcataaccaatcagctttgaggaaaatggttttgtcatcacaagagtttaaggtaaaaaacacacatcgaatttaaaatttagaatgtgttattataggagctgtcaagtcaagtctcttattacgtataataacagtccaggaaaatgagcttacagcagtaagatttagaagatgcttcccttggtgaatttggctttcaaagtatagaaactatgtttataacaaagatatttcaggaacaaaggcgaatattaactgtatgctattgtcataagtcagttgccttcatcaaaaggcaggctaatatatatatttacttaatatacattttatatgtaattaaaatgaactggaatgttatatccatgggtgaaaactcagtgacttgatttactttgtattacataaggctagcaggacatagtgttctttttgaagtcaaatataatccagtcactggggattcagaattttagatgagttgggtacaatggcaaatgaactctcagctattatgataatacaacttaatgaaaataggacctgagtaatttaatgaaacagttatgttatggatttttttcctgaaatctgactttccataataaagatttcactttcaaatagataggccaattgcacttttaattgacaagagcaagctttgctatctttgcttaacttggattctcctgttctcttatggcttcacaagagaaaacatttgttgtggcaatgtttgcttattttaatgttgggatttaaaaaccaagaatgaatgaacttgatggcaaaacctgttcctacttggtatgattgtgtatataagttaatccagtggttgcccatggtgctgttcttccaaggacagagaagtgctgtgtcattccttttgggccaaatagcattgtatttctcagtgcctctctgctccacatatttcgtgccacaaataataaaaatgtgctagaatatttgactttaaatgaagctaggactatcttttaactctatgtgtatccaagatgtgcaaagttaaatctgcttcaagtacctgcttgcctttgtctgattttgtagaaactgagtagtatttatcatattgtgtgcacattgagatgaatttgcaaatggtaggacacttacgggacagtgacctacagtgtgttcttggaagtgaaatgggagttctgatgctggatgacctggcctatcctgtgcccattcatgtagagggtaatttttgattttggccttacccatataggttgttgggagttgccactaaacctcacttttgatcactttcctctatttacccttgttctcttggccacaagggtggttagttgtcatgaaataattcatgtttctaaaatccagccaagctattgaatgagtgaattcttagtactgttggattggattgggagaattaccaaatttcctttcatttaaaggaaaaaaaaaagctcaaactttataatttttttttttttttgagacagagtctggctctgtcacccaggctggggtgcagtggcgcgatcttggctcactgaaacctctgtctcctgggttcaagtgattctcctgcctcagcctctaatgtagctgggattacaggcatgagccactgtgtccagcctataaaatgttttgaaatcagtcctttatgagtttttccccctttactttatctctatttattttgtaaattatttttcccttcaggcaattacaactgtttgtgaaacatgtttatgatttggcttaaatttttttttttaatgtatctctttgatttttttctctacattacccttctcagtcttaaaataagatgtgttaacctgggagctgaaacctaagaaattgcatataagaatttgtgcatttgtgtgtaaatgtaccatttttttctccccctgaaaaag

SEQ ID NO: 316857 - DNA, 4001 bp, Homo sapiens
cccagctactggagaggctgcgacagaagaatcgcttgaagctgggaggcagaggttgcagtgagctgagctcacaccactgcactccagcctgggcaacagagcgagactccgcctcaaaacaaaaacaaaaaccgtggagaaaatgctaaactcgatttcttctgaacctatgctaagatgtcaaggtactgtgattcttctaaaagaattttaaaggttgttatgtttggtgtcctaaaagtgtacatggattttatattataacctacatcaagaaactcattcaggccaggcgccttggctcatgcctgtaatctcagcactttgggaggccaagaattccagactagcctgggcaatatggcgaaaccccgtctctacaaaaaatacaaaaattagccaggcatggtggctctcccttcagtcccaactactcgagaggctggggcaggaggatgccttaagcccaaggaggtagaggctgcagtgagctgtgattgcaccactccactccactccagcctgggaacagagtgagactctcaaagaaaaaaaaaaaaaagccttattcacagataattttttttaaaaatggaaactaaaatagaatttaaaacccaagctgctcagtttcttggaagatggatttttcctacttggtaatatactttgtatatctcgactattattgtgcatgcaagcacctctaagaagtacttgtatctgcaatgaattcttaaacctcagggagccaaataaaaagacaaggcccgaggaattctttcaaaaattaaagtaacatttcatatttgcttattctaacagacaaagaataaagaaggaatccgctaagttgcaagctgaggtgcagacaagtgctggttcacagtgacatcctagaaggaatgctctggataagagcttcaagcttctgtggttttctgaggaaagtgaacggaatctagacgtgtcctatagctcaaaaaatcagcgctatggaccacagcgcctaacagagtaaaataatacactgtgcagtttggccactaacagcaagagtgggaaggggcgaagaggaaccttgattgcccgacaccagggccacctgaaaagtcatcttgacacttcagtctttccattttgagatcggaagctttaaggaccattaaatcgctgccgctgccacaccaggcccgacggagcagaaaggctgcgctcacctgcggaagcgaccgggtgcacacctgccgggtggcgaggcccgcaccgtcacaccccgccccggcttacctgcccttcggtgatttttagcgtcaacttccatcccttcccacccatctggatccaaccaagcgcaagggcgggggagggagaagctagtgtcgcgaggaaaagcatccccgcaacccaccgcaggctttctctccttcctccccattccacacaagaggcagccacaccgcctctcctaaccctcgtctccaatgcaaggcctgaaatacttagaaaaaataataactgtttttaaggaaaagtaacatccccgctcccttccgcccctcaccttcacgaaagcaatcggggttgtggtaccttcgatatctaacaggatcacggtgacttcggcggggaccgaaagcacgaccatttccctaccggatgctacgggactcggcctgctgttggggagggcggagggcggcgccggctgcggctgcggcccccggtaccgtcttgggcttccggcggccccgcgcgatctcggagccagcgaccaagtgcagcccgccgcgcgtggggagaggacacttctgcacacctggaactggaaaaggcggccgcccaggagccctgaactcgtgagcaggacggggcaggagcccgagaccacgtgggcaggaaaaggggcggcccttgacgggttcggcggggcggggagggtgaaggcgccagcgccgattggccgccgtcaggcctcgaactggatccgtcaaaatgggcctcgcgtgggcgggaacaaagaagcgaacgcgggagcagggtgcgcgagagcgcgccctccgcagacaggttgagcgagcgggagaggcccggggcacgtgcagaaaggagccccgcgagtggcgcgccggggatgtgagtgccccttgccctctactgaatccagccccctccccgcccaccgcctccgcctttgcatagatacagtcatctggccagcccccgcccctcctcccggcgtcagcccgccagaggccgcgcggggcccgggcttcggccgatcagcccgggaggccccgccgcgcccccttggcccgcgcgcccgtggtcacagtggaagaggcgcccgcgctgcgctgcccggaggagccgtcgcgcgcccgcttcctgttcggctggttcctgccagctcgaggacaaaacacgcgtgcgcgcggcgggcgagcgcgctcgccgcctcagtcgccagcgccgggcgcagtccgcctttttccggagcagactggccgcggtgctagtcggtagcagcggccgccgcagcggctccgcactggcgaaccgagggcagaaaaaggcggggttgacggctttttggtaggagtgggctggaccggacgccagagacaaaggctcccaaggcaagagggactgtggccctgcgtcggctctgctcgggactgctgaccccaggaatttacgccccttcgtttttctcttctgattcttctcttctcccaagcccgcgtcccctcacgcgtggcctctctccttgccgggagggccgcgatggaggtcccgcccaggctttcccatgtgccgccgccattgttcccctccgctcccgctactttagcctcccgcagcctctcccattggcggccgcggccgccgcggcagctagccccgctcctcccttcgctcgctcccagctccgcccggcagggggcgcgccgggcccagcgccacgtcaccgcccagcagccctcccgattggcgggcggggcggctataaagggagggcgcaggcggcgcccggatctcttccgccgccattttaaatccagctccatacaacgctccgccgccgctgctgccgcgacccggactgcgcgccagcacccccctgccgacagctccgtcactatggaggatatgaacgagtacagcaatatagaggaattcgcagagggatccaagatcaacgcgagcaagaatcagcaggatgacgggtaccgcacgcttcttcccccgctccccctcccccagcgcgccgcacgcgcccttcgttcctcgtgagccgcgcgctgcccccattctttctcagagtcgattccccgcgtgccttctgggccccactagattggagggaagaggaaagtaagagatcgagggggtgactggagagacccgggaagagtgggggaagggcggaggggttggaggaggagggcggcggcgtctgtgtcccgagcgcgcaggcgccgcgtgggacccgggggggaggggccggcctcccagcgctgcacgctgcagctgccgccgcctcttcattgtgtctctgttaccactcggcgcggttttcctgggaagagttttagaggactgagttggggcacaagcaggcgactggtacccagattcacaaaacgtgttatgattgatgagttctctgggtggaacgttggcttgacagctgagaacgaagatggacctaagtaagataagatgtgagggattcatctaggaagttgtgccttctacctaaaggaatctgggcagaacctttactgtattttattggtctcttttgagctttgctttatgtagtgcggacagtgagctgtccgctggtttgagtaacttcgttgggatattgggatttttgtgtgacatagattaaatgtaaacatgaattaaattgcctacacttagggggtaaatgtccctgtttttatttcacgatttaattccagaactgaaggatcatttgagttatt

SEQ ID NO: 316858 - DNA, 4001 bp, Homo sapiens
aagaagctttcttaatcatttacctcttcagaatctaagccagcaaaggtcaaagcagtccagacacaacacaaggtgtagtgtagccttcctccctgatgcaagggctacatccacagtgtgaaggaagtttttggagttcaatgagagagtttatgcctttaacatagctctggtagtagccactgatcaatacaaaggctagacaaataggtgggaaagtggaataaatacctatctatctagatagatatttgtatacaaatatttgtatgtatttaactacttaatatatcttttatgttgtaaaaggcttagcattatgtttgcacattgtatcatgagcaacaagcctccaaatttacctatgccactgatgtgtggactcaatgaatatttcctgaaagcctatgtgtaaagcatggtcctggccatcggagacagaaaaaaacacagtcctgtcttcctttccagatgaagacacaaagacaattctgtggatcacatgtgatttttcaatgtctctcttctccaaaaaagagacattggacaaaaaaaaaatggacaaaataataactgaaatttactgatgtttcacgtaaatttagtgtaataccactttaaaagttcatatatattgctgtatatatattgctacatagcctgggaatatcactagtgaaatttaccaaaggcagttctcaaacctgagataatttatggaaatcttcaagatagggtgcagtatattatgatttctcctgatggaataaaagacttacactgacttttgactctacgaagctcattcactactttcaagttttatgacagggtttggaaatacaatagggcaacaattttggcttcccagatggacagccagaattgaaaccaagagccgatcaatatcagaccaacaaaataattaaaagcggaaagtgaaaaggaaaggaaaagaaatggaaagcagatatgtgagcttaagggaggtaaagcaaaaattaatatttacttgacttgtccgttctccgtgtaggtggttctataaaatcccacgagggagccgttcagccagccggcgaactccatggtcaggagatacaggccatctccactgctgggggtaagctcttcctccgcctcgaccaccacgtactcctgctttttgtactcgaaacacctccggacttgcacctggtccccagagggcctcttcagctccgggagccgggtgatcctggtctcccggaggtgcagccacaggtaccgggtgggagcgctcaggttgatggagatgctcacggtgcccgtgtaggtgtcctcctccaacaggggcttcacgtgcaggtcgtagtggactgggttgacgaagtccggcagtcgaaagtttttccactgtccgctctcatcctcactggccgggcagatgtcctggtcctgggcaggaggacctgaggggctggccgtggaagaaggcaggtgggaaggagctggcgcagtgcccggcccgccgtccccgctggagtcacacgatctggtcaagcccacggcaagtcccactattaatcctacacccaccaccaccgcacagagaatggccacatgtttcgtttgaatgcagtatctcttagagccctctctctccgcaaagttcatttttgcttccaaagtcaagtgttacacataaaaagatgttaaatttaactaactaacgtcagcagacttcctttttaaattggaaggaatcccctgatttggcagcctgttttcgcttttcccacacccctctctctggcttcttgcgccttttcctctcccttttcacgttcccaccagccactcaggatgaatgcggaaacaaggggggtggaatgaggactccgtaagaggagccgagtgggaggaagagggctggcaagaagattgtcacagctccccttataaacgacgcatctccacccctacccctcctgcactgcagcgagttaaatataaaacagggcttcgcttatcagccaacgggaggatgagccctcgccaaagctccgtcagcagctttcagggagcaagcgtttgggtgaggtgtgcttacgatagaaaatctcaacctttgccactcagcctggggcttcttcctgttgtgttcgcaatctctccctcctaactaaagggcttcttgaatttcagctattttatcagatagcttgctaaagaagctaagtgttttcttttattttttttccctcatattatgtaaacattccaattctgtcctttgaagaagtcatatcctggaattgggtgctcagggtgattcaaggaccacctaggtactcagtaaatatttgtcgaattagatttggaaagcatagccaggtaaacctaaatcagttcagctggtgctgggtgaatgagagagggggaacccaaagaaattagccaaagcagtagtggagctggaaagcttaagaagagagagggaacaagagggggagaagtctgaaaggacagagggacaaggaagaaggcctacttgtctctgcagtgtgcctccaagtgagattgacttccttagactttgatgtggtagagcacgtttaaagtagattccagatgtgaaaattgacctgttgggaaatccatcatccatgcaaatctatcattttgtttctgaatgacaagctcaggaagaaaaatctcaatgaacttcatatttactggcagcttagctatggactgacatttagagaggttaagctattgctcaaggtcacacacctggcaaatagcagaactggggtttgaacccacgttgtctgagtctaaagtccatatatctggccaggtgtggtggctcacgcctgtaatctcaacactttgggaggctgaggcaggtggatcacctgcggtcgggagtttgagaccagcctggccaacgtggtgaaaccctgtctctcctaaagatacaaaaattagccaggcgtggtggaacacatctgtaatcccagctactcaggaggctgaggcaggagaattgcttgaagctgggaggcggaggttgcagtgagcagagaccgtgccattgtactccagcctgtgtgacagagcaagactccatctcaaaataaataaataaataaataaaattaaaaaaattaaagtccatatatcaacgatcgcattctactgcttgcttccatgctctgaggaggataaatattcaagggttaagtaactatgaaaaacttggtatttccccagatacaatccatggatattaacagatctacttgccaagcaaacaatgctgggttaaagtgaaaaatcttcttttactactctccattcttgcagagcctccagatggtgacacacattgtgagcctctcagagaggaaacacgacggagtactttccccatttagttgacaagacagctttttctggtgaggtaccttttgagggccctctgttccacagagcacactctgagaaacgttgtttcaaacggttctaaattacaaactaaacaaacaaacaaaaaacaaaactttaaaagcaaacgggtccattttactctgtaacatttctgctgtttttctcacaaaatagtagtaacagaaaaagaattaaaggaaaaagggatatgtttttctaaattgtaggcccatcttgtattgattaattttacattctgaagcaaccctaaacttcttgagatcacagtatgtttaagtttggcacattaacttcctgaattttagcccttgaaaccctctttttattgaaaagatcatctgacatttcaataaatgtttgatgggtcaaatattttgatatgtttcttaggaatgaaaggcaaaaatgtggctcaaatttacctaaacatagtgaaaggaaaagcaaaaagtatttggaagaatgtacataaaattatgttaaactggaagtattttttaaaatctcagatgtggcaaacatttgaaatctcttaaact

SEQ ID NO: 316859 - DNA, 4001 bp, Homo sapiens
tgtcattggcttagtgtctctgtggagtctgtaatggtccttttacttacttgagtcctttctaagatggattttgttcattttccactaagattgcagaagctgcacgtggcgtggcagtttatgaattgggtcccctggcaaggctctgaaagacagctggagtgggggtgggctgtgtgtgtgaagccgctgcacagagctggagtcggctgtccacacaatcacgtctatgtgagagccggcagcctgcaaactgcttccctgcaaggggagacacatgccaggggagggccagagaattttgttaattctgtttatcttagagactgtttttttgtctgctgggggaaataaaaaacaaatacataacttccttgcttgtgtgcagtctgatttttttctctctctcatgccctcatttttatttctccgaagtatctctccccttcagtttggggcatcagtttatggcatttttccgtacatgtgtatatagtatctatgcacaaagtcagagatataaatgtctgttttagactcttttggctttagtgttctgtggaggtccatgagatatcagagatctcattttctttctgttaacataattagcagagctctctctgtgctcagagtgcatagctgagtcccgcataaccagcaataacagtgcattcttagcagcctccctggatagtttgctaaattctttctgagagcctctcgctgcctttacaaaggttatagctgaaaaacaaaccagaaactgggaatccaactctgtgagcagagagagggctgcacattctattatcgcacggatagaggctcaggttcatgcagtcgcgtttggagtcctggcaatttcagatgaaggccgtccttaggaaaatcagctatcccaagcccaggcagtctgggttagccgaggtttttgtttgttttgtggagtttttgctggttggtcttttgtagatgctgcaaatcacaaatggggaacctgaacgacacaagctttttcttctccgtatcattttacctggccaaaaaggcaaaagaaggggaaggtggcattgctaagtcacagggaaggatatgacctaaacatccccccttccccaagtaatccgggagcaccactcccctctgaggaccccacaggtactttcacagtccaacacactgagaaacaagcccacagggtgccaggatgacatgaccacagagaaaagggacagaaggagtttgggacacatgcacggacacctgttgcttttgcagacttgaacttagaaaatatgagcctcattagaatttctctttctaaaataaacgaccacttttaatatcgtcaaatatcatgtactgctatagttctctgtcctccgcactgagaatccaaaacaggtccttgggataacttttgggaaacaataccgccacgaaaacaaaagtcttctcagccaagaacacagattttttttatctacctttgatgtcccaaaggactagagaatccagagcatttaaataagactccaatgccaggagctcactgttccctgctggatgccagccctcccctccctgcccagaagaggacatggtactcaccagtcattagggtataataattgggatacgagagactagggaagtctggagtcaagtaatccacttttactcccctgctcacaatctctttgaaaccaggcaatgactccagcgcctcatcactgatgtagtctgagcgaaaaccatccagcagaaacaccagcagcttccggcgggcagaggctggctgggccaggcccagggcaagggccagcaggagggtcccaagcttcactgccatgctgccaggagcctgccagagcccggctggcacagctgtcgccttgcaaagactgaggatggagaatctgtagctattctctcttccaggggctggaccttgagccgctggccttcctgagtcaagttcacttgcagaatttaaaggaacagcacccccttttccacacatctatgctcaccctttactagaaagtccagagaccgactccttcagataaactgggttccaaacaacccagaattaacaccaggggagagagttcaaacttattatttttggtgaacgttccagaaatacaagcacccacagaggtggaattttagaagatgacaaagtcaacactaactttgcagttgagctaaccaaagggaggaaccaaggaaaagggcaagattttaatttgctgttatcccacatcatggcctcatttaaactctttttcacttagaatttagtaacgcaaacctctggactcagtgcataaacaggaaacaatacgtttcggtgggcccatttgtaaacttcccagctgtgtctctgtagacacagcacttaaaaaagttatttgtctatgtcttggccacttatgtttttatatgcagtgttattatttgttattattttatttttcaaatgtgatttagctgctggtgcccataggaggaggtggttcgtagaagagccctagagccaatgagaagcttccagagttggacaatgggaaatcattactggcagaatggtctgaagcagcattgccccaggaggatggaaatgaaatagagagctggagattgagagcttgagatggaaaagcagagctagaaattaccatgcaggctttgggaccgagaagactaggcggagtggaaaataggaggaggttagtgacagggaggcagatgtgagctggggagcagacagagttagcacaaagtacccagagtccaggggttccctagagtggctccgtcatgctacataaaattaaacaacacaattcatgtgaaggcttataaaacatggctgagtgcagtggcccactttgggaggccaaggtggaaggattgcttgaggccaggagcttgagaccagcctgggcaacacagcaagaccccatctctataaaaaattaaaaaattagctgggcctggcggcacgtgcctggtcccagctacacaggaggctgaggtgggaggattgtgtgagcacaggtggtcatatctgcagtaagctgtgattgtatcactgcactccaggctgggcaacagagtgaggccctgcctcaaaaaaaaaaagacataaaacatgcatggtccatagcaagtgttgaacaaatgttagatgttattcgcattataacattgcttgtctcctgaggaaacttgcaggctctgggcaaactttccagggaaggaagatagacaccagccacaccagccactctcagtcaaccccaaaatccctcttccacctctgccctctgcttgtgtcttttctccttctctttttctgttgtatttgagtcaagcccaaacacaggatcaccatgtcactttttaaattatgctgcaaaagagaaacacattggccaaattaccactcccctctcaggggacttggccaaggatcagaattcttttttccaataagaggtaatgctttttataattaaatttaaatttttttcttattaaaaaataaggaaaaggggagtttatcctaaaaggttgttactttgaaaacaatgttattcttttttctttgagctgtgtggtattgttgctataaacagagaaaaagaaaagagagaagaaagaggaaaggaaggaagaaagaaagaaaaaggaaagaaagaaaagtaaacgaaggaagggagaaagagaaagaaagggaagggaagaaaagggaagaaggaaagagaacagaagggaagagaagaaaggaagaaaagggaggaagggaaggaaaggggaggggaaggaaggggaggaaagggaagggagggaaaggaagggaagggaaagggaaaggggaagggaaggaggaaaaaaagaatagaagggaagaagggaaaggaagagaaaaagggaagaaaagcgaagaagggaagggaagggaaggggaggggaagggaagg

SEQ ID NO: 316860 - DNA, 4001 bp, Homo sapiens
tttttttttgagacggactctcactctgtcaccccggctggagtgcaatggccccatctcagctcactgcagcctccacctcctgggttcaagcaattctccttcatcagcctcctgagtagctgggattacaggcatgcgccaccacgtccagctaatttttgtatttttagtagagacagggtttcaccatgttgcccaggctggtctcaaactcctgacctcaggtgatctgcccgccttggcctcctaaagtgctgggattacaggcacgagccactgtgccaggccagtataatatagtactgaatataataattataataaggtgtttcctctttgtttgaaggcttagaagacaaatagttggctaaaagttattctataacccacattgatttcgttttgcaaatcaacagatattcaaaaaatcaaatgggtaaaatatttcgagacaatcatttaaaattttaaattattggtgacatgaagaacactgagatatgacaatcttcctttatttgcctgactctgagtgcaagacattgtttcctctgtcctaaatcaaattgccagccttcacatagcaatcaggatgcgatttgcagaagaatcataaccactcagtcacaggtcttggtaagcaacaagctttccaagtttcacctctaagagtttaaacagattagagaaagaacgctgatgctcaagagcatccagaagccactgtgataataattaagtgcaaaagaaaatatatcattaccatcaacaacaaaaattgggtacaagtggttaggaaatacagcatatgctaaaataacaacaaaaactccaaagcaaacaagaaaaaaaggtcattccaaagatgagggaaagtgctgttcatcttgtagccataatgtctttggcatcaaagcttataatcacagatcaaaatataatgctgctcatcaagaatgccaaaatggggacaaactgtctctgtacacacaggggttattgggaaccaagcagaaatgaagcagaaaatgtggcctgtttcacattcaagacagtaactgaagacagcttttgtctcatttgcttaacttcctccttttaaaaaggcaattatttcctggcacatttatctgtcacttcaatttaacagcatcctgctaaaagagctgattatctaataataaaatatatattaaaaatggccaatattgcttttatcacaatccaaatttctctcccaagttttagaaaagtcttgtgaaatatgaaaatgggaagaaaataccttctgttttgttaactgtccagttaccttgctgggctgtgattggaggtgttacagtcacggctgcctcttcggtcagtgctgtcattgctgtattaagggggcaaaagcatctttaacagagagcctccttctatgtacaagcaacagatggaaagtattcttattctgtttattccaatttctatttttttaatttattacagttgaaatccataacgtgactagggcaacatacttacagtttctcatccattccattgactatattaggattaaagcaaataaaaacccaatatttaagaccattgatacatttacatattaattaaaaaataagaaccctatagtatagtagctaaatgtatcaattactcttcaattgtataaagcaaacattctggaggtctcaaaaaaggtgtcaaaatatattaggaaaggaacatacaggacataagaaactaaattaatccacagattcattactctgatctttgtcataaagaacaactgttagaagccaacttctctctaatgcagagaaaataaattctattcacattttacactgatataaagttaacaaaacaaaaggaaattacctaccgttgaataaaagatagactgatattggaactcccaaagccatttcctgtagttgcttaactttctttctcttatccttctagactgacgggtggaaggtttttattgagctctctgagtctttgttgcatttatatttcatgaagcgtcatctggcagttcttaccaatcaaaaaaatatgtacttctggcagcagcagaaagcctctgggcgctcacgcacttggttaggatacctgtattatctagcaatgtgatcaagttttcttttgaaacactggtttcctgttacctgtgggcataatcatgtatgtaaaagtacttaaaacaacaagaacaaaatgtaatttcaggaaaggctcccattggtgtgaagagaactataccagctcaaactatgctagaaacctatacgggagttcaacaaacataactgcaaattaggaagcagcataacctgtttctaaaagaaatatacctgaaactatagttggttataccaccttttattacagactataagttccatttcaaatcaagataatttgttaatttagttgcagagaacagttaaatttgtgaaaacacagaggtttcatattccattttagtgtttgtttcttagtgttactatgacaagtgctgtaaataaaattatttttaatagtataatattcacctttctgtcatcctgctatttaacatttttctgagtaaatgaaatgggctgccatattccaggaacaacaatgcttaaatctgcatcccaatgattaagctacagagaaccagtaaagtaccaacataatgataatagcaataataataatattaaaattctccattaagagaaaattaagatgacatttagtttggatacatccaatgaatagaaagtttctaagttaatacaacattcaaattatttctcaagttcatctagttgtaattattaaagtggcactttaaaggccaaaatatgtcattacagctactatattttacaactacagaaattttcacttgccccaaattaatataaatgatttataaatatatcttcctgaggcattgagtctttctgtctggaatttcaattccttgtattttcttgaaacttgaaacctcaaaaccctaaaaacatattcaagtcaagataggttatcttttgcatcatgtccactcagcaaattagatttaccagaaaggagccctttcactattcaaatataaatgtggtgttagaaatcacacaagaacaagcttgttgaactcattataacttgggcaatcacttgccacaggagtcatcattttaaagttaaaataatataatagtacttggctcgctttaaatgtgtctacattttgcatttctacttttgtaggtttttaaaaaactgttgattactaagtcgatttctagataatatatttcccaggcaaataacatttgaattataaattgaacaatcgtctttgcaccattgctgagaatttaaaaagaaatcatttacaaaagattaaataaaccatcacaattctttttgtagtttctggagggagatgttaggactcatattaaatactttctttttttttttttttgagatgttttctcactctgtcactcaggctggagtgcagtggtgcgatctcagctcactgcaagctcctcctcctgagttcatgccattctcctgcctcagcctcccgagtagctgggactgcaggtgcctgccactaggcgctgctaagtttttgtatttttagtagagacggggtttcactgtgttagccaggatggtctcgatctcctgacctcatgatccacccaccttggcctcccaaagtgctgggattaaatagtttatttctaagactgagacatcaaagtacaaagattatctttgtaaaaactcttaactgtagctagtgcagtcctttgcactttacaggtttccctacacatctcaattctttcttcagtaaccctggcccaaacaaatccagtgcctaacatctagtaaatactcaatgaatctgtcttcagagaataaggaaataaataggcattatttctattctcacatgacaaatgacaaat

SEQ ID NO: 316861 - DNA, 4001 bp, Homo sapiens
tccgcgagtaatgcgcccttgggctgagacccgagctcagtccgggtgtgggagaggagcaagcgctgctggaggggacccaaaggcagaggtctcaggtccaagaggcaggcggacagaggggctgagcactgttccgggagcacgaagagcgacacaggtgttgctcccgcgccagctctactctcccagaaaaaggcagggacagtattctgggtctggagcacaggattgggggtagggagggggactgggtactcctggatcaggtgctggccagagcaggtcttttccgtctttaagacatgcccaggtgggttttagcggcaacttcctagcagcgacactccccctcacccctcctgccgcggcatcccaccttctcgccttcttccaccttggcttgagtgtgacaatgaactcccccaagaagaagggcacccaactgtgtggggcgccttctgtccttcgctatacccctcccacgagaaataaaagctcctgccacccaccccagaatagcagctggtgatgccctaaataacagctcccagcaggcactttccccaaaaataaaagcatccagccacccccacaacgtttcccatcactggcctcaaataacggtttctaaaagccccactgctccagagatccttgtcactgagcttccaacagttcccactccttcaagcccgaaatgtcacttccccacgcgccttaagtgaggcccagccgcacccatccccctggaacgggcctccattccccaaaggaggcctcgacctcctttcccccaaggttttccaccttcccagccccccaaccagcctctgtccacacgcatgttccttgcccagcactccgcagctaacgtcaaacaatgcaaccaaaaaccgcagaggggagcgaaaaggccagtggaaggggacgacaaataccaatttgagatgagactgcgatttagtctgcagcagcagcgtccagcgcgctgagacctgaactcccaggccccgcctagcccctccgccccaggtcgccacggtccccacccccatctccctaccttcgttgctggggctggccaggagggtccggagtgcggcgcacaggagaaggcacgtccagaggggagcccgtcgaggtgcagagtagcagccggccagggacgctggggtgatgggggtgtcgccgccgccgcttgggggccgccggcgtcccgcaccccggggccccgagccccgcatcttctccgagcctcctccggtgccgctgtcccgagcggctcagtccaccgcttcggcctcgcagagcggcgaagggagactcgggagtcctccttgtccccccttggggtcctacgccttctggcacgcggctcctccaaatgtaggaaccacggatccggctgagacagctgaagtttgcttctggctcctctcgcctccccctttggtggggttaaatgaaatattagttctggttgctagtgcagatctggactcggatcaagggtgtcgagagggtcctgggtcctgttcctttgcctttcaaaaagactttttacggattgagaatttttaaataccactaggggaaaggtgaaggttctttgcagccttcagtgttgaaatggacgaaggtaaggaaggcaaatcattttaagacgaaatctccgattttttaaaaaaggaggaaaaaagcagggtggctaaggataaagaaagaggacttgagaaaatgtggagaatgaaaaacaggagagcagcgagcaaaagcaaagatccagagttcaaagagactggcagaaggaaatagctgcgggctgagtgctgaagaggggagggactgacggctgccggccggtaggagcgcggagctgcgctgcggcggcccaggagctgctgcggttcccgctgctcggggagcaggcggtgtgtgcgcggctgcgaagtcgaggttgaaactgcaccgccaaggcgcgctcctgctgtgtctggagctccggcgtctcctctgcctcccagctcagcgcctcccaccctccttccctcctcctcttcccagctcccccgccctctgctgctcgcagcctcgccagtgagaatctactgtaagtgtgagttgcttcgacgaagtcacacacccacggagggaagtaatctggaggctgccttggtgagtgttgcctagcggtctccgggaaaggcgcgtcttcctcccgggataattagggcaaggaatcctgacgacgctggcgaggactggggttcccgggaggcggaagggagatcagccccagctcagccggcggcccttagagacgcgggtccctccgtttggcatcttgcctgctgtccctcacaggctgtggcatcaacaaccttgtcgtcacatcgccgcgcattcgcaggctctgctggtccgtggctagtttcttaaacacccataccgcttaccgctgctgactctttctgttcttcccatactttgatggctggaataggataattactcaatgttttcttcagaagtaaattgtagagtaaataaagaggcggtagctctgtttgagatttcaaggagtcaaagaatttgactattgagatttgtagtgtgccaggtactttcataggtggcgatttaattcatttatttcattgataaaatgttttagtattttagaaattggacgatatgcagatacacgacatacattccagtgaaattagcctcggtcaaataaattcagggttttgaaaaattaattattttaattgattgtgccctatagcattgggagatttacaaacagtgaaaaaaaaaacagttaaaacaatcaactttctatgcttcacctctattatgtcttttcttgctttagtatattccctcgatttattcattctttcaaagagatacatttgaaggacaattttagtacacaggcatttaaaaacaaaaggctgcagagaaagcacttacagaaaggtctgattatagaagaaagatatctcatttaatttcatgtatagtaaccactgtaaagcttgggcttccgttcacacctaataaaggtgagtcagctcaccagttttgacatatctagagccttgtttgtctccacaataaattcctcactatctttagctggtgacatttgttttttgtttaaatatttgcaataaagatgaaagaataaagcagcagtgatgcaattttgtaaagaggtgaaagctcatctttgatttctttttttcctgaaatgttttggcaccagaagtctgaaagcaggttctttttattataatgtgctccgaatggatgaagcaaatttagaggaagagcagtgaatcagtttctcagtttggcaaaaagcctcacgggtgagatggaaagttaaaatttatgtttctatttgaggaccattcaaaatgtaagctcccctctcccctacaattataattgagttacttaaaaatatttaagcagaataccaactacgatatctaaagcccagaaatatgtagtaaaactaatatgagtttaatggggctttgagctcgttcctttacttctacaggcttcagtatcctcatcagtaaaatgaggaatttggagaagacaatcttcaagccttcttcccttccgttggttgcatgtctatgtgactaccctgttcatctatctccaattatttactattggccacaaaataaccaaatttttcagcctagaatttaaagccttctactacaaatggtttaaatatattttttattctatactacaatgttaaactcatttttcccctaaattacctcatgcctctctgatttttctacctgtcattccattctaaagaaatcccacctctggaaatatttatccgccccccacctcaccccaccacaacacacacacacacacacacacacacacacacacacactactgtcatctaaatcatacccagtgtcctaggagagccaggcactcaa

SEQ ID NO: 316862 - DNA, 4001 bp, Homo sapiens
tcataactacataaagcagttataacatgtatgctaaaatttaaaataaatgtctcgctcttttttgctgggggaaggacaagatttgggaaaagtatttttaggaaatattttgtttgggggaaagaaggcaatttcagaaataacaggtggtcttgccaaaataaggctatgggctctgcataactgaatagagtttagagatataatacagaacttgaaacaggaactttcctagtggcagagaaatatccaaacaaactgggaaaacagaaactgacctaactcatttggaaatgggcttggcagctgacgaaatagatgaactataattaagtaatgcaatgaaggaggtaagcactttcatgacaacaaacacacacacaacacacacactagtgggtagtaaccaggttattcacaggctctggctgtctcaaattagaatattcaatgaaacacccagaacagacatgtgcattgttcagatgcaaccttacatgtggggaaaataataagtgctaagttattctgacctcgaggttaatttctaactctaggaagactgtcacctttctaatttaattcttttcaaaacaaagacagcaaagccacattgtttactgagaatcttctagcaagtctttcttagctcagttttggcagaaaccacatatctagtttccacttgtgttcctggacttagacttgtaagtttcaattatgcatagtatgcatttcattaggtctctcaacccctgagataaggtgtgccaaaataataatttaacagtcacatccttcacaggtagagttagagtgtctggggaatcagcctcattccaactccagggagaatatgagactggtggtaacttttatttttttattaagatattcatatacgacttcaaactctttcaaattccttaaactgaagtttaaggaattggaaagaagtaatttttttttaacagaaaggctatttagaaaatttttccccttgaactaaatcatctcaaataggaagactggcatttaaataccctcagcgatcacaggctatggagtgcaattagcagcaagtgcagaacgcttgctccagaggctgcttgggaggctgcagggaaaaacgcaagcagcaggtgtaggggcgaagggcggtggggagcgccaggacctgcccagggcccttctgctccagataccctcgaccagtgttttatttctcttgtgtctggagctcagccaactggcactggcgcataccagctcctccgggaaagctaaaccaggctaggttttagaaaactgagcgcaagacagaggagaaaagctttttcccccctccaaaaaatttcttacgctagtttctattccccactctccaacaaaaaggaacaagacatgaaatgttaacagtgcgttccaggcctttagatttctaggactggcaacttttcaaaaaaaaaaaaaaagctttttcaacaactttttattttgtttaataaggagatatttcaatccatgcataacatatatgccaataattaattcaccaataaaaagcattttaacatcgatccccagtcccccccaccccagtcccaccataggggaagacagactcacaaaacaagacgtaattttaaatagagcacacttgaacctggagacaactccgtacttgtcgaatgacaaatgcacaggagccttccttatttgtctcctctttggggcggccggaagccagagggggagaacttacccaggcagagcagcagcgcagggaccctgccggcacagagcatctccatcctcctccccgcggtcatcggcgatgggagcgggcgctggggcttggcggagggcggctgcggagagtgcacgggcagggcgggagcagacgggctcgcggcagtggctggagagcggctgtcagcctagaagggaccccacgttggctgtgtccctctgacactggaaatatcaggcaagtgagctcaactgtctggtgctgcgaactttatactagggagcccctcccgggccctaacggggtgaggtcaagagtgcccagagtttcataattggcccgagggaggagcggcaggaggaccgtcaggaagtcatcctccctccctggagcacctgagagtagtggttgaggaatgaaaaaatgtctttccgattggccggggactactcccgaaacttttccatctccctccgggaggtggggagcgtggaccagatggcttggtttgctttgtggggtcacctgccctgtagtgggtggttttggttgctcagggtgacggacataacttgaatcagtcttttagccaaggctggcgttccccatacatgcctttggagagctgtgcgtgtgacttactaacctcagccacgaaaactcccttaacttgaagtctgtcagtgattcaagcgccctccttgcattgaaacgccaccgcccagaaaagcctttcccatctgcgccttccttctgagacccctgcttccaatgtggctcaggcatttattacctcaaagtcgagtcattgtgaagaaaattcctgttattttttttccttctgtcgtatttgccatttgtcaggttgctgcttttgatatgacttcctactaagtagtgccttaatcctgtcgctcccctgcacaaaacctttcaacgacttcctattgctttttggacaaggcctgccacaaacgtgaagccaatcggtcttttcaacctcagctcccactatttccccaggcaaattgtctgaccccagccaggctggaaaactctaagcctttcctcactcccactttcctgcctatgctgatggagtcgtactttgaggcaatggctactttttaaaggaattagtgaaatcctgctcaaattcatggttctcctcaagggcctgggcttcttaggcttgtggatctcttttcattctgatctcttatagcttttgtcgtttatcttctccctagcctcatagaattctagacccggtactttacacctgggaaagctactttgtattccttgactttttttttgtttgtaagtcctatgttcagctctgtactgtgtaaattgtcttccttttcactgcactcctctataggacctaagaactgtgagtcaattcagcagtactgtatgtaaatatacatatttgaatagaaaatggaatctaatggatgttaactccttacctttttatttctactttttaaaaaattattattactattccttttttttttctggcttttttctctcatactctaaggccctttaatgtccagaatgctcttgttagaaacaaatacttcggccgggcgcggtggctcacgcctgtaatcccagcactttgggaggccgagacgagcggatcacgaggtcaggagatcgagaccatcctggataacacagtgaaaccccgtctctactaaaaatacaaaaattagccgggcatggtggcgcgcgcctgtagtcccagctacacgggaggctgaggcaggagaatggcgtgaacccgggaggcggagcttgcagtgagtcgagatcgcgccactgcactccagcctgggcgacagagcgaaactccgtctcaaaaaaaaaaaaaaaagaaacaaatacttcatcatgttatcaggggttaagatttaaactgtctgtgtgtgaattcctggacaagttatttaatctgtctcaatttcctcatacgtaaaacagggataataatagtatccagcgcataggaaaataatgaaagtgcttagtagagtgcctagtaccgagttagtgctcactaaaaatacctaccattatatgcaaacgttgatgcttaagatggtggtacttggtagttggtcaatatttgtaagttaaatgaatcaatgaacagtaggatagaggtaggctgggttcctaagtctagcttccaaatctatcaagaaagcaggcattgagtgacttc

SEQ ID NO: 316863 - DNA, 4001 bp, Homo sapiens
aaaaaatacaaaaattagccagcgtggtggcttgtgcatgtcttcccagctactcgggggatcacttgaacccaggaggtggaggttgcagtgagccgagatggcagcctgggcaacagagcgaggctctgtcttaaacaaacaaacaaaaacagacttactctatcctgtgacaactcttataaacaaaattctcagaaagataataaccagctatgacatagtgagcttgtacactggtgaaagagaaaacgtacactacttacactgactaggtataccctgggactctgccatgtccttggcagtttggaaaccccatagatgatgatgatgatgatttgagacggaattcttcttattattattattaattgagatggaatctcactctgttgctcgggctggagtgcagtggtgcgatctccgctcaccacaacctctacatcccaggttcaagcaattctcctgcctcagcctcccggctagctggaattacaggcatgcaccaccacgcctggctaatttttgaatttttagtagagatggggtttcaccatgttggccaggtaggtctcgaactcctgacctcaggcaatccgcccacctcggcctcccaaagtgatgggatcaccggagtgagccactgcgccctacccccccatagattctcgacctcagcatatactcccatcaccaatgggcatataattgttatcctattacagtctatttattttcctacataaattattattgttcattgcgcaacacttaggaaactgatagagtatctttatggaattgtagggctgagaaagctgctaaatgggcaggcaaaaatggactccctgtctctcctccacccagcttgcgaccctcctcttatctctgactcacgttcattgtcgggcaaatgccccacaacctaaaacagacatggctaccaaagggggccaagcagttatgcgatggattagacatgggaccaaatggacttctttggccactgtgctcacaaaggggagacataggagaagctcaggaaaaaataaagcgttatactcacaagtcctaaagacaggaaccatgccaaccatacagggccacatgggaaagacaccaggatggtcaacaggcagaagatcatcgtgagggaaaggttcagagcacagcctctattgccttcctgttaagcgagcaggattcagacaccaggaaccctccggtcccactggccacgtgctcagggctgggtaatttcctcccgctcaagggtaggaacatacctgcgcttaaaactgaggctgccgcacctccgcagacgtagacaacgaattcctggagcccaaggtcggccggggttgggttcctgtcgccgcacgcgtggcccgcccgaaacccgctacaaagtagcggcgtgtctgccctagggaggcaaagcgcaaacttgttaccgcgccgggacctgccccgggattctcccagcggctccgcaggacgcagcgcctgtgcctcgcgcggccctgggacgggcacggccgtccgccccctgggccgccgagggctgctttacccctccgttctggccgcgggcagcagaggagctcggggcgggcaaagctcgaggggacacggggcgagcccagaccctgcctgggagccctccccgccggagaccaaagggcagaaacgcactcacagtgcaactccgagggataaactggccgacgatcgccgccaggccagaagaccaagaagaaggctcgcggcgggaactgaagtgagcggggacacacgagggctgggaagatcctgggttggggcggagcggggctgggaagatcctgggttggggcggggcggggcaccgcagagcggacagccggattcaggcaccaggaacccaccggtcccactggccaggtgctccgagctgggtgattttctcccgctcaagactaggaacatacctgcgctttcggcgcagggaagactctgggcgagggcggggctgggaggagggccgcggggcaggcagccaatcccaggaaacttcgggacgagggcaggacgggggctggacgggcccagccattggccacctgtgtccactgcctgcctaggtctggcttcctaggtctggcgggtgagacacaaggcgagcctgcacgaagcatccttcgaacctcaggtaccctgggcaggagaatcggcttcttcaggcatcctgctgggccttggccctcgtcgatctggttctctcagcccctcggtttctcccctggggagacttcgcgattaccctctcctccccttggcgcctaggctctcagtcacgcgaccgcctagagccctgagctgctatttatgccgcgtttttattcacttaggtattcagcacgccttcatcaggtgtgtactctgtgccaggcaatcttctaatccttaaatggacgaaacaaaggcctcccttggactgacatttttaatgaagaataaaaacccataatgaaatataaaaatattaacgttataagagctaagggaaaaaacatgtgttacaacttgaaaatacaaaaataggaaatcatctttctctgtggacgaatgaaacccctgattctaagaaacaaagaaacaaaactcatcatgactggtgttctgtactctttggaaaatacgttttactgtagaaatgactaaatgcgatgaaagactctttaccagaagcagtggctggttggcggcgcctgtacgcctgaggagcaccctttttgtgtccatgtttgataaagcagaagagacctaaagagacaaggggcggccgggcgcggtggctcactcctgtaatcccagcactttgggaggccgaggcgggcagatcatctgagatcgggagttcgagaccagcctgaccaacatggagaaaccccgtctatactaaaaatacacaattaaccggttatagtggcgcatgcctgtaatgccagctacttgggaggctgaagcaggaaaatcgcttgaggcagaggttgcggtgaaccgagactgcgctattgcactccagcgggcaacaagagccaaactctgtctcaaaaacaaacaaacaaacaaacaaacaaaaaaaaaaccacaagggccatcgctctggggcgtgggacatatggtccgcagttgggatactaactgttgtatggatgggggagtggtcctcaaaccctggagcttctcagtccctgcctctttcaacctctaaatgggcccactgcttttcccttcccactgttctgccggctggagcacccccagcaccagcagcgcggctcccacgcctctggtctgggctctgccagccccacgggtctaagctctccccaggccattattttttgtctcctctttcttcattgaggtcctctctctgtcacttgctcttttgcctggctcaagacatgggtttaaacactgtttatactaccccttgctaatgttgactcactaccccatatctttttcttttttctttttttttccaagtagcactctttgagatgtccttttattgatgtttctttacacgttgtttttacatgcattacagtgtgatgaacatatccatccactgaaataacattattctcaactacgcaaaagaaagcaatactcttagaagaatcctttctgcatatgtctttagacacttttacattcataacactggtcaccaacccatttctatgtttaagtaacttgactttttctccttctccctttctctacctattaaattcacattttattttaccccaagctacttttacctagtacagtgtctatgtttttcactgtaagattgagtaaggccagagatgaggagaatagtgattgtgaaataaaatgaaagatatactcaattcttgggagcaatagccttgttgttgggttatgtttattcatttataaaactaatgagaacctaccatagtcaagcactgtag

SEQ ID NO: 316864 - DNA, 4001 bp, Homo sapiens
tgactgacatatgacaaactatttctactgcttgtatagctactgattttcttgagaatatttggaactgtgtagtctgaatttctccaaaggattggaaaaaaaagtcacaacctttaccccttttctgaaaacacatctgatatctcactttagagattggaatattcagtctccgtggttgagaagagaagtcacaaagtccactgaactcatagcatcaccatatcaaagtcacactgatggcacattggtgtctacctctttcatgccagcaggctacgaaaatggcaatgaattgccatccaaagaaaacagaaatggtagtggaatttggttagcactgggcccaaggctgattgcatctaaattaggctctaaggcagatagcatctgactactttaacgttccaaacaccatcttatccatacattaagtgcagcaaaaaatgcatgggtgacatgaaatttaaacaaagttctaatttcttaatatatggaagccaaatttaacaaaattctactttcatgaaatttcataagaatatccttgaatttggaatatttagacttaatgattctatcaccaaaacttaagtaaactaaagatttaaaaaaattaagccagttatgacagaatatgagatcctttagggaacttttctgtttgaattaacgacaacaacaaaaatttaagtaaaactttaaaaagaccatccaacttcatctgtcacgatggttcacagaatacccataacacgataaagcccttagagttaatttaatttaatttttttttgagacggagtctggctctttcacctaggctggagtgcagtggtgcgatctcagctcactgcaacctccacctccgggttcaagtgattctcctacctaagcctcctgagtagctgggattacaggagtgggccacaacgcccagctaatttttgtatttttagtagagatggggtttcacaatgttggccaggctggtcttgaactcctgacctcaggtgatccatccgcctcagcctcccagagtgctgggattacaggcttgagccaccacgcccagcccttaattttagacaacgcagaaaaactggctccagatacacttgggtgacttggtcaacatatgaatgttaaccatgatgtgacagatcagacttcaatttctttagactgaactagaatggctccgaagacgaaagtcaggtcaggaccagggagaaaaactgggcaaatacgatttttttttttccatttccaacagaggtttgaagattagaaccaggatttgggaagcctcagttcaggagtccaccgaggtgtgtgtgtgttgacaggtggtggtgatgccgagggcgtgttgacaagttttccccgcccttgacctttagcctagatattaattctaccaactggggcaaccccagagggaggaagccagggtcccccaacaggctgacagcgcgtgacctttgccctagatagcctgagaaagctgatgagagaaggggcgagaggtgcctacagcccccaggaccggccttgtcccttttgccctaactcctccacttatccccaccgcccgtttcctctcacccaggcaggacagcttggctagcggcaccagcatgttcaaagtcaccaggactctcggtcggacacaacaggaggactgtccgctgctcgcggcgggcgctggacctctaggccgcggggggcgccatcacctgccggaaagcaagaactctgctgcagttcgcctccccgctctgccgaccgctcttgcttcacggcgttcccacctccttctcgctctgcgccggcgccatggatgacgcaacggccagccgaggcttccgggtcatgtaccaaaccagggaaagataagggactccaagtcccagccggggagcggtgaaacagccacagcgcggccagaggggtccgcgaatcccacagcacgacgcacgcgcagtgaaaggcagtagaaggcggggcgacgcacacggcttcctgggaggtgtagttttctctacgagtgcccttcgagatcgattggaggctcgcgcaggagccgtgagttgcctaaggtgaattgactcatatgattggctgtcccgaaaaatgaaacgtctttgtggtccggggctgagacccacgaggagactgggcgggatttctggcgttaggaggcggggcctttcggctttgggcgcgagtggttaaaagacagttggtgtcggttcggcttctcgggtcggattccgcggtcccaacccttccccatggccgaccctgaggagttgcaggtttcttcgccgcccccgccgcctccctcttctccctcctcttcagacgcctctgcagcatcttccccgggcggcccagtgagtttgggctggccagttccgagcaggagcagcggcccaacggtggaccagctggaggaagtggagctgcagatcggagacgtgagtgtggtgtcgggaccgcgtcccccctcggcgcctctgggaagaccggcggcggcggggctcgcgaggctagggaatcggtcccccaacccccatgacccgggacgaccggcccttctgcgccccagagcgtgcgggcgggaagcgggggggatgccagcagctaaagtgccacccctctctgagggttccccctttagatttagtggtgaggagtcttaaggggttttccttccacccgccccacccctcactggtttctttttgtctcgccttctggtttcaatcatccgcagtaacccgaagccacgcagctctgcgctgcctgttgctggctctctgcctcctcctttcccatcggagaatagttttcattgcatgggtttcggagaatagttttcactgcatgagtttgctggctttctgtgggtacttgagatcaggctgtgatttctttccatgggacttagagcctgctgttctagttggccacctgcccagggacagctgataatgccattgtctgccccaggcctgcttagcgctggacccagcttgaagggtttaggtcacgtggattggcttctttgacggtttagttcaggactcctccctttgtatgattgctagaatgcatacttaggatagtttctgttaaatctcgaatccccagaaactagcaccccacctcccaaccgtaactcacacaccactggaggggagaagacagggaaggggagttttatgttctcttgagtgggtcaagtggaatgaggtatgtagagtgtaacctgggagagttctgtggcctgacctttcctgcagattggaaactaggggatgaactagattatctcattgctccgcaagtatttttttttaaggatgactagagtgcttaaccagcttttatttttgcagaacaaactgattgcaagtaaatatgtagaatgaagtgctaatgtgttattgaggaacactgttttattttatatcattggtgaagaaaacgtttggctgaaaagtgaattttccaccaggagctgagtgttttctgcatttgtgtgtgattttttaatgttatttgtcagagctcagagtttctgttctttgatctatacattttcattgtttaaagtgttcacaggtcaatgcccatgttacccaaatagcagtaagaattatttatgatgaaatctctcagatatatctggcgcttagtgtcaaggggtccaagtcatcttgttgagctgagactctagtgtattttcatagaaaacagcaatcctgggccaagcacggtggctcacgcctgtaatcccagcactttgggaggctgaggcaggcggatcacctgaggtcaggagttcgagaccagcgtgaccaacatggagaaaccctgtttctactaaaaatacaaaattagctgtgcgtggtggcgcatgactgtaatcccagctactaaggaggctgaggcaggagaatcacttgaacccgggaggcggaggttgc

SEQ ID NO: 316865 - DNA, 4001 bp, Homo sapiens
ttaaaaatctaaataaacctcttgccagttttgcatcccaggaatatatttcttgggagtcttggaaacacctttgaaacgtgaccctcatgtctttttgtctctgtggagaggttagccaagttgcttggctcttaagttgaaacttcctggttggtgaaaggtaagagaagttttattttcctcttggataaagagaattaacatgttgttacactgtacctgctggctatacatattaaaaggcaccaaagtctgtgtggtggctcacaggcctgtagtcccagcaatttgggaggccgaagctagtggttttgagcccacatggcaaaaatcctgtctgtactaaaaaaatacaaaaattagctgggtgtggtggtgcacgcctgtaatcccagctactaagggggctgaggtgggaggattacttgagccccggaggttgaggctgcagagagccatgattgtgccactgtactccagcctgggtgacagagtgagaccctgtctcaaaaaaaaggtgccaaagcaataaagggctttaacatgaaaaacattttctattagaattgatattatgtcagtgttaattcaataatatccatttctgatataatatcaaaaggataaattcaactgggcctaattaaagtatttctagtttaagggagcttgatatttcagaaaggagagacagacgaaatttttggaattcaatttattccatatggaaaaaatacagatatttatataatttttgatctttgcaagtatattcacaaccactgaataatctaatctaggaggtaggacaggtataatataacccatcttagagaagaaaaaattgacaatctaagattttaaccaaattcatacaaattttatttaagacaataaaacttggacttggtcctctgtatatcacacctgtggtttttctgcttaggttatgggaagccatattaatatgtttcttcagaaaattaggttatcctctttggctttagatattgcattgtcccaggaattattactttattaagaacaatcatacaaagacttaaagaacaagtttaaaaataccctcaaaatacaaaatgcctcccaagaaatattcaaaggtcttctcaagttatcttctcatatacccattacataaatacatgtagaaagcattacacaaaaatatttgttaatatcataaattacaattctgatataaatttttttttaatttaaaaagtatataattattcccttagagttacatgggctgggcgtggtggctcatgcctgtaatcccagtgctttgggaggccaaggtgggtggatcgcctgaggtcaggagttcgagaccagtctggccaatacagtgaaaccctgtctctactaaaaatacaaaaaattagctgggagtgttggcaggtgcttgtaaacccagctactagggagactgaggcaggagaatcacttgaacctgggaggtggaggttgcagtgagccaagatcgcgccattgcactccagcctgggcaacaagagtgaaactccatctcaaaaaaagaaaaaaaaaaaagatagagttacatgaaaagggtttcctatattccagtaatttgggaacaattactgaaatacaattacaaaagattagactttgtataaaaaacaatttttcatacccccttctctttccagtctgggaagagttctttaaaagcacctggatcaaggcaagcccctgagagagtatgagctcctatctgggcagctttctccactagacacacacggatgtccttttcatgtgccacagccaactgttttagacgaacagctgcagagagccctgcagggcctgcaccaactattacaacatctgcttcttctgcaaacctttccatgttcactcctgggagaaataaaaattctgggattaatataacccaataatcacatgataaatcacatgacagttaaaaaatatccactgtgctttagagtattatttatggaaattctccctgtgttttgcacaataattatattaagcatattactgtattagtatgattatattcttaggttctgttccagtacatactttatttcagtttccataaactaattcttggctttgagatttattattatacatttagcaaatatttacttgtgtaaaatacagtcacaagtcacttaatgacagaaatgctttctgagaaatgcatcgttaggcaattttgcccttttgcaaacatcatagagtatacttacacaaactaattgaacagcctatgatacacctaggcaacagggtataggctattgctcctaggctacaaagctatatagcatgtgactgactatactgaacactgtaggcaactataatagtatgtatgtaactaaacacatctaaacacagaaaaagtacagcaaaaatacagtataaaatatttaaaaatggtatatctgtacagggtacttaccatgaatagaacttacaggactggaagctgttcttggtgagtgactgagtgagcagtgagaatgtgaaggacaaggacattacactactatagacttcataaacactgtatgcttaggttacacgcaatttataaaaaaattttttcgtcagtaaattaaacttagcttacagtaatgtttttattttataagcttttaaatgttttaaactttttgactctcttgtaataacacttagctaaaacacaaacacattgtacagctgtacaaaaaatggtttttatatcatttttctataagtttctttctttttaaaattttttttccttttaccttttaaactcttttattaaaaattaagacacaaacacacacattagttaggcctacacagggtcaggatcatcaatatctttcacctccacattttctcccactggaaggtcatcaaagacaataacacgcatggagctgtcatctcctatgcaaatggtagcttcttccagaatacctcctgaaggacctgcctgtgtctgttttacagttaactttttaaaaaaattaagtaagagtacactctaaaataatgataaaagtataatacagtaaatacataaaccagtaacagtcgtttattatcaagtatcatgtactgtacataattgtatatggtagacttttaaagaactggcagtagagtatgtttgtttacatcagactcaccacaaataattgagtaatgtgttgagctacgatggtctggaagctatgttctaaaagatgtcactaggtgataggaattttcagctccattataatgtcaagggattaccattataattgtcgtgttgttgactgaagggtcattatgcagcatgtgacttggtaaagccacaaaatattattagatgtttttaaattatgaaaaatattaatactctcctccacaaaatgaaaacaaagtatccagaaaagtctcaggaattgtacacaaattattacttaccttcccatctcttgtccttatcccggggataaatagtataatgggtagtaattcgaggcacagtagaagttgaagaccatcttgtagcacatagaggtagataatttttcttaatttttaaggcatgaaagcactgatatgctgcacaaaaattacgaaaattattatcttccttaaaattagttttcctcagtagactgaaaaaatataagtgaatgactatactcaatgagtatagtgaaatatactataatctttcctaggtgaacactttgaatagctttttctcataaagcaatgttttcaaatcttaaatattttaaaactaataagcaaatttattcaatttagctcatgtcaggcttaactatggattagtcatgaaagctgaacactttgagagtaatatggagtagtataatcaccgtgttaggtcaatggctttaagcacaaactttgttttatggtcaggttcttaaggcagtatcttcttctttttc

SEQ ID NO: 316866 - DNA, 4001 bp, Homo sapiens
gttttttgagcataataaggtcatccatacttttatttggatgaatggctggattatacattttagcacatagaaatttcacaaaggcttctaatcttggctttatgaacatttaagaactaaagttaaatatatttatttattttggtgattttgcatacatacaaaaaaaccctcacacacattggaggtagttctagtagtagaaatatactaaattgatatgtaactgtttagaaggaattttgattattacaaacagtaggtaacctcaaattttaaaattgcataaggttgtgttatatattgattttttttaagcatcatcagctgaaatgaaaatagtattttataagaatttcttattggttcaaactcagctgttagtttatacctacaagttaaaatccaaaaaaaaactttgttaaggatgtgagctgaaagctgcagacttcacattgcctttttaatacactttccaccttgcccgtcagacttcaggtaaaattctcctttatccagtcagcccatggctacactcgtgcttttagaaaatttgttctgctcatgtcagaaaccattaggcatttaccggaatctaactaagattgaaaactaacgcagtgagtgattagaaaaagtagggtagtgattgattaatggggaaagaactggattattttgatcccacttagcggctgagagagatggaactagtcttccaaaccacccagaaacccctccagttggggtgaggagcttcagtctgagaaactgtccagcattcctccgaagaggatgcggattgttttcttccttgtaaccccaagtgctctctcatgcccactggcccggctgcagtcgttcatttcaagtgaatattgcagacggttgactttacagtattcggggtcattaatcatcatttatatttacacgtatctttttaaaaaccacgcacaaaacactaacatattaatctcatcttcttgctcctgtgaagtagaatgttattcctactttcatagaagagacaattaatttgacagaggtccacacagggaatatgacatccaacgagagctagagcccctgtcggtcttatatactcacctttatattactaagtcgtttgtgacgggggcaagacaagcaggctgggaagaacacagcttgggagagcaagttgggtaagagggatctaaataaagtctctgcttttctaacagaaggtggtttcaagtttttctattggctagataaacccttcatcacttaaccaagcatgcaagaagaaaaagctcactttaagtaaaaattgtcagaattggtttgtttgcggagccatcatgaaaaaatatttctcagttcacagtttccaaaaactttcgagttgtgtgggggtggcggagcgctatccttcttccacccatctcccatccctggaatggtgtctgctagggctattggccgtcatccaccaacccctctagccggccggcagcccccgctagtccgccggctgcagagcgagccggggactttcgagcgggcaggaagcccagcgttccgggttccaggagcgtttctgggagtccgcgcggcccctgcaggtggaggcgcgcggggcgcgtgcacaggcgcggcgggcacggagtgcggctgcagcgcatcgtttgttccctagccggctttctctctccaccttctgcactcgttattgccccctctctgcacttacttccgggccagggtgcccttacccgatgtgcttcttcctcagccccagagtgtcccgcttactgtacagctcgcacatggtggcggggtgcagggcgctgcgaaggtgcaaggtgcaaggtctgcgcgcctcctacgcgagcctgggactgccttggcggccccggccggccttcctcccgttatccctcctggcgttctcttgcccggggcgtcggaggtcaccggtggcgtcaactagctaggatcatctcccttttaagtctggctctggcgttgccctttgccaagcccctcctcctcccccgccggggccgcgggcaggtcgccgggctagcagctcattcgccaccaccctgtcctgccaggccggctcggccctacccgcccctatcattcctctgaattcgcctttcattctcctaactttgcctcgtctttgcttttcctcctcctctgcctgcgaattccctccttcccacgttctttctggtttctttttagtgtagtcctttattttctggtaaaaattcaggagttaggcgcttcccggatcaagactcactgcgcagtctgataaggtaacctaccatttactcagcacaaggacgcgtcctaacgagaaataacccggactcagcctgttatctccattggcagtgatgatatatgcagtgtttcaaacatctcctttaacaatgattacacttctaattcctctaactatacaacttacaaaacacattcacatgacttatcttgttcagtcttcaaaacaaccctgagagatgaccacgagtgttaccccatttaatgaacggggaaagtgaggttattccctgttctaatgattatatatccacttgatgctgaaaacgggactcattcttagatttcttgacttccttcaagatggtcttctcacacagatcatatctgaagctaaatatgtgcacaggtagaaactttttttttttttttttttttttttttttttttgaggatggagtctggctctgtcacccaggctggagtgcagtggcgcaatctcggctcactgcaagctccgcctcccgggttcacgccattctcctgcctcagcctcccgagtagctgggactacaggcgcccgtcactacgcccggctaatttttgtatttttagtagagatggggtttcaccatgttagccaggatagtctcgatctcctgacctcgtgatccccccgcctcggcctcccaatagaatcttaattaactgaatcattaaatcatacattattttaactagaagtcatctggtttaacttctctgctctgtagataagaacagtgaggcacaggaaaggtgaaggtttattcaagttcacacaaacacttagtcattgggttaaggataggtcattttattctctctgtgttttgaaagggcagcagggaaagcctaatttgcatgtatcaacacatttgataagtatttgcaactgatctttctcttgaaaaaagttattaatatatattcatgcactgcaggaggagtagaattggattgcctaaggtagaaagagaaatggagtcctatgaggaacagtgtgttaattccagattttaggccaggcgccgtgactcacgcctgtaatcccaacattttgggagtccaaactgggcgaatcacctgaggtctggagttccagaccagcctggccaacatagcaaaaccccatctctactaaaaaaatacaaaaattagctgggcgtggtggtgggcacctgtaatcccagctacccaggaggctgaggcagggagaattgcttgaacctgggaggcagaggttgcagtgggttgagatcatgccactgcactccagcctgggcaacagagtgagactccatccccctccacaaaaaaaagaaaaaaaaaagaattccgtgttttataaatgaagagcaggaagcactttggagacttgcaagaaatcccagttatgtaatcttggtctagttctgtgcctgaaagatattgccaactgtatatctactctcaaaccaccttgacctggtgaagtcatagtcacacttccttcataaaactttatggattcttgttgttaatattcccagtgccttaagaaactctggattaagagtcttgggttctagatctggttcttccataaaccagctgggcttcttaacctttctgaggcccaatttctttgtattgaaaactgagctctgtggctggtggggagctacacagct

SEQ ID NO: 316867 - DNA, 4001 bp, Homo sapiens
cctccatggctgccaccctggtctgagccaccatcaccctcaactgactagctgtgcaaacccagatggcttggttaatcccggtaagcctcagctgactcagctagcaaatgggatactaaccaccacctcaccaggtagcagatacttaaggctctagctttggggttcaaaccaactagggttgaaattcagtcccactgtttactcatcgtggcaccctggacaaacacccttgcagagcatcccctgcctcactgtaaagtggggataatggcagttcctccacctcatgggctggaggataaagaaccagatgtctataaacattgcacaggacacccagccaagtctctgtgtgttacttccctttctctctccatgcaacaagccagcatctcttagtgtctcttaatcaccagcaggatctgacaacccccaactcacctacgagcatcttgcattatctcagtttcagccctcatcagctctttgcggtgtaatgctccccatgagtcaccaaattcccctatattctgaaagagcctgtgcctacatggaaaccgcacaagatctgtctcatcttcccacgggccagaaatgggggtagcaagaccacgccatcttgtttctgatcgcgcagactttactctcctcccaccccaaagaggcagaagttgcaaggacctaaaatagtggccataccactattcatggaatgcctgctatatgccaggtgttgccatgcacagccaattccatgagggccacttgcataggaagcatccactggtctccttcaggcagccaccccgaccctcatccatgaagaacacagtggctttggggttagacacttctgtcactttagtaagttgcttaacctctctgtgcctcagtttcctcatctgcaaagcagagacaaactgttgtggagattcattgagatcatttagggagagggtctagttcagtgcctggtacacagcacttaataaacgctagcattgccagcgtcccatcgcagactccccatgcggtgtcataaccgatagtttacttgcaaacttgcaattcgtccttctccttgaggttcacagcctcaaggcagggtctctcccgctcatgaatgtcgtccctaggccagtgactggctgtagaaggtgcctgaaaacttttactgtggggtgaatgaaaaaatgaatgccaatgtggcagctgggactcaggccaggcgacgtaacccacaccgcaaggatggaagaggcagaagcaggaataggcattcaggcgtgggagccccagccgtccttctgtccaccatggcgagcagggccagcgtcctgtccaaacccttggtgctgcagatgaggagaccgaggcgtggcgcagttgggctgctgtcaaggatcacccaacggagtgggatgtaacaggcaccgcaggggaccccaggccaatgccctttagtcacgccgccacctccctcctggagcagaaggggaacccgacgcctaagcggttgcgtgcgaagttcccaaccaggctcaaggagtcgcagagccggggctccgggcccgcaggacccagaagccacgcgccccgcgctccccgccccgccgctgtctgctcggccgacccacctggtgtcgcgtgcgctggcggcccgcgcggcagccaagccaaaggccgaggccgaggccgagcgcggcgcccagcagcacggcgggggccagcagggcgggcgccggccgcagcgcgtcccgccccagcagcagccgcgcgtcgctcttgcaggccgccccgccgcgggccatccggggcgctcaggctgccgccccgccgcatcccgccgcctgctgcaccgtccccgccagggcggcgacgcgggacttggagcccgggcgggccaggggcgcggcccgctccgcagactttctggcctgtgcagtctcccgactcctgcttctctccccttccctgcttcgccgagccggagggaggagcctggatcaccgctcaaaactttcagccacccccgccccagccctgcccctgcactgagcatgcccagagacagacgcgcctcccagccccggacccttccggaggggggcccggtttccacccctttaactttactgaggcttagaaggctcctttaagttttttgaggcttagaatatgctacgcatttagcttaatgatctcattaactttctcaataaccctctgcggtgggtgctccgcccatcctcctgatgaagacgctgggatcaatgcaattccaaccccctgcccttgcccctaacctctacccatcaaccttcccgggaacacaccgccctccacgcctctgaacttgctcacgcgaagactcctgttttaatcttattttgtcccagggaaggtcgagacaatgggtggagacaccgttacactcagtctccactaggaggatgggtaaagggatccttacacccagaccccactgagacgatgggtagagagacccttacacctagtccccactaggaccaagggtagagagacccttacacccactccccactgagacaatggataaagagacccttacacccgctccccactaggaccaggacactgcaccatccttcatttactcagcacttggagagaatctgttgtgtgtgtgttgcaggctgggggataggccagccacaaaccaggcagtgtccaggctagtgagtatctcacagttgtttagagtgataaaaaattaaaggagttcatcactgtgtttgctttaaacaaacatttatggggtagctactagatgtttgcttttgtcctgggtgcctgggtaaagcacacatgcacatgcacgactgcacacttgcactcaggggcacacacacacacacacctaccctgtggagcttaattccctgtgtgggccgggctaggggacaccatggggatctgcttcagcagaggagggctttgtcctttcagcctagatgtccagcttgtttctagtttgtttcatcatttcctcatggcaagatgggaactgttatccaaattcttcatctttttttaataaatgaagaaactgacagctggagaggagaggtgactcatttgcaattaaggagtggggcagaattcttgtctcatttacacctgtgtctggcttcagggcaaactctctgctatgtggagcttcttatatattaccttagaagcatctccaaggttcctggggacatgtatgggggcaataacttgacgctcttgttttacatttccatgaatgcttaggctttagtttttaaaatgtggtgtttgggccaggtgtggttgctcacgcctgtaatcccagcactttgggaggctcaagtggaggattgtctgagcccaggagtttaagaccagtcttggcaacatagtgagaccctgactccataaaaaatactaaggagattttttaaatgtagggttatttgctttttactttatcataaagttgttgactattaaattaacctttaaatgactgactgtcaaacaactccaacggtccagcaacatgcttggcatttagcctgtggtcttgtcacatgcctgacagctgccacgtaccccctggtgtggggaacttggcttataaattctcagcttctcgaaccccatggccttgtccatgttaggtcaggaaaggcctgtccttggatggtctgggttatggggagagaggctgccaggggccaggctcgctggcctgagactttatagacagcctaacagcctgccccgcaggaaggctggcgggagtggagccctcccccgtcaacaggtgtcagctgtcacccaggacctaggcagggatgaggaagcacacaaaaggctccaccagtccccctttttgtgtctttctcctcctcctcctcctgcgtcccttggcaaagcaaatccctgtcccctcggagagttcagggagagcttgcttagggctg

SEQ ID NO: 316868 - DNA, 4001 bp, Homo sapiens
aggtctgggggaaaatggatgggagacgtgggaaaaccatcaccaagggctggaagtgaagtggtgggacctgaagccagggagtggcagtggggagtgaggaggggcagacatccgagctgatttggaggaaaaggcactaggactggtgaccagctttgtcgggggaggtcaagtctagggctacagccagggatccatgcctttcgagtttaggaccacagagggagggccagggtgaagtaggaagtggctaaatccatcagccaggagagttcagtcacctaagagtccagccaagagcccccacttttaaaaaccgctgcaatttcccagtgctggcctctgcaaggggctctgcatatgtgagctcatctaacccacttccaccctctggggtggacgccgcgacggccccgtttcaacgatcaggaaactggggcacaggagtgaactgccctaggtcgaagctcgtaaaatggagagcaggattcgaaccagggtcgctggtgaagtccaagccggcagctgccacaccccgaggaaggtctccagtttccctcgaagctttctggccgtgagcgggatacacctaagggccgcgaagcaccctattcagatcctgccctcccttcctcattctttgcgaaatactaagggtcctccctgccaccgccggtgtagacaaagtcaaaccactacagtcagaccggagcctggggtcgggccctccttacctgcgtgctgctctcgggccccgccccgctccgccccggagggatcctcaggccgggcccagacctaggagccacctggggatcccggggtggctgcgcgccgagggggcgccagcggggacgtgagctggcgccgagacagcctcggccccccagcgccagggccactgccaggagacccccggccagcacccacgtggggcgcccccgggagcccgaggggtccatcgcctgtcgggacccgctacctcaaagcggcgggtgccgccgagtcgctggagcttccggaccccaggcccgccccgccgccgagcatgctcagtgcgagccgccgccgaaagttttctggaacaaacacccgcatctggggcttggcgggccaggaggtgccggacgggcgtgggagggggagagcgagttggcgcggcccaggcgcccggcggccaggcctgggtttgcttgcgcccaaaccgaatcagagcgggtcactcccctgctccccgaggttaccaggaccccaagggcccctccgctaccgcctacctgggtctgtaagcctcagctcagacgcacttcccctgggaacggtttcctgacacacggatgtgaatccagagtttccccatccccgcttagaaaacggagaagcatttggagcgcggggccgggagtcctggagcacccagaaggttcaggaaagctcggggaggagggggtggccgcagagaaggaaaaggaccctcacttccggttgcgttcagtgcagaccagctgagcacccactgcccgagcctgctgtgggtcagccctgggccggcccgggtgcccctcgcattcccagtgggaaacaggccagccgctgggccacctctctggggacctagaaagaggggagctggtgtctgaagtcgcagccctaagcaagctctccctgaactctccgaggggacagggatttgctttgccaagggacgcaggaggaggaggaggagaaagacacaaaaagggggactggtggagccttttgtgtgcttcctcatccctgcctaggtcctgggtgacagctgacacctgttgacgggggagggctccactcccgccagccttcctgcggggcaggctgttaggctgtctataaagtctcaggccagcgagcctggcccctggcagcctctctccccataacccagaccatccaaggacaggcctttcctgacctaacatggacaaggccatggggttcgagaagctgagaatttataagccaagttccccacaccagggggtacgtggcagctgtcaggcatgtgacaagaccacaggctaaatgccaagcatgttgctggaccgttggagttgtttgacagtcagtcatttaaaggttaatttaatagtcaacaactttatgataaagtaaaaagcaaataaccctacatttaaaaaatctccttagtattttttatggagtcagggtctcactatgttgccaagactggtcttaaactcctgggctcagacaatcctccacttgagcctcccaaagtgctgggattacaggcgtgagcaaccacacctggcccaaacaccacattttaaaaactaaagcctaagcattcatggaaatgtaaaacaagagcgtcaagttattgcccccatacatgtccccaggaaccttggagatgcttctaaggtaatatataagaagctccacatagcagagagtttgccctgaagccagacacaggtgtaaatgagacaagaattctgccccactccttaattgcaaatgagtcacctctcctctccagctgtcagtttcttcatttattaaaaaaagatgaagaatttggataacagttcccatcttgccatgaggaaatgatgaaacaaactagaaacaagctggacatctaggctgaaaggacaaagccctcctctgctgaagcagatccccatggtgtcccctagcccggcccacacagggaattaagctccacagggtaggtgtgtgtgtgtgtgtgcccctgagtgcaagtgtgcagtcgtgcatgtgcatgtgtgctttacccaggcacccaggacaaaagcaaacatctagtagctaccccataaatgtttgtttaaagcaaacacagtgatgaactcctttaattttttatcactctaaacaactgtgagatactcactagcctggacactgcctggtttgtggctggcctatcccccagcctgcaacacacacacaacagattctctccaagtgctgagtaaatgaaggatggtgcagtgtcctggtcctagtggggagcgggtgtaagggtctctttatccattgtctcagtggggagtgggtgtaagggtctctctacccttggtcctagtggggactaggtgtaagggtctctctacccatcgtctcagtggggtctgggtgtaaggatccctttacccatcctcctagtggagactgagtgtaacggtgtctccacccattgtctcgaccttccctgggacaaaataagattaaaacaggagtcttcgcgtgagcaagttcagaggcgtggagggcggtgtgttcccgggaaggttgatgggtagaggttaggggcaagggcagggggttggaattgcattgatcccagcgtcttcatcaggaggatgggcggagcacccaccgcagagggttattgagaaagttaatgagatcattaagctaaatgcgtagcatattctaagcctcaaaaaacttaaaggagccttctaagcctcagtaaagttaaaggggtggaaaccgggcccccctccggaagggtccggggctgggaggcgcgtctgtctctgggcatgctcagtgcaggggcagggctggggcgggggtggctgaaagttttgagcggtgatccaggctcctccctccggctcggcgaagcagggaaggggagagaagcaggagtcgggagactgcacaggccagaaagtctgcggagcgggccgcgcccctggcccgcccgggctccaagtcccgcgtcgccgccctggcggggacggtgcagcaggcggcgggatgcggcggggcggcagcctgagcgccccggatggcccgcggcggggcggcctgcaagagcgacgcgcggctgctgctggggcgggacgcgctgcggccggcgcccgccctgctggcccccgccgtgctgctgggcgccgcgctcggcctcggcctcggcctttggcttggctgccgcgcgggccgccagcgcacgcgac

SEQ ID NO: 316869 - DNA, 4001 bp, Homo sapiens
cgggaactgtgctctgggaacagcccttacaccattgctcagaagaggaagcagagaccctgagggctgtgacttgtcccaggccccacaagagggagtggccaaggcagggacacacatggccagagctctttcctgtacagtgtgcagaagggctatgcaagacaggcccagagagacggaagaaggctggtcccatcaacagctgggatgggcgtgggcagggccagggcccaggggacgtgctcaagatgccaagggcacctgaatacaggtgctcattcccagattcctgcaaaggcaggggttgcccttgagggtgaggtactctacacccaccatggtcctagatggcttcaggcccttcccagtaggcaccgtccctcccttctggcagggaccaccctcaacaccactgtggctgacagaggccaatgtgcaccaggatttctgacactggcttcccagaaggaagagcttgtgcaaagcaggtgaggccaggcacgcaggctctgaactcgggggccagagagagagtacaggacaggcctggggacgcggctccctgagccttggttttgtcacctgcaaaacgggccagatactcccatctcacagggcagatgcaagtgaaaggacccagggaacatgttctgtcattggacttttgaaagctcaggacactgacatggcgtttttccagtgaaaacctaaagacagaaagggagcagggtctcttttaagagactaaacctctgccagtgtcgcaagtgtcctggggtagagaacacagcaggacacgacccaccaccctaggagagaggtgggaggacctcagggcagcatcaatgggccagaccattggccagggcagtcctgggaataggagcctgggtgtgctgtcaggggcaataaggtggagagaagagtgccagcatgggacaggagtggcagaatgtctaccaggacagaccaccccagaggtctgggggaaaatggatgggagacgtgggaaaaccatcaccaagggctggaagtgaagtggtgggacctgaagccagggagtggcagtggggagtgaggaggggcagacatccgagctgatttggaggaaaaggcactaggactggtgaccagctttgtcgggggaggtcaagtctagggctacagccagggatccatgcctttcgagtttaggaccacagagggagggccagggtgaagtaggaagtggctaaatccatcagccaggagagttcagtcacctaagagtccagccaagagcccccacttttaaaaaccgctgcaatttcccagtgctggcctctgcaaggggctctgcatatgtgagctcatctaacccacttccaccctctggggtggacgccgcgacggccccgtttcaacgatcaggaaactggggcacaggagtgaactgccctaggtcgaagctcgtaaaatggagagcaggattcgaaccagggtcgctggtgaagtccaagccggcagctgccacaccccgaggaaggtctccagtttccctcgaagctttctggccgtgagcgggatacacctaagggccgcgaagcaccctattcagatcctgccctcccttcctcattctttgcgaaatactaagggtcctccctgccaccgccggtgtagacaaagtcaaaccactacagtcagaccggagcctggggtcgggccctccttacctgcgtgctgctctcgggccccgccccgctccgccccggagggatcctcaggccgggcccagacctaggagccacctggggatcccggggtggctgcgcgccgagggggcgccagcggggacgtgagctggcgccgagacagcctcggccccccagcgccagggccactgccaggagacccccggccagcacccacgtggggcgcccccgggagcccgaggggtccatcgcctgtcgggacccgctacctcaaagcggcgggtgccgccgagtcgctggagcttccggaccccaggcccgccccgccgccgagcatgctcagtgcgagccgccgccgaaagttttctggaacaaacacccgcatctggggcttggcgggccaggaggtgccggacgggcgtgggagggggagagcgagttggcgcggcccaggcgcccggcggccaggcctgggtttgcttgcgcccaaaccgaatcagagcgggtcactcccctgctccccgaggttaccaggaccccaagggcccctccgctaccgcctacctgggtctgtaagcctcagctcagacgcacttcccctgggaacggtttcctgacacacggatgtgaatccagagtttccccatccccgcttagaaaacggagaagcatttggagcgcggggccgggagtcctggagcacccagaaggttcaggaaagctcggggaggagggggtggccgcagagaaggaaaaggaccctcacttccggttgcgttcagtgcagaccagctgagcacccactgcccgagcctgctgtgggtcagccctgggccggcccgggtgcccctcgcattcccagtgggaaacaggccagccgctgggccacctctctggggacctagaaagaggggagctggtgtctgaagtcgcagccctaagcaagctctccctgaactctccgaggggacagggatttgctttgccaagggacgcaggaggaggaggaggagaaagacacaaaaagggggactggtggagccttttgtgtgcttcctcatccctgcctaggtcctgggtgacagctgacacctgttgacgggggagggctccactcccgccagccttcctgcggggcaggctgttaggctgtctataaagtctcaggccagcgagcctggcccctggcagcctctctccccataacccagaccatccaaggacaggcctttcctgacctaacatggacaaggccatggggttcgagaagctgagaatttataagccaagttccccacaccagggggtacgtggcagctgtcaggcatgtgacaagaccacaggctaaatgccaagcatgttgctggaccgttggagttgtttgacagtcagtcatttaaaggttaatttaatagtcaacaactttatgataaagtaaaaagcaaataaccctacatttaaaaaatctccttagtattttttatggagtcagggtctcactatgttgccaagactggtcttaaactcctgggctcagacaatcctccacttgagcctcccaaagtgctgggattacaggcgtgagcaaccacacctggcccaaacaccacattttaaaaactaaagcctaagcattcatggaaatgtaaaacaagagcgtcaagttattgcccccatacatgtccccaggaaccttggagatgcttctaaggtaatatataagaagctccacatagcagagagtttgccctgaagccagacacaggtgtaaatgagacaagaattctgccccactccttaattgcaaatgagtcacctctcctctccagctgtcagtttcttcatttattaaaaaaagatgaagaatttggataacagttcccatcttgccatgaggaaatgatgaaacaaactagaaacaagctggacatctaggctgaaaggacaaagccctcctctgctgaagcagatccccatggtgtcccctagcccggcccacacagggaattaagctccacagggtaggtgtgtgtgtgtgtgtgcccctgagtgcaagtgtgcagtcgtgcatgtgcatgtgtgctttacccaggcacccaggacaaaagcaaacatctagtagctaccccataaatgtttgtttaaagcaaacacagtgatgaactcctttaattttttatcactctaaacaactgtgagatactcactagcctggacactgcctggtttgtggctggcctatcccccagcctgcaacacacacacaacagattctctccaagtgctgagtaaatgaaggatggt

SEQ ID NO: 316870 - DNA, 4001 bp, Homo sapiens
agccgccccacgcaaagagtaatttctacctctctaacacttcccctctacttcataaatacggcatttatgaattgtattttctagctagctgtattttatcccctattaaaagtaggaccatgtcttaatcatctttgtattcctagaacttgacaaactaggcatttaacaaatgcttaaattcactaacatgacagctatagctcctccaagattcccctttcctaactttcacatctataagcaaatgtccaggttcaaaatctaccatatttgcttccctattcccttatcaacatgaaatctgctaccacattctgcgatttccccccatctacatgtaatttattcctttcttttcgcactgcaaatatactgacccaggttcatatcaactttacttaaccctacaaaatctggttctctttgcaaggtcccacaaccctgaacaacaagataattttaaaagacagtttgtatcacatcacgcttttactcaacgttttcctaatgttctcaaaaacattccactccaaacactctgttcattttggacatcaaatcttcactttggtactttccatgtaaggaatatcatctccgccctatccaaaccctaattacacttcatggtttacatgaagttgattcaatgaagatcttaatccaaagtgatctctcctctaaatttctacagcacttactgcatttgccgtctaatgggctcattaaatcataagcttctctatctcaagaattctcttaaagaagggagggatgttcatcatagttttgtgtttagtggatacttaaatatctattaaggtaattagaactgaatagtaaaaactggtcaaatgaataatagggaccaacgtttaccacatactccttctctggctaaaagcaactgagtgtacagtaagaggcaaaacaagacaggattgggcatacctcataaaggagttagccataatgaaaagcagtatgtgactcttcattcattcagcaaatactcatgcttattaggtggcagacactattctaggttacagtagtcaacatgacagatatgtttatgaagacctgaagccgggtgtttctatggcatttacatcctaagagtcgagtgattaactcttcagtctttacggtacttttctgaaagtcagtaaataaatccctagaggtcctctaaaattattctccaggtctgagaacccatatctgaccacgttccaaaggcagccatccactgcttactctgtactggttgtttccttcagctcagttggaccaccacactgtgtgacaaatagcctgtcagtgtgagtgcccgtgtgcattgggccctgtatgctgctgagatatattaatgcatgaagcattgccatctagaagatataactgtgcaaggaaatagagaaatacacttaagagatttggcggggggtgggggggagttggggttggggggccgggatgtgaatttggacaaagaggaaggcacagtcacgctctcctctcctggaccacgccaaagagcttacgatcagggtcattttgcacaaacaaaatctggttccgatgggcggaaccgtaatggggcccgtgaggactgccctcccagctccgcattctcctagacccgaggacaagggactggagaatgctctgaccaaacttcgtcttaccgggacaaacggggaaaggaaggtcagaaggagcggtgcccgaccccaggcgtggagacagcagccggactgaggagccgccttagaccctggtgcctgtcagctcgtctgtccgccgccgccgggactaccgggcagccgcggccgaaggcttaccgcaaggccggactgagcctggctgtgccgaggcgggtcttccaaaacggagaccggatgggggccactaggatacgcccctcaataaagcgttgaacgggaagcggccgttcccccaacacttcctatatccgggcacgtgacaaactccgcgccggaagttgaccgcgtagagaaggaagaagcagcgatgggagaaaaagggagcggccaatagacgcggaggggcggggcgccaaccgacgggcgtggccaggcggaacaaggcctcattggaggggcgtgtcagggaagggcaggggcggggcctttgtggcacagaaactgacttgggagttggggattaagagttatttattcagatatttgcagcaattcatttaagaagaaattcgattaaatgttttcttttttcatacgtaaagctctattaactctagatctttgctacttaaactttggagagcttaaatgagttaaatcagaatccctgcgggtgggacccagacatcagtacttttaatatcttcccagatgattctcatatgcagctaaggtcaagaaccattgtcctcatgaccttgatactcaaagtgtggtccgtggatcagctgcttgggtatcatctgggggctttttaggaaatgcagcctctctggctcacttcagatctactgaatcagaatctgcatcttagcaagatgatgcttatgcatatttaagtttgggatgcataaatgatgccaatgttgctggttgcaggtaggtgttttatttattcaatattcctggcaccttttttttttaatgctaggcactttgattccaggtacagaggtgattcaggcatgaatcttaacctaaaggagttcacagtgtggtaggactagacaaggtgtaggtacaaatatatataaaataggacacaaaataagtgaccaaagagaggtacagatcagataaatgtgctagaaatttaaatgagcaaacagtagttagaatacttttcactttcatcaaatgacttcccttttaagagcaggatctggttatatctttacaaagaccctttcctgcttggcaccggaatgcttactgtggacactctatgacaattgcatgtgttttttggtcctattatctttcttttatttacctgtatgtttatagccctcctcaaagttgggaaatgaattgcatttcagaagcctagatctctttcttgaacctcaagatttgtgtatatactgcccatcgcctgacatttccacttggatgtcttatagacacctcaaacttgtgtgtccaaaaattaaattatcctctctcctcttggattccctgcaaagtgacacttatatgcaatagtttatttggaaatttgatcccagggagcaaaatgagggaagaggaagaagacaaaacaaaaagggagatgcagtataagaatgtgttactgagttggtcatcaccatatttgaatgttttcttagtcccttaggaccttctaagaagctttatgaaatgagtctcagaactgtccattaaaggaaagaacggaggaagcatttgtatgtcggctcctgtcctctttgatcgaaggttaatgcccttgggcattaactacttcacacttacaaatcgcacagttgtgaatgccaagctgactcccacatcagagacatgctggggcaggaagtgagaggagaggtgctggtatttcgcacttgttcaaaggtcatcaaacctgctccgagcaggttgctgcagcagtggttagaataataggctgaagggatttgaagtcatggcctaagttgcacagaaggacatagaaggtgtccatatcttgcagcactctgatctgcctgtgtgctctgttatgttcagtccttcacagaggtctcttcaaggtgatggccagccacaatctcagcaaagccttaatataagagagttaatagaataagcttcagtttttactgctgcatcaatgtcaggaccatacttgtattaactccctcttccactacccattctaattttccctcaccattgaccagcacatcagctggtctaagttgtttctctggtgaaatagcccccaccttcagcctttattttcctttctctggttaagccatgatt

SEQ ID NO: 316871 - DNA, 4001 bp, Homo sapiens
ttgaataaaatatttttacacaaaaatctaagttgctattttcacccttttaagataaagggtgaaaaccttttagaaacctttaagaaaaagggtgtcctctgaagggacaccctttttgtcccttcagagagagagaggtagcacaaagttctaagggtatcactcaagaacatctgaagtgaagcaaaccagtacaatactgagttaactaaagttctgagaataaaaggatagataccgggatccatgatcaacagtattcatcctaagattaagaattatgggcatattccccaccttttcaccagcaacaacacagagagactcagtgtctatacacttcgaatttcttagacatctttccatgagtcgattcaacttcaccaagagatctgactgcctataaggagaaaataggaatgggctaatgtcatgaaatataacaccaggtattaaaacaaaagctcactgctgttaggttctcctatgactaaagcaacttaagaaaaagatttaaatacctgccaggttcgaaagctggagcggccatctgagagagttcaaggttaaaaaaaagaataccttctgttgcccgattgagttttggagacacaagttcacaggaaacctgtccaagaactctgcaaagataaagttacaaagtattaaccaaatagactctccttccaaaacaaaaaactgaaacagataacaagtttcaatcttaatgtgagtaatatcatactcagccaaataaatcataggagataaaaattatatgtaaagtataatatacacagaaataaaacataaattggtacaactaaaaacacgacagaaaaaacacctctcttcttattacaatgtttactattccacagattgttttaaaaatcagtgacctttacctctaaagcaagtatttattgatacaagatggcatgaaaacctgagatttcttaaaggttttcacatggcatagttcaccaccattatgtgaccaaatagcctcacaactttcaaatgaatatctgaaaacctaattttcatgtcactcaggaaaaagaaagcaggatgtacacttaatgacaagatgctcaagatctctatattagtgtgagaaacaaattccatatgatcactactagttgtctatacgatttatagaagtcagaaaagaactatgtgatacgtgacagaaaatacgtttatgattaaaaagttcaagtgtgaccacaaaagcaaaaaatctcgcataaaaaaatacttatttttgtcagctaaacaaagaatactgtccagacttcttagctgctttataaacaaccaagtcaataaggtcttttttcaaacttctcccttccgaatgtgtatctcatttaaatcctgttaccttgtttttccaagttccacaatgcagcatccgtaatctgttccaaatgagatcctgatgttcctataatcataggtttgtctgccatccagccgctgtaagcacaaattcattcattaatttattccttcaacaagtatttcttaagcaactactttttgtctggccctgggctaagcacttgggggaaagtggaatcctaaccagcccgcccatacaggaaagtggaaactacagcatggacaactgctgcggtgactggagccttgaaaagaacctgtcgaaaaaaaataaataaagcctgagggatggggtgaacgtgccggtcgttcccctagtagctccccgggcccaggcgggccaggtatcagtccacaccttgagacccgagcgcccacgcagcgcgcaattctgcgggcaccaaaccataccttcttctcttcgatggcacggagtaggaagcggcgttcgcagtttgagagtggcgtttccttcatggtgttgggtcaccggccccacaggcaccagaatccgcgggaaaaacggaacccgatctttccttgcgcgccgctgctcgccccgaggcgcaggaaaattacgtcatcaaggcgcggcggcggaaaaatgggaaatggcttgggctgcagctactgcgcagactcaaagcgtgattggggaaggccagcgagctgcgagaagccattgcggctttgggaggccgtttctgaacgtgaagttccgtttcttttctcataaagtgcagaggagaaaaggatacttaaaataaccatgagagtgatagaaattattatcagtagaccgctcgcacacttcaccctttgctcagtcctctcacggggtggagactagacatgtacttctgcaatttcacagatgagttgacattggtccctggaaagccgcagatgcaggatttggagcagattaaatgaacaaacactggaatgaggcggcataagggttgggggagaaagataaattggtgaaatgggatgtttttgtggccaaaggtgaaatcttgtgggatctgagaagttgatgagaatggagaatgttcgcacgtagtaactaacgatgttactactactgtggactgaaagtaaatgcaccgtttatttcttatcccctctccagttattttaagtcgatagacttttttttacggtcacagagaagccttagcggggccatgctgccaaccactcagcttttttggagaggcagtatcaaatagtagttttaaaaagtgttcactgccagggttcaaattttaaggctatcattaactactataaccctgggcaagttaacctgtgtgcttcacattactcaccggcaaaaaaaaaacaaaaacaaaaacaaagcaggggaagtgagaaacctatttattctgaggaataaaaatgagttaatatatacataaaatgtttagaacagtgcctggcatggaataagcactatttaagtgtttgcatattattattttgtttccttttgctttagaggtggtaggcactgtaactcctacgcagtctttctctggcttctttggtagcttctcacaagttttttctaccagtgatacattttagtctcactttgtaccacttgcaatccatgtactcaataaatacttgaagagggcctactctgtccaagaataatttaagtgctggagaaacagggtagacaagatcctttcaaggaatttatattctttttggaaaaggcaaaaaaccctaaacaaatagaacaatttcatacagtgttaagtgctctctgagaataggaatgctatcttaataggggtagttgcaggaacaggtgactttgtagcggtgacattaaagtaaagtaaatctttggtgttgagcaggagcacccttgatgccatctggagaggaaaagtgtttcaagcagaaagagtaacatatgcaaaaactgagatgagatgagctccacatggtctggagagagaaattgtgaagaaggaggaaagtggacagaaatgattaattttcaaaatcggcaaggggattacagggtactaaccacttaagttctttagcaacatgaattcatttttatagtacagtttcataccagaactcctggttgataagttcttcatttaaatccttgagttctttcagtggccatttggtaatttttcccttcagcgatgaaatagacctttgttgaaatagcctgttatttactgcaaggcagcttggtaatggaaagagaatggactttggcttcagataaagttcagctcaaatgaacttggagtgagctaaatattctttctgatttgggggttctgtatcttcagattggaaataacaattattctgtgttaagtggtctgaatgaaagcatctgatgaaacattttggacatgatagctattcaaatgttagtttcctcctttcttgttgggttggcaaaggcttcccatgaaactgcccaaactcagcatgacagattgcttttctgaaactgctgcttgattactttgctttccttccacttttgttgaatttccactgttcttttctactttcacttttatattctaatt

SEQ ID NO: 316872 - DNA, 4001 bp, Homo sapiens
taacctgagcagtagtcttgtcacagagaaaattgaaattatgagctgtgtaatttaatatattaagtggaatttacttttaatatcttcacctaggtttgccttttttcacataggccagcaaaaagaatttactatgcttaaaatgctagcaatagtatcagaaattaaatataacatgtagacataagctatttttctaaaggaatgcttcagctttcattttaaataaagaatggtcatggaactaaacaatacctgtactgatatatcctacttaatattggctaagtaatttataaacaaatttagcagatgtgacatagggtggagaattaacagggtagttaaattattgaaatgcataaactgtgtatgaatagttacataacatttttcagtacaaaattcctattttatgtgtgtgtgtatgttccattgaactgactgctttatgaaaaaccaactaattagtgaggcaaatcaagatttcttctttttaatattgcttttaaatatcatttaaatgaatgatgtatgtaggcatggatgtagatatggtacacatatagacacagattcctaccagtacaaacaattttttcacctcaattcctaccctgctttgaaaacctctggagcctcaggcaggaagttaataaaaacattttatttccttcccggcataaatggtgtgggattctcccacatgtgtggagattgcagtgtgatttccctctcccagcccatagttaagataacactctacttaccaccagaaactgaagtaaataaaatgaaatgtaccacttgatataagaaaatcatcctacaatgagaaaaaggtgcatgcttttagaacataaaatgtaaatttataattagtttactgacactaagacttacaagaaatagggagagaggggagtagttaattcaatagcattcacagtgttctcattataatgttgaattttctttcccaatcctggagcattccttagtgtgactgtgtgtggcattcaactcttacagctctgcagaagccggaacccacagggaagcagcgctctcccctcctccctccttccccgccggccccgccgctctctgtgttcagatccttctcatggccaccatctgaccgctctccccaccccaatttttcatctttgtttcctttcccaatttttttcctttctttctttccttgaggcctctccctatatctttcaaagagctatgaatgatttcctacttagaaaattttctatttaaaaaagtctgtggctgatacattaatcgattgtcttggtcacctataaatctatttatctccagtaagcattaaacagactgctctaggaaaaacggagtcatcagtgagacaaatcaagacttctgatttttcagtactgcatttggatgtctttttaactcgtaaaacgcttgttactgagtagacactgttactcttctgttgttccacatttcctctcagattagttatggatattagcggaacatctctacaaagctaaatcagacacattttaaaaatcaatcattctctattgtaaagtgtttttaaattcctatgatttaaaaaaagcatttcaaggcgtatttgcttgagaggaatgttaaatagtaagttctgaaactgtacctgaaaagaccttgttggcttacttgctgcaattcttaataagggtgcttttcttcctccaaaatggtcttcatcctcctctgaatgagcttgtgtaggaaatggtcacttcactttaatatttacttgtactagttctcaatgttatgtaacattctctctcagtacagcatatttgtgaaagtcgttaaaatcttagtatgtcagaaatataccttgagagaattgcttgctttctcaatacactgaatttatttttttaattttatttcgtattcaaacaagtgacatacacagggacagatgtagaacttgattttgcctgtgtgcctgctagccaaagctgcatttaaccacactttcacctgtcagctgttaaccattaattctagctgaccttgaatctcaaagtctaaaaagaaaacatggaaagtctaatggattcattgatttgcaatataatggagggaggagactttggctgctgggggagagcggacggatgggaagcaaagtacagacagctcctaagagcctggctcttgcccagtcagtttcccttcaggtgacgctgcctctcagaggcctaagcagataggattcctcctaaggccaagctttttttttttttattcttacttgtgaacactaaaagtctattttttaaaacagaaaaataagctatttcagcttgcttgcttcttactttctttcttttctttctttcttctttctttctttcttttctttctttctttctttctctctttctttctttcttttgagacagagtctctcgtcgcacaggctggagtgcaatgacgcgatctcagctcactgcaacctccgccttccaggttcaagtgattgtcctgcctccgcctccggagtagctgggactacaggcccgcgccaccacgcccagcttatttttttttcttttttcttttctttttttgtatttttagtagagacagggtttcaccatgctggtcagactggtctcaaactcctgatctccagtgatccgccagcctcagcctcccaaaatgctgggatgacaggcatgagccaccacgcccggcttcttttagctttctttaggtcctgggacacagacccgaatggagagctaggaagtgacatgtctagcagctgcatgactgtcaacgaaagcacagcacgtcacatccctgaaggaaagggtggttttgtcctggagggagtcttcccactggacagtgggaagtgggacactggacagtggtaggacctggcgtttataggcaggaaagtttgtgaaaaaattctggggtgtttcacataattatatttccatgaaggccttccctttggccttgaagaaggtctgaaagcctatggagggcatgttcatccatgccaactgctacccagacctactcactggctgacgagtcatgtgacttgagcggaaccagcctgtgcacagtccccagccacctgcaggtccttggcttccgtttcctcatttagaacacaaggcactaactagtgctgagggtttctgtgcggtcccctaaaaaacctcacaacacgaacacaaaacagttttcaatatgcctgatttgaatacattttggagaaagatacgtttatggttcagagaaggctctcaatttttcatagaaaagcaaaatacgatcttgtgtttatacatggaatcataatttaaaaaacatatttggaagaccggggagaaatgacagggaattaagagaatgtgaactgagaacagatctttttgtaaagtgctgaagaactagggtgatgttctatctggaaggcatttactcagatatttttatttgatctattgccagtgcatttgacttatcctggcataaagagttcctagctgttttcttgagtttcccgtttaaagtacattccagctacccaaaaagtgcatatttatgatgcattgccttttatgaggctcaaacatagaatggcaaattcgtgccaagaatggctttcatggaaaatggatacgtgagattatatgaggtccttatatccttgtattgtttactccatggaacctcatctctcttcttaagccccaataaaaagaagataaggataactctccaaccctattgagagaaacagaaaggctctaaataagagaaatgcttcactggaaaaccaaataatattttcctaagtttgatttagctagttagtgaaatctttaaggtctttgaaatagtatcaggattcaaaaaaattttgtctattcaaataaaagtagaataattttttttcagacaaggtctcactcctgtcg

SEQ ID NO: 316873 - DNA, 4001 bp, Homo sapiens
tttaaaaaatttgttgaaaatgatgacttcctaaaatgtgttatcttaaacatgaaaaggtacactcccaatgacctacaatacatcaaatctttccatttggtaactcactcatttgttcatctattcatttcttttattatttcaacatgttaaattgctattacagttaagttacatattaactctaaaggcttcttttgctgtactgtttaaaaacacagttttaaatttctttatgaataggtctatattcagtcattcaaaagatagttttctaattcttactgttcaattcagattcttcacagatgcgtataaaaataaaaacatatttaaatatcctgccaatttgtgcaatatataatgtagacaaacttcattggcttcttcagttagtgaaggagacctgcattaattaaaccatccaatgaaatagagcagaaatcattttaatattgggtagaaaaatcaagaatgcattgctcataaaaaaaaaaattcttaccctgagttcagttccgtctgctagattgtaattaaaggtgacaccaagttcaaaaacaacttcaatgtttcgaaaagtgcttgattctttgactgtgaatttatttccttcttgtgtaattgtcagcttcaaattgtcatgagctgcaagcttccttttcactatattaacacctgtaaaaggtaagacaatggagaaaataaagtcaaatcccataggaagtgtttatttttccaagttatgttttgtttgtttattttgagggtgggaagaaaactcggtagcattgcctttgcacaagaacattcagattgcttctacagaagttcaggttcaatcagatcaagagaactgattaaagttgtttttccataacttgagaaaaattaagtagagtacagaattatagaatcttagagctgagcaaccttaataagattaacaaactgttcatttcagtgttaagtaaatcaaattctagaaatatcaaatgaaggattaaaatgtatattcatatatttataaggaagcacatctttaattccacatatacagtattcttttttcttaaatgcccctttgtttttcttagtggctttaacattttgaactttatagttctatttgcttcttgtggcatttctttctgacacaaaaatgagaaaattagcaaatattaagccaaaatcactataagaatctacaacttttataaatttaaacttagagttcctaaactgtaagctataattgatgcagatttttcttttaggggaatgacacaaatttgtttgcctatcttgtatagtatatgggctgccagagtattggtatcaaattataaatcagttaaattaaacgccctggagaaaactacacagcttctcaagattattccaaaacttttttaagttagaagaaatcagaattaaatctaacttattcagcgctataaattttaagagaaccttttccattactttcttatatggtctttgtttttccatctcctagaatttaacattttcagatctggaagttatcattacacgctgccattttcttactgtaaacaacaaaaaaagtcatttttcagttaaagagggaaggaaacatttctggatctttttggtgtgtttcagagaacagcactcaaagaatcttttcttccattagtgagatagtggattcttcctaatgtaagaagggagaatatggtttccctcctctgaacatcttctggatcctctctaccacatcaggagctatctgtaagctatctgtaatctcctagagatttaggagttagaaagaaaaatgtttgtaagaaagcaaagaatgagccacaaagaaataaagtctttacccattttttccatgaacttgtcatagttttcactccggtctaccttccaagtgctgtcaaacgccatgatttcagttgagtcagcctctaggcagctagagattcaggtctgtccttgggcgagaatttattatatttcttatcttagaaccaacttcatactgtgatgtggaagcttaaagttcaggaaatcacctaactatgtcaagcaattaattaattcttattaattaattcttaattctcgttctgtacattcctgagatcttctgaaattcaactgaattaaaacatgagaagcatacctattctgtcttaaattacagtttgtgggcatacttatttcaagaattagaatgcatgccgtctgaagattgtttttctaagttcaaagtgcagactatgttggaggtaatataatttatagcatatatcaaataacatctgggaaatgagaccatgacctttccctttttcacaacagcaattatcttgtaaagtaagactttatgatgaaatacagttgaaaagttaaagttaataagattcgttttctaatatgtctttttgcattgtgtttagcattgccaggagtttggataaatatcctggcactttgtagggtgcatgacacacaataagtgctcattgatttttgtcttgatcctgaatggtgataggccactgagcaaaaattcaagaggtacaaatgaggctggatggtgtaaaaacttgcataaaagaaagaatgagctttaaacatctgccatgtgcagagagaacaaaatccagttttagctgtgccattaattaaaaccactccttcattttactctcaatgcctctcatccccaaacccagtagagtcagaagccacagctcaattatgtatgtagggtcagggtatagagggtagctagaaaggtacaaagaaaaggtcaccatatctctcctttccctacttcaggctgccagccaggaacaggccaagcttggggaggaaacttggtgtgaagtaaagagttttaattactagtcttaagatgtttattactaaaatgagtctattattgtgactgaatgtgaccagataacatcttattaactaagggtcaggaaagaagctctagggcttgcccaagatattacttagggtcaagggaagataaatctaacagatttgaacagaactttggggaacagaatcccagtttttaaattttgatattattttatattttgatttttaaaaatcttttaaacatgttagatattgtttgattttttatttcgagttgcccactttttattttattaagtaagcactttaaaaagcaaactattttctactagctctattatttcattaaaaaagaaaaagaggccgggcgcggtggctcgcgcctgtaatcccagcactttgggaggccgaggcgggcggatcacgaggtcaggagatcgagaccatcctggctaacacggtgaaaccccgtctctactaaaaatgcaaaaaaaattagccgggcgtggtggtgggcgcctgtagtcccagctgctcgggaggctgaggcaggagaatggcgtgaacccgggaggcggagcttgcagtgagccgagatcgtgccactgcactccagcctgggcgacagagcgagactccgtctcaaaaaacaaaaaaacaaaaaaacaaaaaaacaaaaaacaaaaaaaaacaaaaaagaaaaagagttgcctggtgcagtggttcttgcctgtaatcccagctattagagaggctgaggcaggagaatcacttcaggccaggagttcgaaaccagcagtttgaggccagcctaagcaacatagggagagcctggctgtaacaattataataaaataaattagccaggtgtaatggcacatgcctgtagtcccagctacttgggaggctaaggcgggaagatctcttgatcccaggagttggagattgcaatgagttgtgatcatgccagtacactccagcctgggcaacagagagatcccatctctaaaaaataaataattttttaaatgtcaaaaaaggaaagaaaacacatatacacactcatgagttggggacaaaggtcataatgggaagtcctttacatt

SEQ ID NO: 316874 - DNA, 4001 bp, Homo sapiens
ttaaaaaaaaaaaacaaaaacagtgccagtcagcgaaggaccaggaataaaaactctggatgagaggctcttaatcaggttgtagcagtttgtatgagtttgtataaagcttgacaagtctacgtacccaggctccagcctattctctgtgaggctgccaggcatttttggacctatttgctctcctgttcaaaaaccattaggtgtaaatatcttcacacttcccatcataatccagctccaatctctctccacctcttgcaactctcagtatcctccactcctgcctcaccagtcttttctccattccccataactcttcacatctccctgcctttgcttacgctggttcctctgccccggtgctgcccttcctccagctgcctggcaaactcctattcctctagacacccagtgtctaatgttacctttcattctgaatttttccttaatctgccccactgcttccaatgaaataactgctacctcttctatgtttttggcactttgcacagatttctattccatgtatttatggagtatttacttctgccattctgtcctccaagactgtgaccaacagcacctaggttggtttctgtccctcagatatttactgaattgaaatacattgtgtttgatattaataaaagagaaaccatgtttgatgtaagcctggtcaaataaacaaagacaagtttacttttatggtctgaatcgctcagattcaagaaagccccctccaaccctcaaattccttctgcactgtctcacttgtgcctcaaatccatccctaacgtctcattccttcacttaaaggttacaatgtaagaagtttatcagattctttcccaagctcaggcttgatggaagaaaggagggcggggacgcaggcctatgggtggggtagggaaggagccactaggctgcagagagggcaaaaagaggctctgaggatagagcctgtctcattctcagttgtcacaggttggctgaggtcacagggagttcagagcacactgatttaagaagccacctgcctgtgtccttcaagatgtttaggatgggaaatgatgggatcagtagggcataggtaatgctctcacagcccatagagagatgtcttcctacttaagaaaaggcagtgacgttcaggcgcctggtctgaggtgcctggaaatactcaccggatggcagaggcgagggctagccgactgggtggagggggcctggggatctgcggtagggagtgggacccatcccgggggctgcgagtggaggcggtgcctgcttagagtgttggctggactggaagagcaggcagggcgtgggtcggctgttgggggaggagtaaggcgaggggagcggggaggtcaaggcctgagctccctgtgccaaggccgagggcaggcgcaccctgggacgaggcctctgtcttacagggacctgctcccttcgtgcccgggctgggggaccctgcagcccacctctgacttggccccgagccattgggggcacttttccagacttgcttggtgccaggactggatactttgggagatccaggcaggctccgcggaggttcacgcaggccgagggggcagaccctgagtgtgggcgtgtgggtgtgtgcatgagcgtggacccggagcgacacacactcacacacacacactcacacgcccgcacccacgcaggtccctcggccgcgccgccccagaccctcaccccagagccgggtcctccctgaccactgcttctcactaacgcagagggcaggattcgtgggtcccggacgaggcgccaaggtatggtgttcccaccacccccgggcagccgcccccgcgctcgcccgccccccggggaaggggatggggaccgagtgcccggggctcttaccgctcaggcggccgagtacgcgcgggagtgcccagcgggtcccgccccgccacgtctgcagggccggcggggacgcggccggagggcgggcggctggagagggggccccgccccgcctgcgccccgccccacgaggagcgccgcggggacgcccggccacccccacgctgcgagggccgggcccgcgctgggcgagtctcctggaaacttggcttgtcccacccctgtgccagcgcggaaagccagagcgcgccgcctctccagcccagggcgggtgggtctcggggttcgccagatccctttcctttccttaaaagggcttggaaaaccccccgccgtgtcactgggaagaggtcgctcaaattcagctaaagtttgatctcctgattctgcgttaagcagcactcccttgccctgtcggtgggagtgtgatagatttaaaacaaacaaaccccaaacaaacaacgaaaacccactttccagaaggccagtttggagctgtgggttaaaactccgatgtattagctttggcctaggaattccacatttgtgaatttgtcctaagtaggcagtcaaatgggcaaatatgtatgtacaaggatgtttgttgtagttgtttctgcggggggaagccggagacaatctcaatgtcccccagtaagattggtgaagtaagctacagtaacttcagacatcgaatatgttgtagcccttaaaaatgaggattcgttgacatggagggaaggccacatatgaaggccttcctcaaatatggcttaatatgaactcagatgcggaggaagcgcagtgtttatagtattaactagttttgtaaacaattttgtattttctataaaagtcggaggaaatacaatttaaaaatagtgattctttctgagcgatgtgtttaaggcagattttctcctctctcactccatcccttcttctttttgaagaattataaattcaaagttaaagaaaaaatagccctagtctctccctttcaatatcactaccattttttatagtgtgtggatcctaccatagtttttctaagcttatataaatacatgtatgcataaacagctttttgtttgcttttttataaaaatggcgagatgttgacgtattttgtaaatttccccctatttattatatattataatcatctttcttggtcaatacatatcaaccaaaaccactcttctaagacttgtcttatatattgcaatatgtttgtaattatatttcattcaatcattctcctattgacaattagtttgctccttatattccagtttcttccatatatatattaattaatttattaattcatttttttgagatggagtcttgctctgtcgtccaggctggaaagcagtggcgtgatctcagctcactgcagcctctgcttactgggttcaagcaattctcctgcctcagcctcttgagtagctgggattacaggtgcgtgccaccacacccggctaatttttgtattttttagtagagacggggtttcaccatgttggccaggctggtctcgaactcctgacctcaggtgatccacccacctcggcctcccaaagtgctgggattacaggcatgagccaccgtgcctggctatatttcttatttaatatttttattaaatatttttatattaataattttttaagctactgaatatttattttattttattttttaggaggacagagtcttgatctgtggcctaggctgcagtgcagtggcaccatctccatctcctgggttcaagcgattcttctgcctcagcctcttgagtagctgggattacaggtgcgtgccaccacacccggctaatttttgtgttttcagtagagacagggttttgccatggtggcaaggctggtctcgaactcctgacctcaagtgatctgcccacctcggcctcccaaagtgttgggattacaggcgtgagccaccacacccagcctgtcatttttaaattcatagaaaaaccagaaagttatcttaatgtgagagtgggtggaaactgctttaaattgagatcaatagcctttttgaattgagcgagactttgaaccttaactaacacg

SEQ ID NO: 316875 - DNA, 4001 bp, Homo sapiens
aactcaacattcttgaatgcaaattcaaattattcctgcatttattcctactaggttcattaatcatgactaaaaatacaaaataatttacaggaaataatgatggttttattttagctttaatcgttttgattgcctaaacaatgttttaacagtataaagatctattttcttcttaacaattattagagcatcacatggctggctattagagttcagtagtagccaatattcttatctagaatacaattcgcttaaaacccttaagaactgatgtcattataaggggaaaaatgtctccaactttaaagttggaaaccaaatcaagactccacaaagtgttttagtctctcacaagctttaagcatgtggacattttcactgagttcacgtagaaaaattttagatatatttgtaaaccactttctgctcccttggattcttaatttttacaaaaggaactctttggacacccccatcaggttcccatgacagtgtccttgttagtacagtgaaggaaaaatgactatactgttttatctcactgtaagtatctgtagaaaccattttgcaaataagcaatgttttaaagcttatttttcattgctaaaacaaaaacattcactgaaatatttgtggcatggtttttaaaaatgaaattagtttttgtctagttttttttatccttaaataaaccacatttactatttgatttaaaattttttttttactaataaaaccttctatagttttcctaaatgaaacatttctatggaatgaaatgccactgcatgtaaagcagttgaagttgaaataggacaatatgattagcaaaggtaatgtttaaaatcctaaaatgtgaccttgggcagccctgaggccctctccatgcctacattcttcacttcttagttcacaacagtgttctttttcataagaccctttgtttaaatttacctttctctgctttggtataactccttcgcctccccccagacccacaatctatattataatcacgaaggaacaaaaacagtcttgcactcaatcattcttactaagcagttttaaaaaatgctatttgtgtaataaatctgtctggaattattgaaggggaaatgttatccttaacatttattctcacatattatgatgtacttattcatggaaaatccttgcctagatctgaactccagaagagaagaatcttgtgatgcattttaaaaggtcttcagcctatcaacatcctttaaaatagccttagcaggaacactgctaagaagcggattcagtttttattataaactcgctcattatacttctcagtccatgtttttcttcagatttcaaaggtattttcttatattcatttccattcagagaaggatataactaaatacaacaatcaagtgaaaaagataagttgggcaaaatgtcagtaaaagagcagtataatatttaattttttctgttcttagggaggaaccatatgtacaacggactctacacactttgcagcatgttactaaaagatgccaagtactggcaaagttatatggcttgatacaactcaaaaaatacatagcagaataaaataaaataggaaaatactacctttgcagaggcatgatttcacaagccattctcgtatgtaaatttgcaagggaatctcacaactgtctcttccacggcaagtttggtcgtctgtacagtgaacgtcttcttacagtggctaagctgggttgggggcatgaggctgcaccgcacggctggagaaacaacttgctctgcagttggccagtctactgctgctctcagcctccaaacttcttcaggcaatgctattttatcggctgcttctctacatttacactgcagtccactttgaccttttgttccagggaagcagctgaaccaccgggccaatcagagcagcagctgctgcagcactaaaggcgctcctcctcctcccccgcaccctactccttctgctcctcaatggtccctcctcctcctcttcctcctcctccttctctcctcctgctcctgctcctcagtgggcttgcctagttctggtaacttgaaactttcctctgagcagttccacagacaagattttcagtctggggcaagcaaccaataactgcagcaagagccaagagtcctgtacttctcaacattacagagactgccagcaaggattccatttgtcaaggaaagacactgcccacgaaactaaaggtttctgtagcagaaggcaagagttatgttgcgtcccctttcttccttaaaacaaaacaaaacgaaacaaaaacactagccttgaaaggagtgagacttttctagaaggaaagcatgcctctagacccttgccctacccacatgtatttcctgctgatgtttgtttacactgcggtggttactagtcgctggtgacatcacccagcgcacgtagctccacttctggggaggatacgtgccctaagtctctgcccaagttcttaagggatcagaatccactctaatgaaaattgtttcaacttactatttctgcattttattcttataaaactgaatgtgtttacacagttatttttctccatgaacatcaacagcattttgggggggttgctttttatttttatttttttttataggtaacacaaaatcagtttttccataaagtcttctaaatatttgttaattatcaccttccccttataatttcttctttggtgtagaataccagggtgttatttttaggaacataaatcctaatccatagattttatacattttaagaaaaatagcagaaatatatttacatgatatttttttcacatcatgagttgtaaaaaattacaacatagtccagaccatcacttctagtagtagaaggaacatgacattcagaaacagtgagggcttgtaggcatgaggtatccccttcccctgtaatttttccccaattttatatagatcactcataattctgaatttagaacacaaggtcctatttattataagacatctgcttttctttgctatacctgctaataaaaacattttcattgtctgactaaataatctgtgtttatgaaaatagatttgccatcctaaaactatcatcatacataatgataaactatcagtaactaaaatcagccttttaaaacaaaaggagttgatttaaccccaaacttatttcaactgaaattgtctatacttttttgattctagatttacaaattctaatttgattttctagtaacataacttagttccatatatttccataccatttttattttaaaaaatcactttaactcttgcttaacactttattatttatttatttatttttgagatggagtcttgctctgtcacccaggctggagtgctgtggcacaatcttggctcactgcaacctccgcctcctgggttcaagcgattctccttcctcagcctcccgagtagctggaattacaggcgcccgccaccatgactggctaatttttgtggttttagtagagatggggttttaccatattggccaggctggtctcgaactcctgacctcaggtgatccgcccacctcggcctcccaaagtgctgggattactggcttaagcttaacactttaaatagctgcttgaggtagaaaatcacaattatacatcataatatctattttattgatgagtaaacttggtactagaaaataacctgttcaaatttacatggaaaggtagtggcagaacagaacctggaatcggaatttctcctgtctattctggaactcgctgctatatagaggaattgtggaaccacagtgctgactctattctgtgtgaatttttttttttgggggggggatggaatcttgctctgtcacccaggctggagtgcagtggcgtgatctcggctcactgcaatctccacctcccaggttcaagtgattctcctgtcttagcctcctgagtagctgggattacaggtgc

SEQ ID NO: 316876 - DNA, 4001 bp, Homo sapiens
ttagttctcccttttttgtcacgatgtttaaaattttttttgttgttctccaaaagctatctttttccagatatgctatggtacaactgttgaaaatgtatttcctcctacagtaaaaccaagacagcacaatcaaaggccaaccttaaggagaagggtagaaatgattgagaattactcatctaccagagtgaataatctcttacactgtgtgatttttatgtcaactttaactgaaattttatacatgctttggatataaattaagggaaaatataaagttttatacatgagtcagtgtgcattccagtcaaggtagagatcaatatattgcaggtcaagggaaagaagtaaagatctaatcagacaatcagagatgactaccaatcttcatgacctatctgctgcctcattctacacattttcagttctgtattgtttcttttataaagctagaaaaatagaagggccacctctgcagtaaagtaaaagtcagtattttacacatagataaatcagattttgaaggaaactctttggggtgataaaaaaagaataaccacatggatacctggatgctactaagcctcagagttaaaaggaagacagagtgacatacatggtgctgaaaagttttgagcctggaaacaaggtcatcctgcagtttcactaagaaaacttaatctatagggctggtctaccatttggtgaccatttggtgaccatttggtgtctgtgtgtcaaaaattgctcagatatttctaaacacttcagaatgccatcagaagctacagcaaattgcagctctttctgaaacacacacaaaaaaagaggatctggcctgagtgtgattttttaagtgagcagttaaggtgataataaggaagaagatatttctcatttaatacattctagaaaataaaatgtccctatggaatacaatagcaacttgaaacataaatatgtgtaattctcatacagatatatgcattttctatatagtacaatcaaaatttaaattacagcattctgcaaattatataattgacaatttttgattattacaaaaggttttgtacaagcaccagcagaataatttagaaattcataaattctaaaaattctaaaactccagaaatatgcacattttcccaaggattttatttcagtgttatttattaatgctactgtgttataacaaccattcatttctacagtttaaggatacacaaacatttatcaactgagcttctccaccatcactttcagcaatcatgctgaaacagaaactccagaattactaaacgaaaatagaaatataaaacagaaaaatgtcacacacatactcaaaagtaataaattaatggttacttcaattcctcctcaagctagccacaagatttctctaatagctataatgaagcattcatgtttaactattcagggacaagaaagtctaaaatgcttgaaagtgctctactttaaatcaagttgacttaacggaataaatcagcatgcatctttcaccttttttggaaactaaagtgcacaaatatgctgaatgccatcccaaatcctgcctaatacccatttaagtagataggaatttaagtaacaaatctttccccacctcctgggaaggaaaaataagttacacaaacatctcatcaaaacaaggaaggcaaggccctctcctaaaaactggcagtaaacacagaagacagaagaaggcctatacttacacagatggctagagctcctgcccccattctctcagaaagcgtctggaagaactgaggaagaccagacgaaaatattaaaacgacagcaaaatactaaaattccattcagcacatattctttgatgtgaaaaacagctcccaatgcaaaggccccaaggtaagcgaagagcagcttctaacattttaggaagagtggttttgcttctctttccgctgaacccacatggctggaaggactgcctggagttgaaatttgatccacagcctcagtgctggcaagtagagggagtcacgtgacacgggtcttaagtcgctgacatctttttttcaaacctgactccctagatcctacacacaggcttctttgactccgaaaactgccagtcacctggtggctttcattaatagaaccaacagtgcataaagtgaaaacacagacttgcttcccagattccacacagctctaagcaaaatgtacgtattcagactcaggtttaaaactgcaggcacattattcattttttctgaggcagttttctcttctactcttccttagaaaccagctaaattctaccaaaattttcttccttccatgctaccccatcagaattgttttaaatgaaaatgctctattttatgtagccgttactacttctaattatgtatgagttgtcttataaaaatatactgatgataaacataaacaacatacttctagacaaccataattctacatatgtgatttgcagtctgaaaaattagctaactgacttttcaataactttctcttccacatgctgtcactagaaaatttgatagattttaaaatttacaaatatttgaactaatagctaaaatagccacttcaggtaagccaaaaggaaactatcctatttttatttttgttaccattttttctgtcaatttgtttttcttttttcttttgctgtacctattgacccatcctctaagttctctcccctcacccccaacctcccaacaggccctgatgtgtgttgtttcccctttgtgtccatgtgttctcaatgttcaactcccacttatgagtgagaacatgtggtgtctggttttctgttcctgtggtagtttgctgaggatgacggcttctagcttcatacatgtccatgcaaaagacatgatcttgttccttattatggctgcatagtattccatggtgtatatgtaccacattttctttatccagtctatcattgatgggcatttgagtgggttccatgtctttgctattgtaaacagtgctgcgataaacatatgtgtgtatgtgtctttatagcagaatgatttatactcctttgggtatatacccagtaatgggactgctgggtcaaatggtatttctggttctagatccttgaggaatctccatactgtcttccacaatggttgaactaattacattcccacggacagtgtaaaagcgttcctatttctccacatcctctctagcatctgttgtttcctgacttctcaataattgccattctaactggctcgagatagtatctcattgtggttttgatttgcatttctctgatgatcagtgatggtgagcttttcttcataggtttgttggctacataaatgtcttcttttgagaagtgtctgttcatatcctttgcccactttttgatggggtagtttgtctttttcctgtaaatttgtttaagttccttatggattctggatatgagacctttgtcagatgcatagtttgcaaatattttctcccattctgtaggctgcttgttcactctgatgatagtttcttttgctgtgcaaaagctctttagtttaattagatcccatttgtcaattttggcttctgttgccattgcttttggcatttttgtctctgcccatgcctatgccctgaatggtattgcctaggttttcttctagggtttttatagttttgggttttacatttaagtctttaatccatcttgagataatttttgtataaggtctaaggaaggggtccagtttcagttttttgcatataactagccagttttcccaggaccatttactgaatgggagatcattttcccattgcttgttttttgtcagatttgacgaagattagattgttgtagacatgtggtgttatttctgaggtctccgttctgctccattggtctgtatgtctgttttggtaccagtactgtgctgttttggttactgtagccttgtagtatagtttgaagtcaggtagca

SEQ ID NO: 316877 - DNA, 4001 bp, Homo sapiens
gctgcgtgcgtgaaaggtcctcctagcagtgctgagctgagtccctttcagaccccctcggtgcacctgccctgccggctcccctgagaatcacagctgcacagctgcggacagaagcggattcccatgtgcagtgggagtggggaaccacttttaaagaaagcaaagaggctgggcgcagtggctcatgccatgggaggcccaggcaggcggatcacaacgtcaggagttcgaaaccagcctggccaacatggtgaaacaccgtctctactaaaaatacaaaaattaactgggcatggcggtgcacacttgtaatcccagctactcgggaggctgagacaggagtattgcttgaacctggtaggcggaggttgcagtgagccgacatggcaccactgcacctcagcttgagtgacagagcaagactctgtcttaaaaaaaaaaaagagagaaaaggccggacgcggtggctcacgcctgtaatcccagcactttgggaggccgagacgggcggatcacgaggtcaggagatcgagaccatcctggctaacacggtgaaaccccgtctctattaaaaatacaaaaaattagccgggcgtggtggtgggcgcctgtggtcccagctactcgggaggctgaggcaggagaatggcgtgaacccgggaggcggagcttgcagtgagccgagatcgcgcccctgcactccagcctgggcgacagagcgagactccgtctcaaaaaaaaaaaaaaaaaaaaaaaagagacagagagagagagaaagcaagcaagcaaaaaacaacaacaacaacaacaaaacacccagcataaacgaggtaaaacagaacacccaaggtgctgcagccaggtgggccttaaaaaggagggctgtgtcctgggatccacggagacccttggagggagggggagggaggagactggagccagtgagctcctgagcaagctggagcagtggaggcagagctcgcccagccagaatcccaggctcacacagacaaaagcagttcagaggcaacagcgcccccagcggtagggggtgaaggtgaaatatccgactgggaatactggcggggagttctctaatcacagtggctgccacagcttttacttttccagcatttctttcttattcaagtcctgaatttccggccatggataccatccaagaagtcacaaggagcacacacccggagagccggctgcagggtggaaacaagaaaactgcgggcagctaagacggggccagaaggtcacgagggagttctgttttcctccacggttcgtgatctattattttcacatgtaacatgtacatgcttttacatgtatgtacatgtatgtatgcaataggtcatgcttttataattggtaaaaataattttgaatataaggaagcaactcttcactataaactgtaattacaagattatccaaaatattctgagacatacgtcatctctccaggaataaacggagcccctctccgtggatgagccggtggtagagctctgtgtggccgacccagaccaagaggtgtgggctcccgtgggtgtatggcttccgctggaggaaaaggatgacaaggatttgctgcaggaatgaacatgagcaaagaaatcacatttgctggaagggcttggatggctaagtggcttcacttttctgagcctgcttcctctttctttcattaaatatatttattaatttcacagtatactaattttgaaatatttttacagtgtgatgtttacactaggttaaaaataaaactgcatcttacttttagaaattcatggccagtcactaacttccttcccacatttgttacgggcattttgtgattttgtaatctgaagcaaggtgaattcttaccaggtatatttatcaatggctttctgcacatttcttgtaaaatgcgtaggtaaagaatctttgctcctcacagtaaaaccgtgccttctacgtccttctgacagtcctcttctggaaataaaataaaacatgacgagtctccctaatgtaataatatagttttattcattaagacttttaaaatttctcttttatacaaagttgctcctctcgttctgccacatccctccaaacccacctgtgcatgagcgcacacacacacacacacacacacacacacacaccccatcctgatgaaactgagacttaggatgtcatcatttttctttttcttaaaatcaaggttgccattaacctatatgtacctttatgtgaactgaagacaacatcaactttttgtgactcagccagagaaggaaaagttgccccaaacagttcacagtatttcagggatttcaggtcccagttgtcccttgaccagggacaagggacttacttacaaaacccaaccactcctccagtaaaaaaatcattaatcccatattaattaagaaacatcaaattctttagactcagaagccacacagacacctaacttgctttaatctagcattgctgtttgtgggtatactgagttttcaagagttagaagatattaaaatttaatgaagaactaaaacagaagaaatatctagatgttaaataaactattaagcctaactggtgtagcacagttcctgttaatcattgaaatgtcctttcaatgaaccgcttaaaacatttacttcctctagtcaaaatatcttcctgatgtttaataatcaacaacttctgttcttcaatagaaatcttattttcccttacaaataaaacatatattaacataagatatggtcatgaatcaggaaaaacttcaactttcaatatttctagttagaacaccactctaaaatgcatttttaaaaagtttgcttttgctttcgattataaggctacctaattgatctcagctcactgcaacctccacctcctaggttcaagtaattctcctgcctcagcctcctgagtagctgggattacaggcgcctgccaccacgcccagctaatttttgtatttttagtagagacagggtttcaccatgttagccaggctggtctcgaactcctaacctcaagtgatctacccgcttcggcctcccaaagtgctgggattacaggcatgagccaccacacccagccaacaaagagaatttttaaaacaaagtaattaccatgtacagattggcgagaacatctaccttccatagatacgtctcatgcaagagagaataatagaattatatgattgtttttattctctttgttgcttaggtatcttacggacaaccaggtaactctgaggataaagatgttaaagaaagggccccagagaaaagaataaaggacacgctttatgctgacaaactgctttacctttagccctcttcagttgctttcaagccattaattatttcttgtttacatgtgactcagtaactttttaggtaaacatacaaatactaatgacataaaataacaactaaaagttacatcaaatagatttgttttgaacactaagaaaaacatactggtataggagttaatatatgactgagaaataattttaaaactcagcatgatgaattagctaaaacattgttcttttgtgatacatatctacagaataataatggggggttcaaatttgctctgccactgaggctttaagcaagttaacttttcctctcctgaattcagtgtccacatctgtagataaagtatatgaagtgtcagtcagtgctacataaatcgggtttacctgctcactgctattattattgttatgttattattattacttgacacagggtcttgctttgctccacaggctagagtgcagtggcaggatcacagctcactgtaagctcgacctccaggcctcaagttatcctcccaccttcagcctctctagtagctgggactacaggtgtctaccaccatgcttggctaactttttaatgttttgtagagatggggtctcactatattgcccaagctggtcttgaactctt

SEQ ID NO: 316878 - DNA, 4001 bp, Homo sapiens
ctctgaatgtttatgcctgaaacataggattacatcgtgacctgacatgaaaatattccccagattcaagacactattggataacgttttactcgttaaaaagtcacagctcttctttgggcagctgatattcccccaaatggttttcaccgccaaacggagcatctgctctgctcaagacggtctatcctgcttctagctcctcctcctgcttttgtgcaactttgaagccaaattcaaaatgggacgcatgcgagtttgtttcaatgaataatttattcctctaggaaattcactctttttcaggggaaagggtggaagctcttttcaaattaaggagaaaattatttacaaaacggaggaactcatctctcttcacatcacaccacatcctttccaggaccaggcttcccactgtcttggacgcagagctgagcccaggaggtcttgggatgcagggcagggggaaatgggaagttgggtaacagtcacaccaattattacgaattaggtgccttaaaactcccctactccatgccatttctccctcttttttcctctctgaccttcccctctgtatctccttttaagcaatttcttgagcttcagagttcagtgtaataacatacaaacttgaccacacaattcacaaaaaaacgaggtgaacaggaatttaagtccgtaactcaatgattgcccaagagcacaaagaagatagggacagagtttcttcgaggaaccaggccactgacctgcctgtctctccagtggcacaagttactaacatcatgaattaacagcagagcctacaaaatccctttcttgtctttttctttttttttttctctttcacatcttgttttggttctttggtttctctgttctctaaccaaggattggttactggtccctcatgcataatgttgaacctctttaatcccctataaactatggactagttctgtatcctacacagtctaagaaagtgtacacaacttacaggatgcatcccacaggtattttaaaacttgaatatggtggcatgtccatgaagcttctaaacatagacatgcaagttctatactagttcctgtccatactgtttaaatagagcaaggctgttgatttggggacaggtcttcgtagggtggactgaagtgcagtcactaaactagactgcactcatttgttggcgcatggaggttaagggtgagttccaatctccatgactccattccagctgtcaggaaaatcatcatccagagttactgttttaggttgcttcttgacagcccacaaacctctgccacactgctttgtagaaattctaatgtcagtgacagcagctttcaaaattttctattcctagttgacaggactgtctgacataagcactgtactctgaacgggttaaaatgcaggctggttttctggatggggggacacacaggggcactccagggtggccatgggaagccgctcctcagcacggaacactcacaccgccctgacccaacaccagcaagtcccaggagcgaccgcagtgacgaaggagtccctttggcggcgaacgcttccccgcgtgagccatgcccggggccggcctgacgcttcccgagtgcctgcagggaagcccgggccagacgcagccggcccgcgggcggagaacaccgcgcacatcgcctgcagagcggccagaaggcgagccctgctgccggatgagactcacccgattacgatcagccccgggcctgtgctcgcagcccccgcgccaggctccgcgctaggctcgggcaccgtcaggcagaggcaccgcgcgcgggccccacgcagacagccggtcacgcgcccccgcggccccggggctggggctccccacccgcccgcgcccgcgcccgcgcccgcgcccgcgcccgccgcgcggctggcccagctcaggcggcccgggcgcgcccggggtccgcggggctcgcacgccccttccctctccagatcctccgccccgcccgcgccggcgccgcctcccctcctcctccctgcgctgcgccctcgcccgccagctaatcccggctgcgcccgcccatccccgctccgggccccggccccggccccggccccgcgccgacctccgggaaagcgcgccttccccgctccctgccgggccgggtttccaacccagcggccactcctccgcgcacggcccggcctccctactccttcccgggtctctggggccgggggctgtgcatactggtgctggctgcccttctctcttccaaatcggattttaattcaccagaagaaggcagagaaccacaggaccatctcgcctatccccgccccatcaaagggtgcgcacaccaggctggggtggggagtggacgaatgaggtttaaaaaatgaagccccggatctggtcaatgcgagaaccattactccatcaacaggaacgctagatctaagcatgcatactaaagacgtggacccttccacgcccgtcctgccctaccggctcacacaagccggtgcatctcctgcacaccccgagcatgcctgccgcttgcgttaccatgtgctcgtttcagttttggaggcccaggattataccaggagcagagcagctggacgctctcctgtgagctggtgaaactgccaagccgtcattttcacatgctaagggaagaaggggtgaggtcgcggaggtgaactacatttttgagtctcagagggtgggcactgcacgaggcatgcctttcccacgacagggattttagtaatgacagttagtgcactgggtgccggtacaacactcatccccgtcctgccgtagccagtctcttttgagagctgaggccatctaagtttcaacaggtacaatttctcctgccaagtatcccgtatttacagaggtaaaccatgtatttccgagtttttactaaaaagcccagtttatttctgatgcaccaccctagcacggtgacaagaaatcactaccaataacaaaaacagtagtccagccagggtggctcacgcctgtaatcccagcactttggaaggctgaggtgggcggatcacttgagatcaggagttcaagaccagcctggccaacatggtgaaaccccagtctctactaaaaatacaaaaattagctgggtgtggtggtgcgtgcctgtaattccagctactcaggaggctgaggcatgagaatcacttcaacctgggaggcggagatcgccccacccactccaggctgggcgacagagggagactctgtctcaaaaaaacaaacacaaacaaaacagtaatccattgttgaactaagaacactggaatcctccccacttttataaaagtggtaagtggttataaattataaaattaatgagattttaaatcctgatacatgtatatgtgtatatgtgtgatgtgtgtgtatgtgtatacatatctatcaggaaaactatggtatcttaagcccacacagacttgctgatattatttatattgccaggggtgggaggatgggcatgccagggaaacaaaagaaaggagtctggtgtgatggctcccacctgtaaccgcagtgttttgagaggccaagatgggaggatcactagagcccaggagttcaagaccagcctgggcaagacagcaagactcttgtctcaaaaaaaaaaaaaaaaaaaaaaaaagtaaaaatcgaacacaaagtcatttaagatccaaacatatgctagctgcttttacttttatatatattattttacatatattcttacatatatttaacacccatagtaggtagacactattattacaattttgttgataaaaatactgatgtcagagaccttaagtaacatgttcgaggtcacacagctaggatgtatatgtgtgaatgtgtcccagatatctattaccccataacaaaccaccccaaatgtagattaaatcaacagtcatgttgttatgctcataatccacagaactcaggaattgcg

SEQ ID NO: 316879 - DNA, 4001 bp, Homo sapiens
ttatctatcaagttcctattaaagaaagaacttagcagagaaagtattttgaaccaatcttgggaggcagagtacagaactgtccagcaatgcatcactctgactatgtaaaaataaaacactccttttatttctagtcttcaagtcctccattaaaagtcctacacaatgtctttatatgagagccaagaaaaaaggtagctgggcagttggacctaaatttttagaccactctcaatcactctctgaatccacttcagtgatgtccagtttctctgcccctttccagccaccctacacagtttaatcctgttccttgtcctacaggacaaatgataaataggaccccaaacttaatttatttcaagacaggcatggacataattcttatgagctctgcggaaagggattaactggaactaaaaagatatcaacctttaattatgcgaaaagttacctaaagccaacaagtatactgtattaaagagtaaatttatggactaaatatcctgctcaatttcggtccaaagaagacctttgaagttctccaaacgtggacttcagctgtggttcactacatgtggacagcttcggggacagcatcctgcctagtgccaggtgtacaagtgaacttgaggtcaggcaggtgaccctgacaagcaggcataatacattaaggagaggaaatcttccctctcattaatcaacaggataaaggtaattaagcaggaattatttttcaatgacctatataatttcatcagggctgctatgactattagcagggagcagctgacttcctaatgagatgaatttgatagcacagcccttccagagaagccaagggagcaagcccaatctatagggaagcaacaattgttaggcattgtttactcctcctcctgaaagctgtctctccttctcaacatttggctctttcccttcaggggggtttccctgtccctggatagctggggctgcagcatctgctgaatagtggaagctagatctgctgtgaatgggtgggtccaggaggctgggacactaattcactagacctgctcatgtgattcccaaagtcccaagccaacaaggctaccgccgcctgcaccaacacctcgctctgaccaggcctgaaataagacaccaaggtagttcttcccactccctagcagaagcggagttaacaagggacctttgttgagccagaggaaacacaaacacatacacactatcaataataaccacgacttgaacgcagtttcatcacagaatttacgaaattgagcaacagctacctaaccagtaagtccttacaccaggaaagggctgcaaacctcagaggggcaccgcctctgtctcctgtgtaagcaagttgatttacaggggaaacctgaactccacatctctttgccttttcctgtgcctcccagaggaccctgggaccaaggaatgggatggagggccctaatgacatattccttcgtcaaaacaagctggctctctctctcccagggtcagtcaccgcgttacgccccgtcccggagcccgaaaccctagaagtcacctcctcccccctgcgcccccgcccgacgcagcgacctcgtttggaacatccccagccggcccccagcccaatgcctgctccctcagcccaatgcccgcaccccctgcccagttggcggatgcagagaagggacatttcgactctccctcctccttcaaccctctaaaataaaagaatccctcaagcgcaaatctccggccagcacagcacctacctgtccccggccgtggctcctcctccccgagcagtggggctcgctggacaagtgtcctcagatagtccagaaagtttgctctgcggtcccggggacgcctgcgcgggacccagtgaggaaagccgggctggctcctcgcacctcgggcggccgccgctcgaaagtcttggcccaggtcctccaggcccggctcaaactcaggagtgcccgggaagaatgtaggtcgtgagaaggtcggagcgcaacttttcgaaggtgcgtcagccgcgggctgaggcgcgtgggtcactgcctccccccagcctctccctagtgagcgcggggggggcgggggcgggggcgggggccggggcggggcaggggcgggggtggggcccaacctgcctggaggcctcggggagcgcgccccggccccgcccccgccgccgccggccccgcctctgccgctgggacacgccgccgccaggtgcgccggggacttaggcagtgccgcgccgcacggcccgcgccggtttccaaggtgaaggaggaggagcctctgagggaaagtttccacagaaacttgagctgggcgcagtgtagcactcgcgcccttgggggctagcgtttggccggagctacacactctttactcacgcacgcacaccgccgtacacagcacaatcgttcaccgtcccgccaaaggctcgtctctcgggttctgcctagtggaaggagtcggacaacgccgcacgtcacgggcgtttcggatttcttgcttcccaaaggtttgacggcggccaccggcgccccggcccagctctgctttcctttgctgactccttcctttaggtgtgaattttaaaatgctgataccgccccaagagagctgagtcaagtgaggcaaacgttcgcctgttgttctcctgacagactccctgcagtgggcaggggaaatgtggccttggccgacattaatgaagtgccaggatggagggagggggcctgctgatttgttctgttttactttttaagggtaactagagcgttactggagtcgtctgtgggtttggggagtatgtggcgcgtgtgtgtgtcacacatttcactggcaactcccgccaaccccttcccaagaaatgaaggctctaatgtgggcagttctgcaacaaaggtgaaacttccccaaatcacgattccccgcaagatgagagagcaggtgcagcatccattttcccactatcacgcttgagatggtggctttgggcactgccgggtgccccgacatccttcccagagcccagccttcccacccaggcccggccctgcgcggccgcctgcctttgcatcagagaccgcggctgtgccattgccaaggtgggcagcgccgcctcgcttccccattcctccgtctcccacgcctcttgcgtgtttgagtcgcgaagtgatggactttaaatctcagaggaggaatgagaaacttggttagtggctctcttggcatgttcgtagccctgtggttgaagtggctgaaacctgcgttgagcctcagtccaagcagctggggccacaccagtttgcaaaagcggatgtggcagtttccaccgcagcagcagcctgctggcgcctcatcagattctcctttggaggaagtatcttcttcccttcattctcggtgaatggcatccagagataaccaaaatcaggtgtatctagtttcaagttctgtcttgcaaccgtgataattggaggatgcaaactttacactttcttctctagctgtctaccaccactgctgcgcttgtggatgactgcaggaacaccgggtacttgccacaagtatctctccagattcatcagcctttcacctgtgacaagctcagtcaagaagtggctcctaagtaaaagctggggaagaacaaggaagatagagctcagagtagaaagctgtgaagttctgcacaacaggtccccttggcctgctctaacagttggaaggtgggggaagcattcatttactcaacaaatatatactgagtgccttttgcatgctaggcacgcttctaggggttgaggacacagcagagagcacaaacaacaattccagccctcgtggagcttacctcttccacgtgggaaagacagatggtaaatgtataaggacaatatatggactgctgtatgattagaaatgctatggagaggctaggagtgctgtctcatgcctgtaatcccgcagtt

SEQ ID NO: 316880 - DNA, 4001 bp, Homo sapiens
aaaggagtgctgtgagcccgattcttttaaaactacttgtattctgccaccccagtggtaatttatctgagttttggggaattcaatttctctaggcacacttaaagacccaatgtgcttgacaatgaagattttatatcttttttttttttttttttgagaagaggtctagctctgtcatcacccaggctggagtgcagcggtgcaatcactactcactgcagctttgacctcccaggctcaaacaatcctgctgcctcagccttccaagtagctgggtctacaggcacgtgccaccacgccgggctaatttttaaaatttttttgtagacatgaggtctccttatgttgcccacgctggtcttgaactcctgggctcaaatgatcctcctgcctccgcgtcccaaagtgctgtgattacagaaatattttatattctttataattaataatgcttttttcccctaaaagtaaaaaaggattatttccataatgtgagtctttactggaatcacgcggggggatatccagaatctagtgttcttgattttgatactcaaaagacgaactcagggaagggaagcaggggggcaatgcaagtgcaactagccagaaaaaccaccctttaaagacttcaggaaaaagatctgagaaacaggggcctccctagcactcaggtacttcccaagggctaatcgtttaagctaccgaggatttacggtcccactctatctacactacaggtattccaaaataatttccacagctacacatatattttaaatggtcatatatttgttctttattaggtattactttgtaaggttatctgaaattgtatacataaaacataccaattccaacctttattaggattgtgccaaagagcaattttgtaatgtttagattttgtagagaccgggtctcactacgttgtccccgatggtctcgaactcgtgggctcaggtgattcacccgcctcggcttcccaaagggctggaattacaggcgtgagccaccgcgcccgacctatattaaggcaattttgagtaaaatagacgttatatcttaaaatgaacttagcagaaattactaggcattgttcagcagggtattctccgaactgtaccacacagcagggaagtgtatttcagatgcttagactttctttctgcaagttactgaaagtgctacaggacattaactacttccgagctcaacgttttacagcgtttctttaatttcatagaacttttagaaaataggcaacgtacttttaaaaactgttttaacaaatttaataacgcaaataaaaagatatctgatataccagattaagctgttccatccactaagatttgccactggacgcaacatctatttttattcccttaccatcctaccatcgcaacaaacacgcacagacgctgctctgcatgaaaaagtccgcctggttttgcaaacgcctgtcgggcgtcgcgagaaacggaaagtttaccgcaggctccgcagagcagcggaaagacgctccgtgaactttccatcttttcacgcccaagtttccacagctacaggggcgccgaggaaagatgggagcgtgtgggacacttgggtcggaaaagggaaataacggaggatagcagagggagggctaatgctggagaagacttcgtgggcacgaggcacctcagggaccgctgagggggagagaaggcagagccgcgaccgcagggaggaggcgcggcggcgtcgggggagcgggcggggaccggagcaacagcggggaggcaggccgcgcgcagggctcttcccaggcgacgccggaccccgccccgtccctcggctcaccgtgtccgagtccgtgttgaggtgctggaaagcgagtgcgccgagcacaaagcccgagagcaccgccgacgtactctccccctccatgctaccgccgcctcaggctacacaagaggacgagggcggggcgcgcggaggcaagaccctgtggtggcagcgaggcggggcccagcgaggaggcggggcctgcgccggcgcacgggctgctgcgcgctccgcagaggggcggggcgagggggctgagggcgggcgcgggcgggtccccagccgcgcgctcggctcctccttcgcttctgctgccggcctctcccggaaggccgctgcatgtcggtaccactgcagagggctgcgaattgcttttggtggcctgcgcctgctgagcgacctgtcacaaacatgcaaagctatcaaaatgaacacggttgacagggtcattttaagacaagcaatgattacaagaataaaagagttgagtagcaacattacgatgccacagtggatatgccacggttttggttttcaagctgcattttagcacccttcactcactgaaacttacagaatactaataaccatttggggattgtctttgctagaactctctagccatgttctgtgtctgtgtgtttgtgtgtgtgcatgtgtgtgttcccttgcttttagaaaacttcagcctaatttaaacaatacatggatatttaatgttctgacagtttaatgataggcataatcatagtaagctggttcatttaatgtaaatggtaaggtgagtggaccagggcttggcaaatgtattttacacacacacacacacacacacacacgtaaaggtatgtttcttaaatgactgaaagtaagcataatagcagactactgaattagtgtggcacatttgtgggttttgttgtcaagcagttgtctgtggctgcgtaacacacaatacatatgtatataattaatgattatatatttattccctagaattaagtttcttgccttcattttgtaggggtgaagggaaagctctgccctctgaaggttcactggagtgaactaacaaaagaaaagatgaacagaaggaaaagggatacgaatttattttattttttatttttttgagactgagtctcgcttggtcacccaggccagagtgcagtggcaccatctcagctcactgcagcctccacttcccgggttcaagcgattcttctgcctcagcctcctgagtagctgggattacaggcacgtgccaccaagcccggcttatttatttattttttttgtatttttattagagacaaggtttcaccatgttggccaggctggtttcgaactcctgacctcgggtgatctgcccccttcggcctcccaaagtgctgggattacaggcgctcccgactggcatacaaatttattaatgtgccctggagaaaatcacagtagagtgattacccaataatccaatgaggttcagatgcttatgtacactttttcataagggagagggagatggaggaatgtaagtaattttgaggatcacaattgattctttggatgagcttgagggattgcttgcaaagaattctttgtggaagttggatgagcccaaacagcagtcaataacttagtacaaagttcctctgggctctagatttgatgtttgactttcagtcttctttccacagtcagtagataatgaaatttcaatgaaggggtggaagacaattgtcgtagggttgataaagagtggacagtcgtgcaggagtatgattacacaaagggagtatgatgtaatggtaacaaactgggggaacttagaatgggctgtttgttcaggttcttctctgtgtcctggtgtcttcagaggtaaggatattccttttctctatgtaaagggagggtacctctcaaatgatggtcttatgacctacttcagggaaggacaccgggttttatggcctgcctcaagggagatggccagagtattctttctatggtttatggcctgcttcagggcaaaaggagtgaggggaaggtgcaaatgacctctttgctctgctattttctcaaatgctcaggtgctatattttggagtagtgtgtcctgaaccacatcactagttttacttcctgcaacccagagcagcacagtag

SEQ ID NO: 316881 - DNA, 4001 bp, Homo sapiens
tgccataaatattaatgagtggaatgattgctattttatattgaaatgatctgtttatgtgtttgtcataccacaagggcaagaccatatcttactaattgttatgccatcaacattcagcatagcagctggcacatagtaggaattccataagtccacactgaattcaaggatcatctcttccataaaatctcccctcactgttcctcccatactgatttgtcctttgtttctacttctatagcactcgtaattggaaacacccaatttagcacccaagacatagtatagtcttctagctttcactcaatatttcaaatcttgtttctttaaaactattttagattctttgaagatagagaagatgccttgcactgtgccaagtgccttttcaggtacttgaataaatacatgttttggttgatgtcactatttacatgaatgtaggttagatcaatagtaccagctatacatgtcaagaacgctaagggctatctccagtctcttttttcattccttgaccaaagagagccctgtttggagacaggctcacgtgcaaagaatgtgaagttaatgagacaggtgggagaaggcggctagtgttcaattccaagcccctgtgctctattcctcctggcaaaatagtgaggttggcgggacagggggaggggaatgtctgtgatcccacaaaaaaatgtgtgggaagtgagagggagatggtgaggaaagagagcatgttccagacgctacaggacagacctggacctgacctctccctggcgggcatggcaccaggagtttattatgagaccgaaaggaaaccccaaggcaaacagctaaattcatccacttgaaaccttgtataggagacagtgagggatgttgttttccatctagacaaggcacagaggggagtctgtgacaaggagcttctaattggggagctgcagagggttaacaaagagcactggtggcatctttttgctggtcttcttgaaaaagacatagtctgggaaggttcaatcagagccccctgcacgaggtaaggaggtgggctggctgacttccctaggtccttcctaatcccatagttatttggtgaatcgtgctcttccccatttatgctcctacacacgtctgcacccagtttgatagtaagtcccctaggctgcattccaggtttagtacggtgccacgcaagctgctggcactcaacaaatgacgcaaatatttgttgaatgaaggaataaatggatcaagtgtttaaatagagcccacatgacctccccagctgtaaagtatggcagttgaatgaaatcacaacattctaggcacttgagcaaagctggcggggacacacacacacacacgattcacattcccaccttggaaaagcacagaccacctgcccagccagcaggctgtgggagtttccttggcaaggatcctctttctctgctgctttaggatggtgcctctagaaggtcaagtcacccagatttaggaccgcttcccttcccggttggcctccgagacaaagtttctgtctggatttggcccgggcctcccgggaggcgcatccgcactgactcccggctcgggcgccccgggcgtgcagctcgctggcccgctgcgccccaccttaccttggtgagctgggcgatcttcttgcacattttcacgtgcatctggggatcacagtccattctccagccggcgccaccgtcggctttggagccctggcaagtgccgggcgggttaattttgctgttgagagcagaagccatcgctaaaacgcgcccagcactcagactctctcgttttctccctgcccaccgtgtgcacgtgcgtgcgcgcgcgggcgtgcgagcgtgtgggtttctcgggagaggtggcactgcagtcccgtcgcctgcaccgccgcgtggccccagcttcccgaaggtctccgcctcccgggcccacccgcgcgcccaccctttttcctctcctgctggttctctggctggctggctccgcgggcacccgcaccctgcggcgaggcgtcggcgccccgcacgtgccgctggcgatcagtctgcagttccccagccagtgcaggtttcgtgtgcaaggggagagcttccgcggctaggagctgccggccttggggggtttgcggtgggcgggcactgcgctcttggacacgtgggtggcgcgcggccctggacttggtggcgacggaccctgcccgaggtggggatcccaggctaaagaggaagaagagcctccggagagggacagggcacagtgactggcggcctccggagagggacagggcacagtgactggcggctcccgagtctccgagctgatagcggagatggcggtgggggacgagatgctaagagaggggcgggtaggtgagggcgagccatcgggactcaaggaggtgtgggatccggggcgcacggtgtgggccagcgcctgagttgcgcgagtgcacagcggggctggggatggtagccttcctttttggatcttggagaggagccaggacattgcgggaggaataccggagatgcccaaagaggagaagccaaggggatggcagggtgcgggtgaccgaaatctgagatgagaaagtgcgaaacgggtaatgcgggaagcggtaggaacgcaaagacaaagtcgttagggaggtagaaaggatggtggcaggtgcgggaaaggaagaagcaaagaggaatggagcagttagatgagtaaaagatggaactgaaaatcttagcaaaccgagcccattgaaagtaaagtgagtcgtccaaatccacactactggccttgggcagactggagccagactgtcaagttttcggattctgagctggtgtctgtttagtgtttggtgaggggagaggttagcgggccaaatttctttctggcgtgttctctggtttcagacagtggactttaagggaaagtgacagcaccgtgatcagcttttcctaaagctcgaataataggtcttcatgatagtttgcatagtgaatgtatatcatttatacattgccttttatcagaaattttaataatcttcataaaccaagcaagcttcaaagggtctcagaaaccacagttccacccatccatactgaaggtaacaaaacccatttttgtcgatgaggaaaattgacccagaaaatttgtaccaagtcaggcaattacaagtagaactgtttctgaaatagacattcctattctagattctgtatcaaatgaccggcctcggtttttgatttctaatttaccatcttaagttctctttttagcacaacccctccctcccccagttcctttagaaaacagagacaaagcctctgaggatgggggtcagggggtcaggaatccacattaaacagctctctgcttaattccaaattgtgtatttagaatattttctgcaggatcttaatatatactaaattttacaggaattcaaccactgtgtaaactagaggaaaattagcctttttggtcaagaactttactaaaagttgttgaccattttggaaaatcacatcaagggccaggtggctcatgatatttggttgccaatacaacacacttatttatttattttttttatttttttgagacagagttttgctctgtcacccaggctggagtgcagtggcatgatctcggcttactgcaacttctacttcctgagtttaagccattcttgtgcctcagcctccagagtagctgggataacaggcatgcaccaccacgcccgactaatttttgcatttttagtagagatggggtttctccatgttggccaagttggtctcaaattcctggccttgagtgatcctcccacctaggcctcccaaagtactggaattacaggtgtgagccaccgtgcctggccacaacacacttctaactgccatattgatggtgagtctacctatgcaagcatctgattactacactgtgtccctcagtatcaacag

SEQ ID NO: 316882 - DNA, 4001 bp, Homo sapiens
tcacgcctgtaatcccagcactttgggaggtcaaggcaggtggattatgttagagaccaacctgaccaacatggtgaaaccccatctctattaaaaatacaaaaattagccgggcacagtggtgggcacctgtaatcccagctactctggaggctgagacataagaacagcttgaatgcgggaggcaggggttgcagtgagccaagatcacgccattggactacagcctggctgacagagcaagactccatctcaaaaaaaaaaaaaaaaaaagttacatcaaactataaggaagaataaaaattatggccacctcaaattctgtgtggttactgagcataaggtatctgctgaagaacggctgcggcatcatgagaaacagccacacggccaggcacgcctcagctgtcttggcctcatgaaccacaggcacatacacaagctacccaacctcacagagcccccattttttcacttcataaatgggctaactcggcctttctccttgggttgataaaggcaagagtgcttgtaaaagtactctgcatcatccctggcacagggggactcaaaaaggaaggtattattatcagtcttcacacaaacaagtgacagaaacatttcttgtgtaattatacaggcaatagcgtttcatcaaaatcagaaaaattcaagacgtttgacctagggggctcacttttgccagttcatctgctgcagtcttgacaggcaccaaaggctaagcaaacccagctgagcactgtaaggaaagcccatcctgaaaggagtggctccaagtgcagcagggagggcaggggtttgcatggggccacaacaggaaagggcagtatgtacctatccacgagctccttcactccctccttgtcaggcaccagagactggtcctggtcatctgccagcggggttcctgcctggcggtagatgcagcgcaccgtgtagcgcacttctgaccagtagttctgcagctgctgaggttcccggtccgcctctgccgaaatttctctgtgagacaacacaggaaggttagaaagtcaccacaatctgctgcccttcctcacctagcacactgtcctcagaggacctcccaggctcttgcaccttgcccagctcccaggagccggcaatcaggctgctgtcagtgcaggggggtgatggcatccccagcacagctcctagggtgcactctgcgtaagatcttagccactgcacagatgacaggagcatctgtggctaatgtccacaattagggtacccacatccccactgctgacctggccttcacctccaaggtacttaatgggcagctttgcccccaccctttggcccccacttggctacatgcattccttcctgagccagagcacagagcatttttagatgtgctcctgggctgggcatggtggctcatgcctgtaatcccagcactctgggaggtgaagacgggctaatcgtttgagtccaggagtttgagaccagcctgggcaacatggcgaagccccatctctataaaatatacaaaaattagcccgacatggtggtgcgcgcctgtagtcccagataccgggactgaggtgggaggatcacttgagcctggaaggcggaggttgtggtgagcggagatcacgccactgccctccggcctgggggacagagccagaccctgtctcaaaaaaaaaaaaaaaaaaaaaaaaagatgagctccagggctctcccctcagccactgagaagcagccagtcaggctctcccccatcgctcctctcattcactgaggctgctcttagattctgattatttaaggactccttctcttgttctgaggatgcttcctagtgccagttcctcaagagcaacagtttttgtcttactcatatggttctttctctcaatagcgaagcaactgccttactcttgttgctgtctgtcacattagcccagtttctccgtccagctccaatatgcaggtctgcatgtcattgtggacaggtgtgagcaacgtggcacacacgtcacatacctgcgctcactgcaggcctcgcacgagcatgcggtgtctgaaggcagcgtctgtgcacccagagcgagcctcccaccactgccggcctctggctgggagccaccaagcgaggagtgaagaagaaaatcttggctctgttttaaaaagagaacagaatagaccagttatgttaaaatgttcacggcatcaattttttattaactgttcaggaaaaatgccttttaaaaaactgtaaaacctaaacattgaaaagaaactatcttggccagatacagtggctcacacttgtaatctcagcactttgggagtctgaggtgggtggatcgctgggcaacatggtgaaacaccactgctacaagaaatacaaaaaataggccgggcgtgttggtgcccgcctgtagtcccagctacccaggaggctgaggtgacaggatcacttgagcctgggaagttgaggctatagtcagccgtgatcatgccccactgcactcctgtctgggtgacagagacattgtcacacagacacacacatacatacaaaaaggaaacaattcggctgggcatggcggttcacgcctgtaatcccaccattttgggaagccgagatgggaggaccacttgagcccagacgtttgagaccagcctgggtaacacagcaagacctcatctctatataaatttttttaaaaagtttaaaaattaatttatattaaatttaaaaaggaacagttttactcccactgtcctaatcagcacacacaatgaccacctcagtgggcacctctggaaagtgatatgcccacggttgcctgagacagcacatggtagaaacctagtggcctctctgagccttgcatcaagcagccggggcagaggcctctccgtcctggggaatcccatagcctgcactgcctgctctgaggaacaaggaggcttaagaaagagaacacttggccgggggcagtggctcacgcctataatcccagcactttgggaggccgaggcaggcggatcacctgaggtcaggagttcaagaccagcctgacccacacggtgaaatccgtctcttctaaatacacaaaaattagccaggcatggtggggcacgcctgtaatctcaactactcgggaggctgaggttgcagtgagccgagatcgcgccaccgcactccagcctgagaaacagaccgagactttgtctcaaaaaaaaaaagagagagagaacattgggcaaagaccttcctatgtcccacgccaaaaggatttcaccaacaacaactagagaacacaacacaaccctaggttcctcctcccgctcagttacccttccatcggcaccaaggctccttctagaagaggccctgagaaggactctgctccttgggaacaggggctcagggctcaggtctcagagctgagggtgcccacagggtgatgcagggtgctagagagccttccccaggctcatgacaggggctgccagctccataatcattgcatccccctgacccccacagcatgaggaaaagaaatacagtcacaagagagacttccagaaaggaattcacctaagtcttgagtattgcactattcccactctggtccccacaaggaaaagtgtgctctcctcaccaacccctcccccagtcaagcatgaagccactgagacaagcccccagagagacgggtggtggcctgtggcaaggagcctggggctcaccctgggctggacttggcaaggtctgttcagatgcttgcactaccccagtctgctgctgagccaagcacaaggaaactcccaagggcctgtggcaggtgctgtggagttgggtcacacagacactggtgcaggccttgcaggtaagaccctgcagcagaaaagcctgagcgttgctaagtgggcagaggattaagacagcaggggaccggccaggcgcggtggctcacgcctgtaatcccagcact

SEQ ID NO: 316883 - DNA, 4001 bp, Homo sapiens
tgtacaccacattgggctgcagagtggacccattgccctgggactctggaggggccagggtaccatccaggggtatctcagggaaggatggctcggcggtgtcgcggctgcgatgtggccccttctcagccgcctgtccatgctggagagaggccctccccacctggctcaccaggaagcccaagtagatggcacacgcagtgcccagcagaaggtttctccgggtccttggacgccggctgctccagagcttacgcacccgcgggacgcacagggagcagatgaaccagtttatgagctgccccggcttgtctggacaggtcatttctctgccgcatccacatgttgaacggagtttaaagtctgcagttggctcctgctaatgtgatgcatggtttcctgacttcagctgccgcgtccgcttcgggatataagtggtctccagtgggcagaggtggaaggaaagggttggtgatgaagctgggaatgtttctgacacaacaaaccttttaaattatcagtctccccaaggagaaatgcggcttgtttctgggaatgaatggatacagagttaactgagtcacaatttcaaaccatttaagttcctctacaagagtcaagaaaaaaagtaatcatttcctttcataaatatcaccactaaatgtttttaaaaataaaatttaaaagcatgcaaacgagatagatgtatagatttgatagtcacttgaaagtagtgaaaacaagccacaaaaatccaagagtgttttataacttgtacctagagtcatttaagttgactctgaagcaaaagcgttaaaatgtgacaaacctgggcttttcctttttgaaattcagaaagaacttaagacaagtaatagataattttttaatactctatacctataccatttttattttttaaagtcctgaattaactaagtacaagcagcaagtattaacaataaaatttagaaacatattctcttagtctaaaggtacaaattgtacttcatattaataatatgttccattagcttacattgttagtataatacaaagccataaatgtccatatatcttggaagcagttgcatttattctgtttctctctctctctctctttctctctctctcacacacatacacacacacaacacaacacaactctgactgctttttatttcttttctttccaccgaagtcagctgaaagaaaataaaagcatctctagttctgttttttcactattaaaaagaaaaagaagaaactcgtaagcaaccttacttacacagctggccccatgcttggctccaggaagaatgtaatccttgactctaatgcaaagaacttttaaaggctgaggcatgtaagtagaacatatttcatggtcaagagtgttccacatttcaaacatttcagttcagctttaaaagctcccttgaaaactactgattgcaaagcaaaacttggaaactgactgctgcatggttttaagagatacaaagcttttaaaaacaatagttaacaaaataaactttaattttaaattcggaaaaaagaaatgccgtagagaatcagttttcattcaaataaatttccacttatttttaacccctgggagccctctagtgtcctgttcgcaaacagactcagaaatgtcagtctcatgaagttcaaaagatcgagaatgtttgctatcttggtggagcagccgcagccaagcaagtaacttgtaaaatgaggaatgccatcacccctcgagtgtccatcccacataacttggggttagagcacaagcgttcccaggaactactcaccttaccatcttggccgtttcatttgtcttccaccagttctggaaagagaaggcctagaagttcagaaaaaaaggtaagaaagagttaatataaatgaggagaaaaaatagaacagtgagataagagtacacacagataaggaaagacatttatagtgtgcaattgcacggtgcaacagttcacaaaaggaagtcgtggattctctctgattggaggttttttgaaaaaacaggttagggattggcctgggtggtttgcgtgtcctagcacaaaggcaggggctgatgaccttggggtgtcaattagactatggcaaatagaatcaaaaggcaagaagacagaaaggggacagggatttttcctccccacagagaaagaaagttgtgatactgaagagtgggtaaaagattagcatatggtgtataatcctaaaaatactatattttacaatgcaaaaagagcaaggagttggaatatatagggaaggagagaataaacgtccaagtggtaaattgacaaaaattataatcgggctgttatttcagcactctaaactcagtccttttttcctctttaaaagtcctgccacatggaggaatgagaaggagcaatcccaatattgacagtagcctggaagtacctggatattttggctaaactttgtgagaattcaggcatcaaaacaattttatctgcactcaaaaactcttaggcacacacttccatacacacagaattattttcttgatagaaaatgtgaacttcttgcaaggaaaccataccaaagctgcattttataaccatcttattatttccacagtcaaaggaataactgacctggctctataacaattaaaagtaagcctttggcagaggccagttataataagcagacatctcctctagctgtttttagagctatttttttcatggagaaatgcctacgagatagggagagttgtgtgagttagtaaatttcgttgactaccttcccacccccactccaaaaatgtctcctagaaaaagaacaatacactgtcccctgctatagccacaatagggattcgtggaggctacactatctactctgaactatgatattcagagaatgggctgaagagggaggcagactggctttaaattctcctcatttacctcttacgtgtggtcccctgtggcaagtaatcttacctctctaagcctcagtttcccccatgtgtaagaaaagaaaaataatagcacttaccctatcggtttcttctgatgactgaatgagatagcagccttggaatgatcatttgaaatattcagcaatgtgtttgtttttatcccccatgatgcctcattaaactgctcagaggcctctctcctcagcccaggccttgacagatagtcaccactgcaccacagcaaagcaatcatggtagaattgaggacaagcacactgaattatttgtagccaacatattgatatagccaatacagtggataaatggggcttgtcagatataatcagagcacaattttagtgattccccccactgcccattgaaacctgttctgtggcctgatatctcttttcaactttcttaaatggaaactcaggcagtccccatgacttttccagtcatacttaaatttttgtaaaagttctccagttgttagccatagacatacagacacataatacacataaactaattaatatgtttgattctatatcacagtcaatttctttaaaaatttcttttaaattcccagaatttctccagaagatagcagtccctcaaaaagcatagccaaaatctactgaaaagggacagaggagacccatcttacattcttttttgttcctgcctagagctcttattccttaaccactcacccagccgctcaccccactttgagcctggctctggctgttccaaggtagtggagagagagaagcaataatagcagaaatggccttgctactccattgatactgctgcaaattgacttataagctctccaggtttggcaggtgtgtaaagctgactctgagatagttaattcaaagacaccactatcaaagcatctctctagctggctgttgatggccccttagtcccttggaacttggtagccccctgttctgttgagatcacctcatctctccaggctgttctcttaggcagcatttaa

SEQ ID NO: 316884 - DNA, 4001 bp, Homo sapiens
tgcttgagaagcccacaggggctagggccacagcggagcacagcgccaggtgcgcccccctccagcaccagcaaacgggctccgctcctagaggacacaggccggagccctgccactgcgctgtccgccaagagtcgcattcttcggatgtcatctttgctcagccaggagggggcgctctcgctgtagatcctaatgttgctctccctggagctgggctgcaggaagtctgggcccccggctcgcactcccggaccccgcaccaacctccagggtcgctctccaatcttaaccaggtttgctccctgagcgtacccaggtgctacagcatcagcttcccttgccgcttcctgcggctgaagggatggtccgaccaaagcctcctgccctggggcagccgatgccactgcatgctttttcctgcgcttgggcttcacggtgccacggatattggccggcttgctgcgcttggagcgtagggtaatgtacaccacattgggctgcagagtggacccattgccctgggactctggaggggccagggtaccatccaggggtatctcagggaaggatggctcggcggtgtcgcggctgcgatgtggccccttctcagccgcctgtccatgctggagagaggccctccccacctggctcaccaggaagcccaagtagatggcacacgcagtgcccagcagaaggtttctccgggtccttggacgccggctgctccagagcttacgcacccgcgggacgcacagggagcagatgaaccagtttatgagctgccccggcttgtctggacaggtcatttctctgccgcatccacatgttgaacggagtttaaagtctgcagttggctcctgctaatgtgatgcatggtttcctgacttcagctgccgcgtccgcttcgggatataagtggtctccagtgggcagaggtggaaggaaagggttggtgatgaagctgggaatgtttctgacacaacaaaccttttaaattatcagtctccccaaggagaaatgcggcttgtttctgggaatgaatggatacagagttaactgagtcacaatttcaaaccatttaagttcctctacaagagtcaagaaaaaaagtaatcatttcctttcataaatatcaccactaaatgtttttaaaaataaaatttaaaagcatgcaaacgagatagatgtatagatttgatagtcacttgaaagtagtgaaaacaagccacaaaaatccaagagtgttttataacttgtacctagagtcatttaagttgactctgaagcaaaagcgttaaaatgtgacaaacctgggcttttcctttttgaaattcagaaagaacttaagacaagtaatagataattttttaatactctatacctataccatttttattttttaaagtcctgaattaactaagtacaagcagcaagtattaacaataaaatttagaaacatattctcttagtctaaaggtacaaattgtacttcatattaataatatgttccattagcttacattgttagtataatacaaagccataaatgtccatatatcttggaagcagttgcatttattctgtttctctctctctctctctttctctctctctcacacacatacacacacacaacacaacacaactctgactgctttttatttcttttctttccaccgaagtcagctgaaagaaaataaaagcatctctagttctgttttttcactattaaaaagaaaaagaagaaactcgtaagcaaccttacttacacagctggccccatgcttggctccaggaagaatgtaatccttgactctaatgcaaagaacttttaaaggctgaggcatgtaagtagaacatatttcatggtcaagagtgttccacatttcaaacatttcagttcagctttaaaagctcccttgaaaactactgattgcaaagcaaaacttggaaactgactgctgcatggttttaagagatacaaagcttttaaaaacaatagttaacaaaataaactttaattttaaattcggaaaaaagaaatgccgtagagaatcagttttcattcaaataaatttccacttatttttaacccctgggagccctctagtgtcctgttcgcaaacagactcagaaatgtcagtctcatgaagttcaaaagatcgagaatgtttgctatcttggtggagcagccgcagccaagcaagtaacttgtaaaatgaggaatgccatcacccctcgagtgtccatcccacataacttggggttagagcacaagcgttcccaggaactactcaccttaccatcttggccgtttcatttgtcttccaccagttctggaaagagaaggcctagaagttcagaaaaaaaggtaagaaagagttaatataaatgaggagaaaaaatagaacagtgagataagagtacacacagataaggaaagacatttatagtgtgcaattgcacggtgcaacagttcacaaaaggaagtcgtggattctctctgattggaggttttttgaaaaaacaggttagggattggcctgggtggtttgcgtgtcctagcacaaaggcaggggctgatgaccttggggtgtcaattagactatggcaaatagaatcaaaaggcaagaagacagaaaggggacagggatttttcctccccacagagaaagaaagttgtgatactgaagagtgggtaaaagattagcatatggtgtataatcctaaaaatactatattttacaatgcaaaaagagcaaggagttggaatatatagggaaggagagaataaacgtccaagtggtaaattgacaaaaattataatcgggctgttatttcagcactctaaactcagtccttttttcctctttaaaagtcctgccacatggaggaatgagaaggagcaatcccaatattgacagtagcctggaagtacctggatattttggctaaactttgtgagaattcaggcatcaaaacaattttatctgcactcaaaaactcttaggcacacacttccatacacacagaattattttcttgatagaaaatgtgaacttcttgcaaggaaaccataccaaagctgcattttataaccatcttattatttccacagtcaaaggaataactgacctggctctataacaattaaaagtaagcctttggcagaggccagttataataagcagacatctcctctagctgtttttagagctatttttttcatggagaaatgcctacgagatagggagagttgtgtgagttagtaaatttcgttgactaccttcccacccccactccaaaaatgtctcctagaaaaagaacaatacactgtcccctgctatagccacaatagggattcgtggaggctacactatctactctgaactatgatattcagagaatgggctgaagagggaggcagactggctttaaattctcctcatttacctcttacgtgtggtcccctgtggcaagtaatcttacctctctaagcctcagtttcccccatgtgtaagaaaagaaaaataatagcacttaccctatcggtttcttctgatgactgaatgagatagcagccttggaatgatcatttgaaatattcagcaatgtgtttgtttttatcccccatgatgcctcattaaactgctcagaggcctctctcctcagcccaggccttgacagatagtcaccactgcaccacagcaaagcaatcatggtagaattgaggacaagcacactgaattatttgtagccaacatattgatatagccaatacagtggataaatggggcttgtcagatataatcagagcacaattttagtgattccccccactgcccattgaaacctgttctgtggcctgatatctcttttcaactttcttaaatggaaactcaggcagtccccatgacttttccagtcatacttaaatttttgtaaaagttctccagttgttagccatagacatacagacacataatacacataaacta

SEQ ID NO: 316885 - DNA, 4001 bp, Homo sapiens
attgttaaagattctacttcataataaactgcttatgttaagaaatagtagaaacaatgatcctataaaaacatacatgtaaatttagatttagcttttaaagcttagaacctaaatctacctgaaaaaaagaaatatacattaaaaaagtatcttatttttatattactatatatggatcatttatctcttagaagcaattgtcttttaactattccattctttcatattcttactattcacgtttcaatccccccttgaaagtttgtaacactagttcagttactattgtattaaaaagatatttttaaagggtttactctccctcctaaatcagacagttcatctatagtaacagcagtggcagtatattagggaacaggtctggtagatgtggtgatgaaagcatggggaagtttttttttaactcaataggatgtgaggtatcatctaagtaagaggccgaagtagaaaatgttgcaagtttgtcagaagaaaatatgaaatattaataattgttaaggaatgtgataatatgatggactaggaaaatgtttttggatttttagtctggctggttgtcttacttgcttaatgcaatgattgttattgttacaatgcttgatagtctaaaattccccgtcactaatcttttatatcctaagatatatctctagtgcgctgtatcatcttctgaaaatacagctctaatcagcttcctcataactggaaaagcatttaatggcgccgagcttgtgtaagctcttcaggataatatcctttaagcttaagcctcatctttccaggtttctccttcatcacatgatctccatacattctacatttcagtactaaaagtatggaaattcttgaaatagttcatgcactttcatgtctctgcttttggctagtattccttttgcctggaatactcttgttgggtcacatgaagtcctatttattcttttctacttagttcaaatgctacagcagccatgcattcaactaacatttagctacctacagtgcctaaagtatgtcaggcactggagatactaaacaatgaacagtgacatattaaaataacagaatatctgttcagctattaagatgaataaggtggagttacacaacactgacaaatctcaaaaacattatgtaaaacaagctagctgcaaaaagatgtacacattacagattgcataaaggtggttaggagagtggtttccttaggcaaaaggaaagagaatgagacggggtagagctgacaaaggacttcaatcacttatataatcatttatttctccaattcagtggtgagtacacatgtgttatagttttgtttctaccttttttctgtctaaaatcgtctatttaaaaaaagcatctttaaggctggataccttcctgaaggcactggaaatctgtcatactgccactaacttaaaattaccttccacctcttgcatttccctttgtttcctgttttgacattgcgcacacattagttagtacactaggccttaagagtggaaactgccaggtaccagctttagctagattaaaacatgaccctcttcccaggagactcctgaccggttttctcgtcctccagggacccagctaggatttcaatgaactttggcctgaacccctcggccgaccctagaataatcgcccttcaggcccggattgcttctgctctcaccttccctcaattcatacggggggcaaaaccagactgtatttcccgcaacgaaccctggaatgcttcgctttagcggactccggtccactcccatcagaggatgcccttctttcgcctcacctccagcccagccgcagcgacccggccgggcccagcgctgcaagcctcaggtctctccagcagagctgcgcctctgctctccccacacttccctccgcaacaccacttccggcctacctcacaaattccccattccagccgaaaagaactggatcggccctctgcgcatgcgtgagaccggggcggtgtccgggggtgccgggagcgggcggtgcaggctccacttttccacttccctacgctctgtcggcagtctcgcgggatttccgcctctcgcgggagttatttgaatgccagggcggtaacgactccctaggcgcctggggccctctgacaagaaaccctaggagacaccgcggagaactctgcctctgagctggtgggcgggccggatgtagccgagcgcggacagggctagtccggacagagtcccagagccatgggagcgaaaagagactgctgcggattaaggaggcctttcggttggcgcagcagccacaccacaaccaggcgaagcaggtagtggcgctgaatcgctcctgccgcggggtaagcgctcccggcccgcgcccgccccagccccgacctggcggggccaggacgctggttcatacactccaaggtgattttcatagtctttgtggaagaattagagaattttgaactttgatatcattgcacgtgtttacttatttagagaatcgcattgtgtttaataatcatagtattcctgtgcgactctttaggttagcagatcattgatttttaacataaaactgcatttcattaaatagatttaaatatgtatgtatatttctgtcctctaatgattgtaacaaagcagatttcttgatcattaacaagataggttcgtgcaaataagtgcatctttgtcacaaaccaaatttttttgtggttgagatatatatttatatatatatgtgaaacaaaaaacatataaaggagaatatatatatattcttatatatataatatatactgctttatttttttgggttgacatatatatgtcatatatagtttttttttaaattctaccttaaacagggaaacatgttagatacaggagcttgaatttcaactctgaaacttaatgcgactttatcagcatttctctttctcaagctacttacttcttgtaggattacacagtcaaatttttaaaaatttttgattctccaactggatttttttttttaatttttgagacggagtctcactctctcgcccaggctggagtgcagtggcgcagcctcggctcactgcaacctcagcctcctggttcaagcgattcccctgccacaacctcccgagtagctgggattacaggcgaccgccaccatgccaggctaatttttgtatttttcaaaaatacaaagacggggtttcaccattttggccaggctggtctcgaactcctgacctcaggtgatccacccacttgggcctcccaaagtgctgggattacaggggtgagccactgcacccagcctctcccactggatttttaaagctgttttttgattagcaaatatttcttttacatggctcaaactacatgaaaagaaatgcagcaagaaacacttcctccctagtccctatccagtaccattcctaatagtcttcacgggtaatcattttaaattagtttcttgtttatccttccggtcttcatgcagagatacaagcagatgagaatatacagtcttatttcactcggtctctccttcaatattttctgcattgttcatgtttttttttttcctgttttactgtatattctggatattcctccttatcagtattcaattaaacttattttttcctgtcacatactccattttgtagatatactccagtttatacagtaaatcacgcgtaggtggacacttggcgttgtttccagtcttcagatattagaaacaactcttcagtgaatacatgtcatttctacatttgcaggggtaactgtcagattctgaaaagaattgctggatccaagaggaaatgtgtttgcaaatatgatagatatttacagttgcccttcatagagtgatccattttacactcctatcagcagagaagagaatgagacatactgcttttttttttttagggggattggaaagaacaggaatataattgggatttt

SEQ ID NO: 316886 - DNA, 4001 bp, Homo sapiens
tggtgcgagagacctaaattctcagtttatctaatagaatgttaatttaaaatgtctaacattagacatattacagttatgaagaaatagcaaggtcactggaataaatcatgcctctgtttaacaggaatttggtgtaggatggcatgacccaggaggtttttgtttttatataagcctgttttgttgctggaatgaactaatagctctctacataattttgataaaattcataatgtgggaagcattgaattattgactgtgtaataccatctttcatcttagaatatcaaaagtactttacaatttattcccattacatctctgaagagtaggcatttctaatactgttttattgatagttgctaaaataatgaaagaaaaaaactttcttctgcttgtaagtggcagacaattcagaattgaagagctcctctcctaaataatacaaaatagctttcaaataattcatccttcataatctattactgtacaggttataagaggttagaaatcatacccagtgtgaaacacagcctaagtagtttcataaaaatatcacttgaagaaaagatttcagacctggcattcaagtcataagattaaacctcatccccttcattgtccagaacaaatcctaacattactgggtcttacttttaatagaacgattgccactctatgtagtgtaattactttggcaaagttattacatttctatagctgaaaactaaagcatgaatcctattgtgatggcgtctttttccatctcctgggaagacaattctaacaaacaactctattatatctatccagtttgattttgtcctctttctcttcctcctggtaataacagccttaatcttttttggatcatgagtttttgtggtgtctttccaaatcgcactgtattctatctttagagatacaagattatgacttgctgtttcagaatctagagtcagatctatgtaaaatgaattaagaatgttttgtcgaccataatgttgtggcagaagtctagaatcatcatcccttgttaaaatggaaaagctcataaagtttttgtcttaatacctgttattgatacatacccttatatcagttactaattatttgagtgaatagtttactctgctatctcacttattagagctttaaataagaaaatatggtctgaaagttttgttttcatctagtgtgcgtatcatatcctattctttatattttcaggttttcagaactgcatcttattcattttccgaataaagcacaaagtgctcaaaatcagagtttaatctcttcctctaatattcgactatcttcggtagcattcatgtatttttagttaacataacgattggtttagttttggcttatttaaagcattttacacttgctgtttcagatgtcagatgtcccctgtgagcttcttccttgaggcagcctgctctataggacaggtgagcccagcgggagccagcccactgcagacccaaaccctctagtccttgtcacaaaaagaggctgggacctgatggtggttctcttcctgacttttcctggtggtccttctgacttggagtggcctggcaatttcggtggcgtgacagccggaatgctgccactaaaattcctctctgggcaccatgagcggctgacagggcacgcggagaaaacgattcgcttctcccaggattggtggagcgaccgctgttggacgaatgtggtcgtccctggatgtctgagcaaagagacactgccatggcggccgccggtcagcgtataaggtctgttagggagacccgaagccctgcaccaggaacgcagtttggctcgcccagcccaccctgcagggctggctctccaggcgctgggtccggggagaagaggacagctgccccgccgcaccgcgcatccttccatccactgtggtacatggcgctgccccggtctccaacgtcgcgccacaccttcacggtctcacccggaagtcgaagcccagagacggtgccggccgcacccaatcactgctctgccgctccgacttccgctacggactcgcccagcctcctgggagaaacgctgcagtgcttggggtgctgaagccccttgagagccttgtgttctgtgagaaagttgcattctgaaggaacctcagctgtttgctttgctcttctgccacccaaccctacctgtgccagactgagggctctccctgccccgccttaacagaagagaattccagttgctgttttaatttattgaatcttatttataactggttggagaaaaatatggttataattcccactgaacagcttattaaaagttacagtaacactatgataattgagatattgtcttttagggaataaataatgaaattataagatgaaatatacagatgaaattataagatgtctgggaatttactccattggcaggagaagttgctggggttataaagattgttaattcaaatgatagaaattggtttctttttatgtgtacgttcttcataatgttctctctactattatggatgtatgaaatactccacaatttaaaagcttccttttatacccggcatggaagctcatgcctgtaatcccagcactttggtaggctgaggtgggcggatcacatgagctctggagtttgagaccagccaggccaacatggtgaaaccctgtctgtacaaaaaatacaaaaattagccggacatgttggcccgcccctgtggtcccagctactccggaggctgaggtgggagaatcgcttgaacctggggagttgaggttgcagtgagccaggatggcgccactgcacctcagtctggacgacagaacgagagcttgtctcaaaaaaataaataaacgaaagatttatttcaaaaggctaatcatgtttcagcgttatcaatgcctcgttccagaaaagctcatttctcttactcttttctttgagccgcctccccgttttcagtccgcctcagggctctcagattctgtctcctttgtcttcctcctcacagttgtccctaatcttaatcgattttccatcctctaccaatttcctgtctacaccctctttaatctcataaaactgccaaattagtttaaatcgggattgaggaaagagcgagactaggcattgtgcttccatctgggtgtgtgtgtcttgtgtgtggatcccaggcctggtctcagattacctgagtcatctggggctggtccctgatatcctctcttcatccttttgtggtcacatgaagacaaggaaaatcaacctcaatttccctttaagttttctgtaaatataaacaccaataaagacatatcttctggaaaacttgttttttttttttttttttttttgagactgaatctctcttagtcacccaggctggactgcagtggcaagttcgtagctcactgtagcctcaaactcttgacctcaagcaatcttcctgcctgggcctcccacactactcgggttgcagtcttgagccattgagctcagcctggaaaaaattttttaaaacataggatttggtgtggcacagaactcaatatattccaagaatggtttgtgtttctgattcttctgttgactgtttaatggtagatatgctgattatgcagaacagttcagacataattagatgtaattagggcaaaccagcatgaggccccttatgagaagtccaaatctgtgattgtcatacaacatacaaaagaactgtctcatatacgatgtcagagtaaagagtgaaccaaataggttatgtgtaggacatgtgtatactactataataccataataattttttttttttttttttttgagatggagtctccttctgtcaccaggctggagtgcagttgcacgatctcggctcacttcaacctccgcctcccgggatcaagcgattcttctgcctctggctcctgagtagctgggactacaggtgccctccaccatgcccagctaacttc

SEQ ID NO: 316887 - DNA, 4001 bp, Homo sapiens
tcttgagtagctgggactacaggcatgtgccaccatgcctggctaccgctttcctctttttaataaggaaactaagttccaagaggagagtaaggcaaccagtgtaaagggagggctttcctctcccccacatggcctctcatagttaataagcttaccattctgcattatgttaggttcaggaaaaatcttgcttggcccataaaataaaactggaaacaatttttctaaatatttactgttttcacagacactagtacatgatatatggatatttccctctttaagaattgcaaaaggataccggacatgtatcctaaagaaatgaaaaagtatgttctcagaaaattctgtacacaaatgtcgatagcagctttctacatattagccccaaaactggaatgtccaaaacaacctgaatgtccttcaacaagtgaatggataaacaaactgtggtacatccacaccaaggaacacgactcagcaacaaaaatgaactactgatacacacaacttggatggatctcagaggctttatgatgagtgaaaaagagccagtctcaaacagttacatactgtattattctgtttatctaacattctcaaaagaactaacttacagaaatggagagcagcttagcgattgacaaggctggggtgggaaaagaagtgacagcaaaggggtaatactaagagttcctctgtggggaaggaacagttttgtatctttatgtatacatatgaccaaatgttacagaactcacacacctgagtgcaagtaagagctgataaaatccaagtaaggtctctagttcaattagcatattctgccaatgacgtttcctggtttggcaatgtgctatcgttatgtaaaatggtaccactgtaagcagctaggggaagggtacatgggacctctgtactatttctgcaacttctggtgagcctacagttatttcaaaacaaaatttttaaatgggggggagaagcttcccaaagaagctcttatgaataactgctagaaacaactatgaataattgctaacatgtacacgatacgttctatgtgccagtgacaactttacatgtgctatctccattaatcctcacgacaatcttagaaagctgattcctaagttattgccccattttatagttaggaaagtgagcccagaaggagcaaccaacttgcctaaggtcaccaggcaaacaagaggagaactagccttctactcaagcctttctgattctagactttggaatcttcaccaccacatcgtgctgtctccaagacagacgaattccattctcaaaagattgtcaaggagtcggtaaaggcaaaaaccttcttgttcctgctctgaggctaccacaaccgtacaaaatgttagcagacctccctagcaccccaggcgctcccccaaccctgggctccacttggccacagccgccatctggataccaaaggctccaggggcagcagatgcctaacatcggatacagggctccaggcgccccggggcatctggcgaacagttggttggctaggccggaaaagggtgggtggctagcaggagggcaccagcctccgcagcggactctgcggccatcactttcccatcagaaatggggatattagtctacatccctgggggcgtgggaggcgggggttgtgaggatgacagcaggaaaaatcctttgcaaagagcagcgccaagcgttggttatctcagcgtattatgttgtacgtacaggaagcattgaggagggaaggcaggctggacctctcccctcgcccccgccccagcaagcgcgggtctccaggcgcccccgcgcggcccgcgtgggatgcgccctcggcccgggcgctgagtgtttacctggacctgcagttcacgccctcgcgcaccggggccaacgtccccggccggagccgccgcctgcggtccgccatggtggccctagcttcgcggccaccgtccgggcttgggcggtgtgtgtgccctgctgccgccccgttgctaggacaccgcacaaccaccgctgccggtatttgccccgggcgcctggcaactctgacgccccgctgcgcggtccaaccccttctccgacgcctggggacgtggacctggccgagggaagggagagggtaccggtccttggtgtaatcacgttttactctgctgggaaggcgtgttcatcttcccaccgaaacgcgccatagactggatcaggcgttttttgctcatcatcgtttcaaaaaacgtttactgaaggaaagaaaggaagaaggcaggaggagcgataaagagatagcaagagaaagaggatggaaagtggggaaaatgaatagatttctaaaggttgggaaagccttttagcagggagatgttttcctggaggtcttggaactctcttggtctcacagcctctgtaaaccgagggctgcacacctgtctctagtccccagctgatttccagaggcccttccagctcctgtgttgattcttctgcctcgactcacttctagcagacaagtaccatccagctgaccctggtaggcacgtggccacataatacggattgcacgagggtgtgtttcgtttttactaaattcttatgctacttctgagtgtttctgatttaaatataagcattggttctgctacttaataattatgcactcctgggggcagggtacttacatttttaagcttcattaattacctggcctgaaaatggggaaaataatagtatctacctgtagggttattggggatattcgatgaatataaagaaattaacacagtgccagcatttaagaatccctcaagaattattattatgcaagtactattattccagctgtgaaccgggggtggtaatatttgtcctgactacttaacagagctgttgtgagttagttaatggagaaagctatgtaggtaatcattataattagcccaattgttatttttattttctttgatattagtccgattgtaatgcaaactttttattactttgaggaggtagggtttctgtagaaattctgtgagaactgggccaaaagtatggttatctaggctgaatggagtcctgcaggaatgatttgtaacaatttgcccaaacaatgcttgattaaactaaaaagcttctacacagcaaaagaaataatcagcagagtaaacagcccacagagtgggaaaaatctttgcaatctatatatccaacaaaggactaatattcagaatctacaaggaactcaaacaagccagcaagaaaaaaacaagcaatcccatcaacaaatgggctaaggacatgaatagacaattctcaaaagaagatataaaaatggtgaacaaacatatgaaaaaaggctagatatcactaattataagggaaatgcaaatcaaaaccacaatgtaataccaccttactccagcaaaactggccataatcaaaaaatttaaaaaattagatgttggtgtggatgtggggaaaagagaacacttttacgctgctggtgggaatgtaaactagtaaaaccactatggaaaacagtgtggagattccttaaagaactaaaagtggatctaccatttcatccagcagtcccactacctgggtatctacccagaggaagaaaagtcattatacaaaaaagatacttgcacacacatgttaatagcagcacaatttgcagttgcaaaactatggaaccagcccaaatgcccatcaatcgatgagtggatagagaaattgtggtatatatgtgtatatatacacatatatataatggaataacattcagccataaaaaggaatgaaataatggcattagtagcaacttggatggaactggagaccattattctaactgaagtaactaaggaatggaaaaccaaacattgtacattctcactcataagtaggagctaagctatggggatgcaaaggtgtaagaatgataaaatggactttgggaacttggggggaag

SEQ ID NO: 316888 - DNA, 4001 bp, Homo sapiens
acaggactggtcctctggggctgctgcttgaagagctttggtagctacaaaatgtcccagcctcagttctgcccttaccatctgctccagttatctactgagtaacctaccacaccaacactcagtggcttaaacaacaacaatcctttattttgcattttgagcagggctcagcagggaccactcacctctgctctgtaatgtctagggcctgtgactcaaaaggctagggacagctggggactggtgggacatttctcttcctacagactcagggcttctccccacagtctttcccatgttctctgcagcagtctccgggtagctgaacttaggggtgacttgaggctccaagagcaagaatttgcaaaggccccagcagaagttgcaaggcatttatgatctagcttcagaagttccaggatatggtcatttccactgtattctattggtttaacaaattgctaaaacctgcccaaattcaaagcgagaaagtatagaccccacctctcaacgaaaggagtaacaaataatttgccaccatttttaaaccatcatgctatctcaccaagtcctcaacaaagcctcctaactgatttgctgtcctcagattctcattagtgacagatcgggatgcagcaatgcgcagagtagaaaaagtgagggttttggaagccaacagccagccctacatcctggttcaagcaggatccaccactcagcaaccagttgagcttgttaggttacttaactcagagccccagtgttcttgagtgtaaaatgaggataatacactatagttgccaagaaaatgtacttcttggatcttgcagtgtagatagcataactgaccaatggctccgcctcaactgctgagctctgctgaaatccataccctgatatttatccctaggttgctgcaaaggccagcttcctaaggctgctcccagctcatgactgagcacagcagggatactaaggcgggcctctttctgggagatgccagacttctgggacaagcccatttggctaaaggattccccaccccaatggccttgctgaactttttatacatggactgtatatatatcaaatgcttccttccacccaaccttccttccttgcttgcctctttccttcacaaggatcacacctgcatcccaggtccagctccctgttttccctcaaaactctcttgcatagtacccccatctgggactgtttctggaggactgggacaaacacaacctcctattcataggactgccaagggtattaaatgagtagaactgtgcaaagaaactagtaaagggctggcgtagaagaaacactcatttaacgaacacttcttgagtcctggctgtgtgcaggtcttggtcctgggtgtctgggacaccacagtgagcaaagcaggcaagaacaccagcgatgcctgctttaagctccttcccaacttccacatctttaacaggataccaagagcccttcaaagtctgacctcttggggcctcaacacctccgactccaccccctgaacacctgagcctacagtcaaaaggaacttccttcttgcttcctacaggttttgctctttcacccccaatgcctttgctcaccgtttccttctccgtgaaatgcctcctcctcccttttttgcacatcttccattcttgcacatgccccttacgtgacaaacttatgcatcccccaggccccagttcaatgtggggccctaggtcatccaggcagaacatgcttgctggcatgatctcagcaggcacctggtagaagcacttgctacattgtgttgtaattgcggtaacggtgtccccgctaacttgcgagcgcctctagagcaggggaatgtcccagccaccttgaatccccagcgcgtggcccatgggaggccctcagacctatctgcggaatgagtaaatgagtgtgtgaaccaggttcggcaatttcggtggggcgagcgctgggcctgcggtgcagggcgctgggagcggccaggccgggcctggctcaggcgccgcagccactcagggccaccggggaccggccggggagggcgcgggccgaatcactgccgccgccgcagggcacatgactgcggcctccgcccccgcccgcctccccgcgcagtcgccggcggttgcctcgcggggttgcggcgagcccggcccgcgaacgtcacgtccctgcgcgctccctgcactctcccgagctgcgctaggcgggcgccacggctgcccggcgaaggaaaccgaaaccgagtccgggcccgtccctccgcggccccatccgcccggtgcacccggggccgcgctcgccaggccgcggagcccagagctgcgcgcacgaaccgtgcgccgggagggcgtgggcgtggcgccgaagggtcccgggtcttcgacgcctctgcggcggctcctccctccttgcagttggatccctggcgggtgcggcccggcccggcccgtgagcggcgcacagaatgggccgatgctgcttctacacggcggggacgttgtccctgctcctgctggtgaccagcgtcacgctgctggtggcccgggtcttccagaaggctgtagaccagagtatcgagaaggtgaggcggggcgggctgtgtgtgtgttgtggagtcgtccagctcaccctcccatccctgctgctacatcttgtatgggaaagaccagcactcaggcagaccctccgcgctagagctcttcttgcgtccctgtcttccagggcttggtaggcgagggttaaagaaggatgaggaaggatggagccgactctgttccctttacagtgataagtaaggctatggatcctgacttttaaaaaggccttcggttgtgttctgtcgtttgcatctctccccactccttccgtctacaccccaatctcaggtgggcccaaacttgtttccttcccacttcatgaagaaacagaactgaatgaaagacaccgcagaagaggcaggttatgttgtctgcttgctgtagcctttgaagtggtgtgcgcctggggatgagacgtgggtgtgcggtctattgtgttcttgccctcttgggctgggcaggggcagttggtagctgggccagtcctttaggctgggtgacaattcatccatcagtctttgctgaacgctgacttagtggctttgtatcttgtaccaacagtctgtgttgctttgtctcaccatgaattcttgtttttctcaaacggccataattttcaggcacagatgcatttagataccctacaagaatctgaacttgtctcttcctctagatgattgggctggagagccagtcctttaagaagacttcatcttttgatttcactggtcatttcatctgccctttcccccacatccaccaagctgtgtcaaaagaggaacaaaagagaattactgggatcattttttccttaaaaaagaaaaataatcactggagcagcagcctttcttgttagcatccataactgcacgcttcatttctcccactggtctgcacttgctgcggccagataaaaaagcccaggcctagtctactttgaatcactgcactctccagtcagtaaagctattttattccaggtggcaatggatatcttcctttaactgagtttccaaaagtaattaagtgagtacctgaaatctggcagttaaaggcagtttttcaaaaagcaccatggcaaagcataatgtaatttttaaagttcacattgccaagggaagacaaggcccactgtctgagcgtctcgagggtcagtttcctttgagcaatcatgttcaaggaaaaaagaaactgaatcctttctccactcctgtccatgtccaaatccatggtgagctgtgtttgaggatgtaaactcttgctttgggtgactagagtaaagcaatccaattatagtaaatatgtgagttttcttatatggccttgaaaggctgtttcaaggagccctataggatgagtgatcttccccgt

SEQ ID NO: 316889 - DNA, 4001 bp, Homo sapiens; identical to SEQ ID NO: 316887

SEQ ID NO: 316890 - DNA, 4001 bp, Homo sapiens
tagccaggccaaggaacttcacctggacaagtaaccgcctctccaggcctgggttccttggaaactgaaaatgagaagaaaccacccacttcatgaggctccaaggaatcagattaaactacataacacatgtgagagttcctgagtccctgacacacattttcaaattataaccacttaataacaaatgcttaacagattgtgaaattcaatttttctttaatatcattgcagaaaatgccaaaagagtttatataaaaatttttaatttcctttttttttttttttttgagacagagtctggctctgtcatcacggtggcgtgcagtggcgccatcttggctcactgcaacctccgcctcctgggttcaaatgattctcctgcctcagcctcccgagtagctgggattacaggcacgcaccaccacacccagttaatttttctatttttagtagagacggggtttcaccatgttggccaggatggtctcgatctcctgacctcgtgatctgcccgcctcggcctctcaaagtgctgggattacaggtgtgagccaccgcgcctagccttaatttccttttttagaaaaacattttccctgttcccaatgcaccggtgaaaaatacctgttttcttagttcttttatctaccagctaaaaatgtgtactctctcggattagagcctcttcctatttctgtttcctgtgcacatcattgcatgtgagcaactacctctataactagaaaggcctcactatagagcaactacctctataactagaaatgcatgcactaaaaaaaaaaagaaaaaattactttggcattttctcttatatacttcaagtggtaacaaaaacgttctgtggtccccacgtgcaatctaagaaacataaggacgcatccaaaggggcgggacaattaccaaggcctcagtgagtgtgaccctcaaagtcgcaacacagaacacaacagagggacaaagctgcagaatcaaaagctctaagttcacgggacagcacggggaatcaactatcaagccacagaaggggatcaggactgccagtacccagcgcacaaggaggactcaaggaggcgggacaatggcgccggacgagggaaaactacaattgtctgaaagaactaccacctagttttcctgcgctaactaacccaatttaaagaaaagtcactgtttctaaacaatgtcagtttccattttggggtaatattgaagagcttcaaataaatcaaaaccgtttcccagcctaccttcagggtgcaagggtgcacttcccttctagcacccactctgatgagggagaaggtcaggcgacaggagggtgtttaaagcagcatcaatatgttcaggttaaatttcttaaatattgtgaaacggaagcacattcttttccttttctgtttcgttttaagactagtcaagtgcagtagtgagaaaggggaaagagtggaacaaggagttcgatctgtaatggactgaacaagcaacagagaaaactcactcccttggcaccagccacgagcacattcttgaagccaaactcatccatccgtactgggagatagatgatcatagaaacatcaagtgtgagtctggtttgagtttaaaacgaaaagtgctttagagttatggaaacttagcttcaaagaagaggcaccaaggatgccgcgcgaaaactcacgaggccacttaacacaggctgcgtgggaaacaggggctccgcgactgcgctcagattaacggaaaaagacacccctctagagtccggcagcagcgggcgggcaccggcgccttctccacacaggagaatctcggcgatttacacccccaggctacgcagaaaaagcggcttcggaatccgccgcaagtcccctcctcgggtcgccggggaagtctggcctcccgcgtctgggtccccttcgggacgccccaaggccccgtttaccacggcgactccccgcctctcgcgccaccgaaccacggcgcggggccaccagggcgggcctcgcctcgtgcggaaaagtcgcctcgacgggcggcgcagacggcggaggcagggggacgtagtccacgcgcccagctcggagcgcagggccccgcgcccacgaccgcccgcgccctccacgtgccgcgggcaaagctcggagccggtgcgccgaggaatgggcagcgtggacaagagaggagggggcggcggcgcgctccgcccgggctcggtacctgagcgcggccgcgggggtgcggagcgagaagactgccggccgcccaggccccgctcgctcagggcgacgcgcctcagccgcggcggaacaaaaccgcggccgccgccccgccccctccggccgccctcattggccgcccgcgccccgccgccgccgcgagcccgtcagccgccgccttctccacgccggccctcagccgcgccgcgccgacggagggggcggggcctccaggcgcccaggctcgcaccgcccaccgagtccgcagcgcgccctgtgcgagggtctggccccgcccccggatcgacgccccgccccctgcgcgcgtgcgtgcctggcactcggcggcgtcctccaggcctagaaggcaagacctgtggcggcggcgacctgaggcggcggggcaggacgcgcagcgaggagggcccggtcggcactagccgtggctcaggcggtgacccagcccggggcgcgcggtctcggggcccgaggctcgccgccgccgccttcccgcctgccgtctgcccgctgtgtagccgttggcaggtcgctcgccctctcgggtcgcacttctgcacctgcacagtgtgaattaggccctcgctcatggtcgccgagggcggaccgtgctgcagggctccttctggcgataggcggggttggggcctggttccgtccgagcacagcaggcccagggagaccggactcttggggggtccctagggatgagcaccctgcagaggagagggtggcgggcagcggaaggaggccgtgccccgctctcggggtctccagcaaattcccaggaagggggtccctgcctccctctccagcctcccgtgctggggctcgggtgtgtcctggctgagatgagccgcctgacccagggcgggcctctgacggccaggtgtgctggccctgggctgtgtggatatccgccgactctggagattccactgaggtagggcgggatttatttcagaccagatgatttctcaaaggtgcaggagaacaatgctccccacccctggcgaggggcccctggggtgggaggggcctgagggaccctgcggtccagtgcctccccatgtgcgtcccctgagggtttggtgggggtggggagaaggggtggtctgacgggagaaagagctacctgtgtcccctggccaccgtggggctcggtggccacgtcccacagtggacactgtgggcagacagatgcatggaggccggctggttccgggaataggctatgggtgaggccatgcagcacccctggggctggatgctgggggaggcatcggggctcccaggggtcaggctggggcctcccaacaggttctgggcctggtaaggctagtccggtgcaggctgcgaagccaggccagctgacaccaggactggctggagtcagcctcacctgtctggaagagtgggagtcccagcggggctggggaggggagaagggctggagcaggcgtccaggccattctcttcgctggggtccggtaatcccccacctgcaacagtcaggctgtgctggccaggttacccaaagacaagtgtctttgtgacatggaccagagcagaaagtggccagaagaggatgagggcacctgtgcccggggcgaggctctgcccatggcagcccctcctgagctgggtttccatcctggcccctgtggactggagacaaccacttcaaatcacaaacgtcagagctgtgtgactgattaacttatatctacccacccctctcag

SEQ ID NO: 316891 - DNA, 4001 bp, Homo sapiens
gtgcagtggcgccatcttggctcactgcaacctccgcctcctgggttcaaatgattctcctgcctcagcctcccgagtagctgggattacaggcacgcaccaccacacccagttaatttttctatttttagtagagacggggtttcaccatgttggccaggatggtctcgatctcctgacctcgtgatctgcccgcctcggcctctcaaagtgctgggattacaggtgtgagccaccgcgcctagccttaatttccttttttagaaaaacattttccctgttcccaatgcaccggtgaaaaatacctgttttcttagttcttttatctaccagctaaaaatgtgtactctctcggattagagcctcttcctatttctgtttcctgtgcacatcattgcatgtgagcaactacctctataactagaaaggcctcactatagagcaactacctctataactagaaatgcatgcactaaaaaaaaaaagaaaaaattactttggcattttctcttatatacttcaagtggtaacaaaaacgttctgtggtccccacgtgcaatctaagaaacataaggacgcatccaaaggggcgggacaattaccaaggcctcagtgagtgtgaccctcaaagtcgcaacacagaacacaacagagggacaaagctgcagaatcaaaagctctaagttcacgggacagcacggggaatcaactatcaagccacagaaggggatcaggactgccagtacccagcgcacaaggaggactcaaggaggcgggacaatggcgccggacgagggaaaactacaattgtctgaaagaactaccacctagttttcctgcgctaactaacccaatttaaagaaaagtcactgtttctaaacaatgtcagtttccattttggggtaatattgaagagcttcaaataaatcaaaaccgtttcccagcctaccttcagggtgcaagggtgcacttcccttctagcacccactctgatgagggagaaggtcaggcgacaggagggtgtttaaagcagcatcaatatgttcaggttaaatttcttaaatattgtgaaacggaagcacattcttttccttttctgtttcgttttaagactagtcaagtgcagtagtgagaaaggggaaagagtggaacaaggagttcgatctgtaatggactgaacaagcaacagagaaaactcactcccttggcaccagccacgagcacattcttgaagccaaactcatccatccgtactgggagatagatgatcatagaaacatcaagtgtgagtctggtttgagtttaaaacgaaaagtgctttagagttatggaaacttagcttcaaagaagaggcaccaaggatgccgcgcgaaaactcacgaggccacttaacacaggctgcgtgggaaacaggggctccgcgactgcgctcagattaacggaaaaagacacccctctagagtccggcagcagcgggcgggcaccggcgccttctccacacaggagaatctcggcgatttacacccccaggctacgcagaaaaagcggcttcggaatccgccgcaagtcccctcctcgggtcgccggggaagtctggcctcccgcgtctgggtccccttcgggacgccccaaggccccgtttaccacggcgactccccgcctctcgcgccaccgaaccacggcgcggggccaccagggcgggcctcgcctcgtgcggaaaagtcgcctcgacgggcggcgcagacggcggaggcagggggacgtagtccacgcgcccagctcggagcgcagggccccgcgcccacgaccgcccgcgccctccacgtgccgcgggcaaagctcggagccggtgcgccgaggaatgggcagcgtggacaagagaggagggggcggcggcgcgctccgcccgggctcggtacctgagcgcggccgcgggggtgcggagcgagaagactgccggccgcccaggccccgctcgctcagggcgacgcgcctcagccgcggcggaacaaaaccgcggccgccgccccgccccctccggccgccctcattggccgcccgcgccccgccgccgccgcgagcccgtcagccgccgccttctccacgccggccctcagccgcgccgcgccgacggagggggcggggcctccaggcgcccaggctcgcaccgcccaccgagtccgcagcgcgccctgtgcgagggtctggccccgcccccggatcgacgccccgccccctgcgcgcgtgcgtgcctggcactcggcggcgtcctccaggcctagaaggcaagacctgtggcggcggcgacctgaggcggcggggcaggacgcgcagcgaggagggcccggtcggcactagccgtggctcaggcggtgacccagcccggggcgcgcggtctcggggcccgaggctcgccgccgccgccttcccgcctgccgtctgcccgctgtgtagccgttggcaggtcgctcgccctctcgggtcgcacttctgcacctgcacagtgtgaattaggccctcgctcatggtcgccgagggcggaccgtgctgcagggctccttctggcgataggcggggttggggcctggttccgtccgagcacagcaggcccagggagaccggactcttggggggtccctagggatgagcaccctgcagaggagagggtggcgggcagcggaaggaggccgtgccccgctctcggggtctccagcaaattcccaggaagggggtccctgcctccctctccagcctcccgtgctggggctcgggtgtgtcctggctgagatgagccgcctgacccagggcgggcctctgacggccaggtgtgctggccctgggctgtgtggatatccgccgactctggagattccactgaggtagggcgggatttatttcagaccagatgatttctcaaaggtgcaggagaacaatgctccccacccctggcgaggggcccctggggtgggaggggcctgagggaccctgcggtccagtgcctccccatgtgcgtcccctgagggtttggtgggggtggggagaaggggtggtctgacgggagaaagagctacctgtgtcccctggccaccgtggggctcggtggccacgtcccacagtggacactgtgggcagacagatgcatggaggccggctggttccgggaataggctatgggtgaggccatgcagcacccctggggctggatgctgggggaggcatcggggctcccaggggtcaggctggggcctcccaacaggttctgggcctggtaaggctagtccggtgcaggctgcgaagccaggccagctgacaccaggactggctggagtcagcctcacctgtctggaagagtgggagtcccagcggggctggggaggggagaagggctggagcaggcgtccaggccattctcttcgctggggtccggtaatcccccacctgcaacagtcaggctgtgctggccaggttacccaaagacaagtgtctttgtgacatggaccagagcagaaagtggccagaagaggatgagggcacctgtgcccggggcgaggctctgcccatggcagcccctcctgagctgggtttccatcctggcccctgtggactggagacaaccacttcaaatcacaaacgtcagagctgtgtgactgattaacttatatctacccacccctctcagccattacttggataattattaagggcttttagtggattaagaaatagagtcagccggatgcggtggctcatgcctgtaatcctagcactttgggaggccgaggcgggtggatcacctgaggtcaggagttcaagatcagcctggccaacatggtgaaacccggtctctactaaaaatacaaaaattagccgggcgtgctggcgggcgcctataatcccagccacttgggaggctgagacaggagaatcgcttgaacctggggagcgcggaggttgcagtgagccgaaatcacatcactccagcctgggggaaagagcgaaac

SEQ ID NO: 316892 - DNA, 4001 bp, Homo sapiens
agttcctgagtccctgacacacattttcaaattataaccacttaataacaaatgcttaacagattgtgaaattcaatttttctttaatatcattgcagaaaatgccaaaagagtttatataaaaatttttaatttcctttttttttttttttttgagacagagtctggctctgtcatcacggtggcgtgcagtggcgccatcttggctcactgcaacctccgcctcctgggttcaaatgattctcctgcctcagcctcccgagtagctgggattacaggcacgcaccaccacacccagttaatttttctatttttagtagagacggggtttcaccatgttggccaggatggtctcgatctcctgacctcgtgatctgcccgcctcggcctctcaaagtgctgggattacaggtgtgagccaccgcgcctagccttaatttccttttttagaaaaacattttccctgttcccaatgcaccggtgaaaaatacctgttttcttagttcttttatctaccagctaaaaatgtgtactctctcggattagagcctcttcctatttctgtttcctgtgcacatcattgcatgtgagcaactacctctataactagaaaggcctcactatagagcaactacctctataactagaaatgcatgcactaaaaaaaaaaagaaaaaattactttggcattttctcttatatacttcaagtggtaacaaaaacgttctgtggtccccacgtgcaatctaagaaacataaggacgcatccaaaggggcgggacaattaccaaggcctcagtgagtgtgaccctcaaagtcgcaacacagaacacaacagagggacaaagctgcagaatcaaaagctctaagttcacgggacagcacggggaatcaactatcaagccacagaaggggatcaggactgccagtacccagcgcacaaggaggactcaaggaggcgggacaatggcgccggacgagggaaaactacaattgtctgaaagaactaccacctagttttcctgcgctaactaacccaatttaaagaaaagtcactgtttctaaacaatgtcagtttccattttggggtaatattgaagagcttcaaataaatcaaaaccgtttcccagcctaccttcagggtgcaagggtgcacttcccttctagcacccactctgatgagggagaaggtcaggcgacaggagggtgtttaaagcagcatcaatatgttcaggttaaatttcttaaatattgtgaaacggaagcacattcttttccttttctgtttcgttttaagactagtcaagtgcagtagtgagaaaggggaaagagtggaacaaggagttcgatctgtaatggactgaacaagcaacagagaaaactcactcccttggcaccagccacgagcacattcttgaagccaaactcatccatccgtactgggagatagatgatcatagaaacatcaagtgtgagtctggtttgagtttaaaacgaaaagtgctttagagttatggaaacttagcttcaaagaagaggcaccaaggatgccgcgcgaaaactcacgaggccacttaacacaggctgcgtgggaaacaggggctccgcgactgcgctcagattaacggaaaaagacacccctctagagtccggcagcagcgggcgggcaccggcgccttctccacacaggagaatctcggcgatttacacccccaggctacgcagaaaaagcggcttcggaatccgccgcaagtcccctcctcgggtcgccggggaagtctggcctcccgcgtctgggtccccttcgggacgccccaaggccccgtttaccacggcgactccccgcctctcgcgccaccgaaccacggcgcggggccaccagggcgggcctcgcctcgtgcggaaaagtcgcctcgacgggcggcgcagacggcggaggcagggggacgtagtccacgcgcccagctcggagcgcagggccccgcgcccacgaccgcccgcgccctccacgtgccgcgggcaaagctcggagccggtgcgccgaggaatgggcagcgtggacaagagaggagggggcggcggcgcgctccgcccgggctcggtacctgagcgcggccgcgggggtgcggagcgagaagactgccggccgcccaggccccgctcgctcagggcgacgcgcctcagccgcggcggaacaaaaccgcggccgccgccccgccccctccggccgccctcattggccgcccgcgccccgccgccgccgcgagcccgtcagccgccgccttctccacgccggccctcagccgcgccgcgccgacggagggggcggggcctccaggcgcccaggctcgcaccgcccaccgagtccgcagcgcgccctgtgcgagggtctggccccgcccccggatcgacgccccgccccctgcgcgcgtgcgtgcctggcactcggcggcgtcctccaggcctagaaggcaagacctgtggcggcggcgacctgaggcggcggggcaggacgcgcagcgaggagggcccggtcggcactagccgtggctcaggcggtgacccagcccggggcgcgcggtctcggggcccgaggctcgccgccgccgccttcccgcctgccgtctgcccgctgtgtagccgttggcaggtcgctcgccctctcgggtcgcacttctgcacctgcacagtgtgaattaggccctcgctcatggtcgccgagggcggaccgtgctgcagggctccttctggcgataggcggggttggggcctggttccgtccgagcacagcaggcccagggagaccggactcttggggggtccctagggatgagcaccctgcagaggagagggtggcgggcagcggaaggaggccgtgccccgctctcggggtctccagcaaattcccaggaagggggtccctgcctccctctccagcctcccgtgctggggctcgggtgtgtcctggctgagatgagccgcctgacccagggcgggcctctgacggccaggtgtgctggccctgggctgtgtggatatccgccgactctggagattccactgaggtagggcgggatttatttcagaccagatgatttctcaaaggtgcaggagaacaatgctccccacccctggcgaggggcccctggggtgggaggggcctgagggaccctgcggtccagtgcctccccatgtgcgtcccctgagggtttggtgggggtggggagaaggggtggtctgacgggagaaagagctacctgtgtcccctggccaccgtggggctcggtggccacgtcccacagtggacactgtgggcagacagatgcatggaggccggctggttccgggaataggctatgggtgaggccatgcagcacccctggggctggatgctgggggaggcatcggggctcccaggggtcaggctggggcctcccaacaggttctgggcctggtaaggctagtccggtgcaggctgcgaagccaggccagctgacaccaggactggctggagtcagcctcacctgtctggaagagtgggagtcccagcggggctggggaggggagaagggctggagcaggcgtccaggccattctcttcgctggggtccggtaatcccccacctgcaacagtcaggctgtgctggccaggttacccaaagacaagtgtctttgtgacatggaccagagcagaaagtggccagaagaggatgagggcacctgtgcccggggcgaggctctgcccatggcagcccctcctgagctgggtttccatcctggcccctgtggactggagacaaccacttcaaatcacaaacgtcagagctgtgtgactgattaacttatatctacccacccctctcagccattacttggataattattaagggcttttagtggattaagaaatagagtcagccggatgcggtggctcatgcctgtaatcctagcactttgggaggccgaggcgggtggatcacctgaggtcaggagttcaagat

SEQ ID NO: 316893 - DNA, 4001 bp, Homo sapiens
atttttaaagatttttcttctcttctttttcttttcttttttttccccaggctgaattgcaatggcacgatctcggcttaccacaacctccgcctcccgggttgaagcgattctcctgcctcagcctcccaagtagctgggattacaggcatgcaccaccacactccgctaattttgtatttttagtagagacggggtttctccatgttggtcaggttggtctcggacccccgacctccggtgatccgcccgcctcgacctcccatagggctgggtttacaggcgtgaggcactacgcccggccataatttttaaacatttttctgttggcacctgtccggaccatggatttaaatgatctactaacatgatgagaacccaacggggatacttcaaaagagacaaatgaatatacaggtggcccgaaatgattttataaagtcctctaacaaccacacttctttccagagtgccaaagaatttggctcatttaaggtgttcatttttcaaaaaatggttatacaaatgcaaacttcattcaaatcaaaccttaccttgagcttgttaaatgccatgtttagcatcactcaaggcttataccaattgttgttttaaaaaattacatagtgctttaagtatttttacatcttaaatacaaaggaataattctaactgtggaatcagagctgtcttcctaagacaaaaagacaaagacaaatatcacaattaactattaactggagaaacaccttttcaaacgtccctgtaacaactggatgtgttggacagcataaccaaactcattaagaatagtgtgaaaaacatcaccattacctagttctcacacacagataccttcttaaactatcgaaacctgtatctgaatatacgaagcattaagaatctgcttttgaaaaggaaatgaatatctgaaggtcattttcttttcaatcttttctcatactaataatcactgttaatatccacttttaaaaaatcgcctctatcaggcacccgggaattgcttaacaaaagccacttaatgaaaccacagttcagacaaaaaaaaaaacttaactgcatagaaaatatttatgagtttactttcctaactcatacaattgcgtccttgtttccaaagccttgcaattcacatcagcgggaacaaaaaaatctaacacacagcagaaagctggctctctaaaagaaagcatttttttttaaaggcaatgaaggaccaaaaactctttcttttaaaaagatcttagaagttcctcctccagagaagacagaaaacactgacaaaccgcacattgtgcagatgttcagccccgaaatgcagcctcgcagcccttcactccgcagtccaccggttgcatctgcacctccgggcagcgctcctgcagggcgcaaacacccagagacccagggacccggcagccccgcgcaggcctcccgcgtgcaccgctcagcgagcgggtctttcgcagacggcgggatgccccaggagaccgcgaggccggcgcagcccggcgagctcccggagggaaggcggcgtgtcagaaaggatcggaccccagcaatggccccggatcggtcccgcgcggtcgcctccttttcccgctccgccgccgggacccccctagccagtgctgaatttcccaactgggaaggaccgagtcactccaccctccgggaagtcgcgcgctcatccgttttcggcagcgccggagcccgagccggggaccgggcggacacccacagagtccgcaccgcagcgcgctgcacgctctcgcccccgcccgccggcccgcgccccagcgaactaaccgcaaagttggcccgaagtggcgacggcgctctcgtggagctcacccgccgtctcagcgcgcccccgagcagggaccgggcctgccggggccctcgccgggctcgcgcgtccgcatggtacctgccgcacgagccgctcccgcgccctctccccgcgcccggccgcccagctcggcgccggcgcctcacgctccccgagcgcaggagatccctccgccccggccccgcccgccggcgccggcgctcatttctcgggcgcggaaactcgagcccactttccccggctgccggctctgggaccgcgggctcggccacgcagtcccgcccggacccaaagagccccagtccctgcgaacaccaggtccgtgctgggagacgagaaggcgcccagcggggtctagcgcggctccgaggggcagggcgaggcttgtgatgccgaggttagttacggccagccacaggcgctgtgcaaggaattggggaaagctccctgccaagaaagggaaacgttagcttagctaaaaaaaaaaaaaaaaaaaaaaggctggggcctaatgagaaagcttcccagaggcatccctttagcttttccatagccttctgggagcccctgaatctgcatttgaatggcgcggctctgggtccgcgaaggtttggtgggctgaagtcgtccttcaggtctccaaaggaatgcagctaggtcggaatctacttcctccttcaatccccagaaaatggaaacgcttcccccgcgacctttttctgccgagttagaccccaggccctccccgccgcgggcgcctggcctcccccgctgacaccccggacgcccaggcctgtgggacaaaaggcagtcgcggcgtcccgcgggcttcctagcccgggagtcggccccaggggccccaaagcgtgaccccaggccgacaactgcaagttcctaggcagaggggaagccccagcgccgagaagcccgctccgagaactccccgcgccgggcgcccagcctgagcgtcccgggcgcggagcccatccccggtgcgggcagggctccagccgcaggctcggcgcagggcggactcggccgaagcccggagggccggaggcgctgggacgcagcccggacaagagggcggacttgatctcggaaagtttgtgggactcaggcattttaacactgggaagacaaagagatccgatttccctgggactggtgaggggagcttggcggggaggggaacggcagggcagtcaagtgtgaaagagaatttcctgggttcaaagttaacgcagtcaccttataagccatcttagaggtgaccggaaaaaataataataataaaggtgtctagcaggttgtggctgggaaggaaaaataatgcctgcaagatgagtgtgccgattcgtagccctatattccctgcccaccagttggaatacacatagattcacacatccagcaaatgcaaactccatcatccaaagacgtgtttgtcccggccataattgctccaagtgcttacaggtcaatttcatacatggaacacctcgaaagtgggtgacctgatctccaagcccaaccggcttgtgccgcttgccgaattgtaaatctcagcaaaacccaaacacaccggaactccagccgtttcctgggagcgaggaagcgggagtaatgctaaaaggggaaaagaagaacagtaaaaaaagtacaaagataccattccctgacgtaaaatcacgggattttttttaaatggcacaagagaattcctggagaagattaccattaattaataagtaataacgcttcctagggcttactagatgttttacatctgtctgggaatcccgattttccaggctccctgagaaatctatctgcctggaagaagttgcacttcgtcgccacaggagccgccgagagccagggatggagatttcagacttaggactctgccacgattctactgatccttaagcgccaacagaacgaaatggacatgcctattagctaccacaaatcgaattattttatatgagagagagaaatgtggttcaagttccacatttgtcctttaaataatcgaccctccctaaccctgtccccaaaggctcgtggaaattagggagggggttggggagacggttccagaaacaaaacgctttcctccagc

SEQ ID NO: 316894 - DNA, 4001 bp, Homo sapiens
aggggagcccagatctgtggccagaaccaacagggagtagaaggcttgctcttctctgtccaaggaggaaatagtactcaacctcccagacacaggatccagacggaaggacctccggtcagtctctgcctcttgtaaggagaagcgcactgttccgttgtcacccaggtccccgtcagttgccctgagcatcaacagttctgtccctgttggggcattctcaaccacagacacatcatacccttctggctggctaaatactggcttttcatcattcacatctaggagagttactacaagctgggcataggacaccttggggtgaactccctggtcccgggcacttatattcagaacaatctgggaagcaagttcacggtccaggcccccagaggacccagtggtcacgaggccgctatgttcactgatatggaaccatcccagtccattgccagagacaatgctgtaacgcagattagcattgagaccagagtcgccatcagtggcagatatcccactcacatagcttcccggaggcgcctcctcgctcaggttcactctgtacacttgctgtgaaaagacaggaggatggtcattgatgtcattaacaaaaatcaccaggcttgccacagaagagcgcgcctggactgctgcgccagggggcgccccgtagttatcagagacggaaactgtgaggttgtaggaagggatgcgctcgcggtccaaggcgctggccaccttgattaggctcaggttcggcactttgctgctttgcacttcaaagtggcgctgctcattgcccccgagaatttgcacggagatgttcccgttggccgcgggagaatctgcgtccgtcacggtgagcagagccaccacggtgcccacttgagcattctcatctaccgaggcgtagcgcgaggtggccgggaagtagcggaacttcactaccgggtcattgtcattcacgtccagcagctgaatcagcgcctcggcgcgcccagtgagggaaggcacgcctctgtccatcgcctgcaccgtaagcgagtattggcgccgagcttcgaagtccaggggctcccgcaccgtgataagtcccgtctcagggtccatttggaagggggtcccctcgtcctgcaggcgatagcggatgtccgcgttggtgccctcgtccgcgtccgccgccgccacctggaggacgctggaacccacaaccgcgtcctcaggcacccccgcctggtagtgagaactgccaaaaaccggggggttgtcattaatgtcttgcacagtcacgtttacctgaaggtagccccgccgcttaggctcacccttgtcctccacctcaaccaggagctggtactgcggagtgacctcacggtccagtccgcccttggacaccagatgcaggaacgctccctcgccgctcgggttcagggtgatgtccagacggaagcgccccgcctcattgccgcggatgatgcggtaggagcggtggtccacaccgtttgagccgatgtccgagtcggtggcggtgtctaagatgacttggcgtccgctgctactgtcttccttgaaagtgaccacgatagaggggtccgggaaaacgggggcgttgtcattgaggtcccgcaccagcactcgcacttcggtggggtaggtgggcgcgctggaaaggaccaccaggttgatcacgtcgctgggcaggctctcgcggtcgatggtggaggtggtgtacagggctccggtgctactgtttatggcaaacagggcgtggctttcgctgagcctgtaggtgaagccggggcgcgtctggatggtgcctaccagagtgcctggaggttgctcttccagcacttggaacacctggcgcggctcggccccgtggacccaggcctgccccggaagcaatgacagtagccaaaacactcgaaggagctgagatactgatagagtgtgcaacgggagccacgggcggccagtagccctgtctggtgctaagtccatggtcctggctccctaaaacgatgtgataaagagaaggaaggggtgaagcaaacgcaatgatatttacagggattaaggagcgccagcaaagattcagctgacggcttggtctgagacctctgctatttcaaagaacctccagtccggcaaaagcaagtagcatcagcaaaagactctaggtagccagttgaacgcggagtgcaagagagatgctgtggcgaaaagcggcagggcattccgcgggacactcctgtgagctgagttcccagaaaagtttctcaagcctcttatatatgcccccttttactttgtttttgaatccagatagtctgagcgttttcacccgggtggatgagagttgggagaagttgcctgtatctaaggtatatgaggaatcattgcaaagaacggtcttcagaaactttagaacttacccgcagcgaagaacgtgaagagggaggaacaaacgtccaagcacaactgcgcaccggggaaggggtggtggggaaccgggagaatcgaatttctttcccaaaagctggaggcgatggaattcctggagtccccactcctcaaaaaccaggctgcaacgcccctccaacagggcgccggcagtggccgctgaggcccaggcggcggcgtctgcgcgcaggcagttcgggaactgcgttccaagcgctagcgttcgcgctctggctcccgtacccgggagcgctcaactctgccccttcccctcctgcagccgccgccgccgccgcccctgttgcggcttcaagcccgtggtccggcacaaacaacagccagggctcctcggcatttttcacctctgccggggcgcctgccgacccattatttgtacatccaaatcgaacgcagtttcccctttcttctcggcctcgcaggggtcgggcagaaacagcgtgcggtccccgagtcgccctcccctcaccatgccagggggggtcgttctccggcggccccagtcagaagcccactctagcgcgcctcgcccctgccctcgctatctctgcttttattgtcccgtgtcagtttcactttgtaatccacaaggctttttgtttggggcggggggtggttgatgcctctctctccttcacagttggcagcggaggcggcgaagtcggcgctgggctgtagtgacgccctccgcagctccggacggcgcctgtcagcgctctccctctcgccggccggggccgaaggttggactgcggtggagctagggctccgcgagcccttctccacctcccgcctggtccctcacactctccccgccccttccccgccgcacaggcatgcacacacacacacatacacacgcacacacacacacacagcgcgtcgccgaaacacaaacagagggggagggaagaccgcgagctggagcagcactcagaaactttgctcgacactcattgatccccgcactttagttcgcctggactccccctagctcccagtcctgtcaccttctgcccctccctcgccccagccccattgggccggagctgaagcagccccgaccggcactcctaccgcgagcgccctccgccttgcccggcctccgactggcttctcgggatgctaatcacttcagcctcccggagggctgtaggcggtctggtgtgggagcacagcgaggcggaggcgctaaaaaggggggtgattttttttcttttcttttttttttttttttttccttttcggccaaatcttggccggcgtcagagcaataacagcaaaaggctgccgcagaatagatgggggtggggtcaggtttgcagataaataactttagtggcagggtctgggggaagaccgttaggttgttatgctagtaataactcaggggtaagggggtcgagagaaataaaagaaaggcggggggtgagggtctgttaaagcggggaggaaggattaagcaaagcctgtctgggaatgcacagtgcagatttgctttaaccatttcctgccccttc

SEQ ID NO: 316895 - DNA, 4001 bp, Homo sapiens
taaggctgcttagccttagtctgcaagtaaattaaattgtgattctttattttgggaggtcacaatcatctggaaatcgatgaaagctacaaacaccctaggaaaatggacacacgcacaaaattttccatataatttcaggtgatcctaggctacctctccacagtctaaagtggagagaaaaccttggattctgttagtcttcacttccactttcgatttttgagaccattttttttttctttcctgctattaaagaatggtgtctgaatgaacgatattcaaaagccagagaggataaaaacactataatactgctaagtaaaaaattcagggatataccctcttgcttaatggcttaaccattcctcatgcttctcctagatgagtggttctcaccctcagctgcatactgcactcaaatggagagctttaatcatttatacctgatgtctgggtgaaatcctaattttagtgacctagacatcaggacttctaatagtttttagtttaaggctaataagcaaccaaggttgcaaaccattgtcctagacagtcctggtgtttccaactcatgtgaactgggtgtttctaaattttcagaatggagggagggagaagatggagtgctaagatttgaaattcaacgtcactgctttaaattgctggtcttgagtgtggcctaacagtgaataccctgggcatcctccaatcgcctggctgagctatgaaacacccctcttttctgtagacaatggttctgcataatgctatgcaatttctgagaattcctaaaagttgatttctatgcttaaacagtagtcatttgaatgctttatttagttggatcatttccacaagaaacgggactgcctgaggtttgcagatatccatgactttccccaacataaactgacaaatacgtggaatgttaatattgttttaaaatcactagcaaagggccctgaaccatctccacaaaagtgcctcttcagcttatgctgcaccaattatgggcccaaaatggttctcacagttaaaccaacttttcctgaggccccctttattcgagctcatataaagaaatccaagagagaattgctgtcttataacaaaatctacatccagtaagtgttcagggcaataaaagttgcaaggaaaacgataacgacacatgaagagtgaaggttcttcagttctaaacttggcttttctcccaaatcaaaccagtgaagaaagccgggggtaaaaggaaccgggtagctgggagacgctgcagttccagccaggaagccagcgagaggtgcagaggatgggtgggtgtctgcacggagagccccgaacaggcccgggggagtgacgggggacgggaacaactactcggtgcagatgggagtccaccgcaggtggccggccggggcacccagggcttcgaggaggtagggccgctctccttagaggcagcagcgggagtcccagcgcggcggtggggccggcccgagggcggccagtgacgccggtagcgcccctcctcagccgccaggccctcggcaggggacgccgcccgccccgagagcacgtccgaggcggcggccaggccggctctgcgaaggcctcgcagcgggcgggcaggctgcgggagcgggcggcgctgacagctgcgcaggcggctactcgcgcggcgacggcacggggctgcgggcgcggcgcaggccaggccgccccaagaacccagcccgctccccatcgccgcccgcaccgcccacagcgggaggctcagcgctccgttaccttgtcgcagtagagccccaccagctgcttcatccgccagtgtggggcggtgaagacgtccacttcttcaggaaagggcgccatcgccactgcctcagcctccgcctcagcagccgcggccgccgcctctccatagacaccctcgccgcggggcagaggcggcgcgcccccttgcgcatgcgcccgccccgtcggcgcgcgcgcccggtcggcttggccggcggggacgcgggggcgcgcaggccgccgccatgcgatccctgcggcccacgtgaccgggcgcgcgcagaggctcgcggcttctgcctcccgcccccactcttttcgttttttgtcgtcttcataagccgcagaaggaacccaaaccttttccctgtttctttcactacatgaaagcacagtagctgagggtaggggaaagtcgttgcagtggcgctctcggcgcttctcccgttgctgccctgcccaccacggccttgaggagaggcagccaagcacaatggccgcggtcagggccgcgagctctgcttgtgcccacgccccgacgcctgcttggcctgggtgaccaatgcttctggccaggacctccggagctgcccttcgcctccctgcgattggcccgtgccagatttttcctggggccgagcgcagaccaccccggccgccactcaaaggccgggcctggctcccacccagcggttggtgaaccagagctgcgggctctgagagcttcggtcccgggcggcagcccacagcgggcgcggggcctgggtgcgaggggcggggcagagaccgcgagagagagttctcgtgaaattcgggagactcaacgtgggggaaaaacagtatctggggatccaggtgcggaaatgcacctcaagtgcaggaacgcgggtcagggataggcccgacgggccttgggggtggggagaagggtgaataatggaaggttggtgcgggaaagaaccttggtacaaatcccgccattttaagcggaggttcggagagaaaacaaggtcactaacccaggaaaatgtctgcctctttcccataaatcgcctggccctggccacagacctcctggagactctgttctctgctcacgccggtcagtcttagattggttggctggagtactgctggacagatagagaaataggagaaaacagggaagcctgagaaccttgggaggaattgttatttgcttaatggccagaacctccaggagggcaagaaccagatatgctgtgttcacccttgttctctattatctatcacagttgcaagacaacatggggatcagtaaatagtcaacaaataatggagtagaagaaggtgagaaagaactttgcagtggaatgcaccctatttagttctaatcttatattactatatgctattatagacagtgtgaacagtggttaaaccacagactctggaagttaagattcctggttttgccagacactagctatacaaccgttaacaagctatatgacttctttatgcctcagtttgctctgacatgaaatgaagctaataatacctacctcagaatctttatgaggatttatatatttgaagcacttataacagtaccgtctgtaagctagtaatacttttttaaagcaactctatgaggtagtgctgcaggaaattaagtcttcaagacattctagtagttgcctagggtcccacaaattagtaagtcaaaaatctgtcatataaatctggatctgacagtacccccagagtcattgcattagttgggatacagagatggcttattcacagtctgtcttaagaagcaggaataaggcttaagaaatagaataataataaaatatttgataaagattaatttctctcttcctccttctccctttcaccccgtttctcgttcttttgccaggactttgcctctatattttttaataacctccagagagcattttcttatttaccctctatttctttacctcatactaatctttcactccagctatcttggaatgcagaatcagacctcaggtgaaccagttatatagagaaatgagctccatgagaacatgcactttgttttatcctcagcacttagaatgatgtctgtcataaagtgagtattcagtaaatatgttggaaaaaagaatgagggtagttcatagcactgtgtaatttcctcatttttactaatgtttaatatgctatgt

SEQ ID NO: 316896 - DNA, 4001 bp, Homo sapiens
ttttgtggatggaagtaattgatccaagggccccaagtaatattagttaatttgctgtaacttattattaaatgaagttacgctgcaccctaattcctgatgtacagaaactgataatatttgttgttttaagctggggtaaatttgggggtaatttgttacccagcaatagacaactaatgaagtacctcatcagacatattgtcaggttaattggctaaagatgaatttctgacccaatatgaaaaaaataataaaacttatgcattctttattctgaaacctactctgtttcacatatcattttcgtgaagggtagagttgagaagtgtgtagagctcctacctcagaaatacattacttcaaacattaaaagaaggaagaggaaagctgaaatagaaaacataaattgtcttcactttaccgtaataaaaatcatgatatattcatttgtggatatacacctaggagccttgaaaatgaatattttacttgtaaaacaagtagaatcaattattttattagtaaattcatacagaacctaaaaataaaactaaaaaaattaaatgactgaggattgggatccatttatgtgattttgccaaataaatattgagaaccttctacgtaagagattagaacccagtcgctgagaaacaaataaaagacaagtttgacaagttttataacccaagtttgactactgtagcagctagcaatccatcgtgatcttaactatacttgtgtttgcattcatattactggaaagtggtaaagaaccaaaaactgtctaggaaccaaaataacactcgacccgaaaaccaacacttggacctgaagaaagtaacccttgtcatttctcaggtttatttcacaatgacgctgggttactacttggagtcctaaaccgaactacaccccaatggcctagaaacagaaggaacacacccagttccgcctcctgacagtgattcctcactttaatgagccaccactactgtcactcaagatgcttcgcactgtcattggtcgcaaactcttgctggtcggccagtttcggccaactggcaagcactggttgtctttattttcgagaaaagtgaaggtgaacagggaaaagagacaagagatctaaaatatctaggttgactcctgtacctgagcgacctgcgatctccaccgccgccgcgacgaattggcctctgggcggggacttttagccaaaaggaaaatggctcagccgggaactggtgcccaggccatggagaagctgattcaaactttacttgtccacaccggtagaggtgaccgcgatgagaataccagaaacagcactacgaccctcagaactcagggtacctccagctgcaggggccagaactgccgactatcccaattttgacgtttcctattgttgccggaagtgacgttaggctccgactcttaacggagacgcatttttatttctgttgtttacgattcgctatagattccttgtttctcacttcgtagcacgagccactctgaccatcaagatcagaaaaacttctcagctgcaagttagaagtggactggccattgaggaggctctcagcggagtcgctcttcacaggagtcttgaacgcggtgtggaatcggcagcgaggaatcctggagcacagagaagctcccagctttgaaggtcttgcggtggtgcgtggcgggcaggaacccacaattccaaatacaaacggtcggcgcgagaagcgcttctgggcgcaggcgcctggctgtagcgactggttgcgggaggctggactctggtgactgtgtatggttgcatatgctccgttttcctctccctgtcgtgctgggcctttgaaaccggcttctttgctggtggctgcttggtgagccccgaggagacggcaaggctgcgcctggtattgggcggaggtcgcctctctccgccgtccttacagagaccccgggcggagacgaatgaccagatccgccttttcattcttttaaatcaaatggcgggaggggagccttgcttatatacccaactagtatatgcttttagtcacaacgaagtgggaagtatcgtggtagctcatcctatcagaattaggttgtgacttagggttggaaagttataggcttactgattcctattggatcctctggggtgaggatacaaacggctcctgactataaggaagacaggacagcagttcgtgttttccttgttggcatttccccagcttttcaaatatttctccacctttattgaaggctacagatttttccctcactgtaacaagttaatcttgaagttgttattctcttttactctggaattatggccatgctagactgtttttttcccgaattatctgcagaccttttaattttatgtgtgaacacagcagtcccgttgaactctttacttgtcccttactcctccccactcccgcccagctttctcgatgctttgcctttctcagacctttctcctatctcttagagaagtatttccctaatatcttttgcagtttcataaactgtttttctcatctttacttttttgtttttgatacgtgtttttagataatatcgagcattatgtgctatgtcacaaactcttagccattgactgttattagagtcagtgtagttgcttcattctaaacaaaaatcactctggtccagtgacattctattgggaggcattgttttaatgacctctaacagcaatgagattgagcgatgttgaaaatcctaaactgctagagtacactattttcacaacctctcccacaagttcaattgcgcagatctgacttgtagacaaggaaggaagctagaaaggaatattgagagcttctttattattgaatctatgctgcaagctgagtggtatctccttttttccttagtttgcctttgatcagtgctataagttgaaaatgttaaatttttaaaagtatttttcattaatgaaagtaaggtgttaaaatgtacataagtaatagattggcttcttttaatgtcttgtttttaaggcttttgaattttatagtagacttagtaaagccctttgtgagaatgtagagcagtagctgtaattttattctgtgataatcccaattttaaatccctttatttttctgtctcctatcacttacctcgttcacgagctctgcttgtattactcttcaaaatatttattcactggtactgaagagagacataactttgttgtcagaaattccattatcagaggtagaaatcatgtaagagacactgaaatgttttccaaaatgtcagaaaaaggaaaggtgagaagatatcataaagtgttacgtaaaacagaattacttgcactgggaaaatggaatatacatctggaaggactaaaggaagtctggaaagacatagaatttacattaaagttactgggaagaaggtatccctagaagaattgtgttacgatagatgggtctggaacccgaaagaagctcagacctactatattggccagtggcaaaatccaagaatacattttttgcggttaaagccagagtagtcctcacttcatgtttttcaggaaagtaaaggcttatcttgggaaatcccttttaggcttccgtgtgtccatctacccccagtcagtctaaaggatattaaatagggtttaccttcttggccagtgttttgtataatgtgatttcaggatgactttctctttttctagttatctcccatttgacagtacctaaaattatctctgtctagaaatgtaaatgtttagttgaagtaatttattggctgaaaaatagtgactaaaatgtgcatgcacaagtctataaagtatattcaataagctgttgcctaccatgttgataaaggagactaggaacagaaaggtaggttcataaagagggagcagttgctctaccctggggaaatggctgtggaaatgagtggcgaggggcttaaagtaggaagcttactaa

SEQ ID NO: 316897 - DNA, 4001 bp, Homo sapiens
gctattacaactgcaaggctataatttaacataacacagtaacctagaaaagtcaaattaaatagtgaccccagaaagccctcaggaaagccttacagttctctattaatttatcttacagaatcttctcctatgtcttttaaacttaatgtccatgttagaagacaaagacaggaaatatatactgtaacataatgaggcaatctcccatatgtacttgtttattaaaaatattcaataaaaaaattaacttgattattaacatcttaaccctttaattttaaaaagccctacacttctttttctcaatttttaattttatttgtattggtattttcttttacaggggtataagataataaattagtttattagtgactttaaagctattagaggcctctataaaatactcaaatcagagcagtgacctcattcagaagaagctactaaaatgacaaggtgaaagcagacaaaataaaacaaacactttcttaaaacagtaaagtacaaaagtaacaagagggtgctggggatatttgtattctgttttcgatgtttaaactgtattacattttaacctcatgtaaaagttttccaacatggctgccacttgtttggcgtagaagtggaaactactcaaaaagaactaagctaactagaaaatatgtttttatgaaggttaagttccagcaaatagaagattctctttattaaggaggaaaaatattcttccagtgttatggattattctatttaatagaatatttcccctttagctaaaagaaaaagtacaatacaattatgtgtcaattaaaaacaaaataaaactttaagaaacgcacaaaaagatagaaccctaacagtgttgatatacacaaatacactcatttaatcccaagcagtggtttgtttgtttgtttcaggctcataaacctatgttagatctaaaaatatatcactctaataaataatttgaaactggcaatttaaattaactcaggaaatacaaaaaattgctcatgttaacagggttaaaacttgttgaccagggagaggagtacgtaatcctgagaaacatccaatagatcatacaagttctacaaaatgtttgttagttcaggattgtctatatataaaccatatcgtaactgccacacaatagcatgctatttttattttatataacagcaaaaagtagtgttcctattaagtttgaatgtaaggaatagcaatttaaaaaaataatacagcttaagaggccaaagaagcctaaggatttggaacactttttaacgaatgaaatgctgtatttcccatgtataaggagaataccatcaactttttgcctttcatgcaaaaactacaaatttacagtgctaatatttgtcaacgtatttcaaaacatacctttttacatttactaattttagataaatctgcaggattctaatttcatgaaaaataaatgagagaaaaaggtgaactgggtaaccctatcttctaggctctatatcatattataaaactatcacttatataagtgtttactggctacacaatgcattgatagttttaattttaaataaaaactgaaatttgaggcatcttttcactaaaagaggccaaggtacttcacttaaataaacattcatatttttcaaatgtgtgagacttacccgtcttcgacaaaaagggaggccttgggcaatgatgctaatgctaaatatcttcatcacagtttgatgtggtagaggctcttttgcacttttaagatcaacaggaaccaagccatggtttagagtaggttttcccggttttgacattttaaaactcctcttggttgacgaatactctctacatgtaatacaggcacattactaaaagctctaaccactaaattttaaaaatatatatttaataatagtttttaaaaggctgagaacccaaggcctgctgcttttgtctttcaaccttcccctaccaaatgtcctgacctgtctgaggcttggtgaagtgcaaactatcctagaatagccaggaattataaactactgaagtgaaagctcctgctcctgccagtcaaacagctggtgaacctctcatacaaagtcagtaatgtgaacacaaccaaagcagggctgtgctgtaaggtcccttttaatatttctccaactaactaatctaagagtgtttcctagaaagtgaaagtaaatttttacttacaaaaataaaataaaaaaaacaaacattgtatcttgagtatctattaagtcttccttatccaaatgtcagcattaatattttaggaatgttttgaattctgttacaaattttgttttgaattttttgaactgtgtttacgtatggtttaaaaaaaacacacacacatatgtatgtttgttctaccttagatatattataatgagcactattttcaagtgtgtgctctctttcccttttccatacacaccattctttatctcatactcactagacattaaatactgtatactctggttctctaatagctattaatacacacttcagattaatctttgtaccagagttttcaattgtcaatctttaattctgaaaaacttattgattatacttgaaagcataacagtcacccaactgattaaagacatgtaaaaagtgtatttatttataaagtaatctatgatgggaagtaattatagtaaaatgggagagtaactagccagtccattgcaaatccctagtgcctaatttctccttcacagtatggtcagataaatcttcctaaaacacagagagggaatgcagtgtgccgtttactcctcaagaaccttcaatggttctccacggcctaagataaagtctggagatgaagactctcttcaaagtggccccaaactaaactttccagcattatctcaaatatttccctaaattaaccatttgtgcaagtgttaattaatctttatactataatccatattcctaacagatagtagataatgattgtgaactatccattcacagtgctcaatcaactattctctctttccattctattttcttcttccaacagccagtcagctccacttatctctccttccaacttttaacttccaagcttttatggagttttatagcaggaattttgacggagacaagaaaggatttgaaaggagaaagttagaaatgggtgatttctttttgactttggaaagattagcattgctaaatattaaagtgggctgctgggaaggcaatctatgcacaagaaatagtcccattcctattagtagacctttctcttataccacaatttaaaatgtagttaaaaatgcaaaatcactggcagcaatgctacacaaaaacagatttctccaaagatatgtaaatggtcaataggcacatgaaaagatgctcaacatcactaattagggaaatgcaaatcaaagccacaatgcgctaccacttcacatccattaggatggttttaaaacaaaacaaaacagtaaacaacaagcatgggctaggatgtggggaaatcagaacccttgtgcatccttggcggcaatgtgaaatgaatgaatgtagctgctgtagaaaatagtatggcagttcctcaacaatttaaacataaaatcagcacatgatccagcatttccacttctgagtatataccttaaataattaaaagcagagacttgaacagatacctgtatacacatgcttatagcagccttattaacaatagccaaaaggtagaagcaactcaagtctcaatgaatgaatgaataaacaaaatgtgacatatacaaacaagggaacattattcagctctgaaaaagaaggaaattctgacatatgctacaacatgcatgaaccttgaagatactatactaagtaaaataagtcagtcaaaaaaggatagtgtatgatccacttatataaggtacttggaatacttaaatttgcatagatagaaaacagaatcatggttgtctgag

SEQ ID NO: 316898 - DNA, 4001 bp, Homo sapiens
ggtcctaaagttagtaagcaactttgacagagtgcaacctacattcaaactatagtttgtttcttagtttgtcctcccctccttcccaaaatacagcttctactgtattttgggtacagtattttagaaaatgactacatttctctttgcaatatcttagtgaaaaacagaatacgtgactctgattctaacattacatccactattcagtattttcatgtcagtacacatttaaaggacagaatttaaagttccttaccaaagcataacaaggcaactaaagaaaaacaattcagtgggagaagttccagaggagggaaaagtggtcaaatgaaagacattattctaagacaacagttggagaaactgatggtagaaataatgaaagtccataaaattaagaaaagatgaactgaggcttgtcctgataattcttgaaacacaaactctgactgtgtcctgaaagtttagggacacaggtatggaatatgtaaatgaactgtcacataatacacaggctaataaacttgcagaactcattactttaaaaaaaaggaccaaacattgttaagtttgagaaagttttaaattaatctaatcaagatcctgaatggagaacttcgaaaagagagataaccccaggcttacattcattcccacaaagtatctctcagcagtggcttcagacagaacgagcccacagttgtctagacggaccacaattctcagtatactactgtctatgtcttcttacataaaattctgctctatgtttaacccttaaggtctgtatatgaaatattaattactttcataaacctttaatttggtactctgacaagatacctaaaatacaagtcaaaggttttataaacttcagctttaaaataatggaaggaaaaaatcattcctgacttaaatatcaaagatgtatcctaaattgatacagaaataaagataattcaaaaaagcaaagcctcaaaccaaataaaaaagtgctgtaatttgttactctaaaaaaaaaaaggggggggtgaaagggaaaaaatcacaacttttataaaatgattaatgtgataaatgctcttccccaagtaagttgtgattcctaacaactcaagttcctgagtaactgacatctgttacagtgtcctcctgacacacatgaaattggacccagtaactgagaaggttaactcctgtaccaataggtactgaaatgaacctctctcaaaacaggtttgttgttgttttttaaaaaaggaattttactttcaggggtccacaggttaagtagttctcattcgggaacctatatgagagtacccccgaaacaaaaagtacaccgcacacacccacagtaccaggaaaaggttacagatacagatggcctctgtgcgcacatatgctctggcttcctcaatttccctttgccaactgctggccagaaaggtgcgagtattcactttggagaaaagactcctccgacagaaacctgcatacttgcattactcgtacaaagagctaaaaagttacaaaatacaggcctccctaacaccttcccccctccgtgaataaagctagactccctcattgatagactcccaacactactggagaacatcagcaaaactccaggaggaagcgccggcatcctcccactttctccccctcaattccctctcccggggccactcacacttttagaaaagagccgcggcgccgagaaagtgggttggttcccttcctccttcggactgaagcggcagctgcggaaggctccggcgcggtactgaggaagaagcggtgctcgtgtcgctaaaccaggcggcaacccgggtctcttccgcgctgccaggggaggggaggcggcggccccgcttacctcctcttttcctcttcctgggtcttttcaggctgcggcttctgcccgtccagggccacttctcccgggacagtcaggtttgggagactccggattttgtttttgtaaagtttcctctgggtggaggctgcggccggccccccgggtcccccccggccccgccgccctcgggactggggcgggggaggggggctctaggaactcctcccggagtccagccaaggagccggggggccggcgactggccaagggagaagacccccggagggggctgaggggagggggaaggtgaggaaaggacggcggcgtcggtcctgttctctccgccgccccagccgccgcttcacatcggggtccccgcccccccggccggggggtggttgccgagcttggttggggccccggttcatacactccggggcaagatgctacggccccgggcgggtggccgagtcggcggcaaggcgagggacccggccggctccgctcggcgccgcccccgctcccggctcccgcatgtgtcgctgcggctgggacccccctccctacaccttgggggtctcgccccacgccccacgggacgaggcagaagctctggcgcctcctcagcgttctctcaccgcggagcagctacccactcccggcccgtggtagccgcctccctgccccccaagccgccggctccggctcaggctcgggctccggctctggctccggctccggcgtgtgcagccgccgctgccggccgggaaggtgagggggggaaaggagtgcggccgcggctcccgctggcccaggtgagagcgaaggtctcggcggcggccagtgcagggggactggatctctcggatgctccttcgctctcagtctcagcggcggcggcggcggcagcggcagcggcagcgcccggagctcagctcgctgtctccctcgctctgtgcggggctctcgcctcactccagagagaggggcgggaggagagcggcgcctgccgatgacgcaagtcacctagcaaccgctctcttccccctccctcttctttccgctctgaggcttcctccgctggcctttttcccccttccagccaccccgccctgggcgcctctggcgcgctctgatgacgctccaagggaagaggaagtggggatcggcgagcgggtgggtgcgcctcgggccgcgggactcgcagccgccaccgccgctgccgcctctacggccgcgtcagaactgaagagaggaaggggaggagccgagtcgagcctaagctgccgcccgatcttacccctgacccgagggcggcctggagagcttggtctgtagcggtttccttcggggcaggtggggactgctcctttgggaggaaggaggaggcccaggccgcgtcttcaggcagctgcgcgcaccacccgaaggtgaggcatttggccccaaacagaccctcgaaaagccggactgatcgaggagttaccctacagcctgatctgcacctgctccagggagagagcgccccacccttcccgtggcgtggggtgagacccagcgttggataacgtgtggtcgggccgagcaaatgtttgatgaatgaatgaatgaatgaatgcctctctcacgtggcactcgtgaagctcagaggatatggtggaagtgcaagcgctttgtaaactgcagtgcattgtaaaaatgagttgtaatacattcctcccctccccctagccatgaaaggaaacaggggtgcggcttgagtacagagtcacaacctgagtctttagtggaaaaggagacgaaatgccgagcaagggaagggacccatcctcgcgcagattgttagggcggcgggaagggaggattggaagggagccatcctctgggagattgctgaaggatttttgactgtcaggggaagaatttaatagtccctcacttttacgaatggttctttcttacggtttggagctttcgagagcttctggtcttggttcatcagtgtacgttgtcatcaagaaatgttggcctgtttcaggtctgactcaaaggttattttctttctaaaataagtgttattactattatgcagcttttcctacagatgttatcctggaaaggaaagttaagtaga

SEQ ID NO: 316899 - DNA, 4001 bp, Homo sapiens
tgaaatattctcatttgactatatgtatattttaaaactagaaaataaaatctggtaagatttgactttttccatttcaacaacccctttttaagatttgtgtccactaattaatcactgtattactgcaagttataggaggaaaaacactccaaagtgatagagagctatcctcatgtttataagtaggtaaaaatccttgctttgcagcagccttattttcctacctcttgccttacatgggaacatcataacatagcatgatacaatataaatactaaagagacttaaaatgttttagagccacactgaataataaagaccatgtttttgtcatcacgaagagttttctaaaatactaggatgatcttacgacattaggggctagaggtgagggtacaacaagctcacctacaatttataccttagttcatgccatacctactggaaagaaatggaattgatctggctggtttcttccctttagaagtttatatactcattacattgttttaaagtgattcctctcagaaaccattattttctttctccaaataattttattaaaaagcaaatataaatataaaagctgaagtatataggtagccacgtgtttccgtgtatataatttatagatacacacatatatatataaacatacatgcaaatgaatccatcaggaaggtcagtcagtacagactatgttaaaatctagttttttgataacttccacaaattcttatcttcataattaggagaaactttgatatttattctaattaagtttgtaatactggctttcagaacttcccaggataccttgtaaaaaacattggtgcaaataccatttgccactaaaagcaaactttatttccatcttagaaatccttcaatgaataaacatgccccaaaatgtgtatcaaggaaaccactgagaaaggattttattttaaaaatattttataaaggaaagcaccttctgtatgactatagaagtcttttaaatactgtactgtttactgaaaatactgacttcagaaccaaaaattaattctgcaatttttgaggggtacagaaagtaaacatgatctctttaaatataaatcccaaatagtctcatgattctatacttttaaagagtcaactaatgaaaaaagaaaaactgtatacaaggtatagaaaaattgaaggcaaaaggttcactaaaagccaactaaggatagagtatttccaggtcagcatttaacagagccacatttctaaagtctcaatgtatttttagtgaaaaattctcagattaaaatatacattttatcttaaatttaaagctttttccagctcacagtctttccgttatttgcttacattcatgatataaaacagaataccagacatccagccacccaccaaaattagaggatactgcagccatctctgatgatacagattttccttctcaggcaggcatacacacacaatcacatagcataggaagaaaacagcttacttactttgtaaaaaatcatttttaatgtgccgtagaaacccatattttctgtatttttccccttcagtgattctgtgcccccgtgtgtccggctgcttggcagtctctgacaatataaacctttttcaggtaggtatgtcacagattctaatgtggacatgctcaggcacgtcagaaaaggaagattagggagcagaaccggcaacaaaactccacagtaaaggcaaatgcagctcagtatcaaaccgcttctcgggacacacatacatacatgcagcttgactgagaagaactcgagggaataatgagagagaacggagaagattattggaggagactatgccctgtcaaagccttgactgaacagattcctccctcagcagcagagggatcagattacatcttcccttgaacacagaatggtgcagtccaggattcagcaatgcagactgcacatcaattatatggtgatccgctccagggaacccgtaagaacacaacgcactgaacagagggaggatgtgggcagcagagaccgcccccacacgacagccccctctcccctttcaaactttcaagaggttatttttgtattttgtaaaacctgcatttttgaagagttttaaatagcaaggaacatttccacaaataagtcttttcagaaacattttgaaaataggatatattttcatacggtccccctgaactgaggcaaagcatgctattttcactgtcatcctaccgtagtcctggcacagactaatcagatttttcaagtagcttggatggtacaaaacaggcaatcccgaaaagagaaattaatatactctggggttgactgacaataaagtaaactggtttggagccgacagcatttgcagaaattatgtaatctaagttatatttcaaactgcgtattttggtattgatttaataaaaacattgcctatgcttttccatttcaatcctttaaaacatagtaattttcagggaaattgccatacacttcatcaattcttactaatcataagaatatctttgtaagattaacaaactagtactacctaagtgtgtaaagtttggccaaaaggctattttatccccaaaagagcaaacactgtgctggctggagaggcttacttttatttgctaatttaatctggagtaaacaggaggcactagacttctatctccaaaattattttgacaatctatattgcttatcattaaaaaggcattttacataataaagatgccaaagtttgccagaaggcaacatttttcctggaatgactactacacaaatctagatatttcatcttgcaacttccttcacaactaccttcagggacaattataagattccttgagctagaaaagcccattattaaggttctagttaatttactcctaccctccccattagtgttctttattacaagtaaattgtgtgcctatagttaccactattcgaagtaagtttctccagaaaaacaaaacaaaacaaccatttggacttactaacattttaatactctctgctatggtggtaaatggctttctttagtaaaatggttctaaatactgcataaagtagtatcataattttaaaaataaaaatgtttacctttataactaagacattatgtcaatgcaacatcttttactttaaaacataaatgaaattaagataacgtaaaattttatgaagatgtacatcttgagtcttctagaaattatattctactgtctacttatctttaaaaaaaatctcctacctggctcttaaattaattcttaccctcaggaacaatatgtatatgtactcagcagaagttagttatctaaataatctcacttcgaagggaagcaaaaaaacaaaaaaatctaattgttaggaatggacccataaactcttttgtcagaagttctgaggactcaagatttaggaaagggggaaaaaaggtgattttcctcaatgttctgggctatgagaacacctgaaatttcatccagaatttgtcagtggtaacaagttttccataagacacgtgtaatactagtgctataatagtatatactttggcttcaactgaaatcatgtcctatttctagttgaactaaccttttcaaattaaatctactcagttaagaagagaccaactttaatgaagtaggggatactgtctcaaaacctaaagaaaatatctcttaactttgtatattcaaaggactgctcccatggttatatggctcctacttagggctgtgagttacaggaaaacctgttccctacaaatattgtttgtatgtgggtactgtcctgtagatccatgttttattaccaggtttgtatgcttcaaacatcaaaatgatatacaaaaaattctacactgagaagtctttctactaccacatatcctccatctaccatggttcccatttgggaatgatttttattgtttatcctttaagtgagaaatgcgaatgttta

SEQ ID NO: 316900 - DNA, 4001 bp, Homo sapiens
aaaaaaattagccaggcgtggtagcacatgcctgtagtcccagctatttgggaggctgaggcatgagaatcgcttgaacctgggaggcggaggttgcagtgagccaagatcgctccattgcactccagcctgggtgacagagcaagactctgtctcaaaaaaaaaaaaaataccgtaatttttaaccaatccataagcaataaaagtaggtcctaaagttagtaagcaactttgacagagtgcaacctacattcaaactatagtttgtttcttagtttgtcctcccctccttcccaaaatacagcttctactgtattttgggtacagtattttagaaaatgactacatttctctttgcaatatcttagtgaaaaacagaatacgtgactctgattctaacattacatccactattcagtattttcatgtcagtacacatttaaaggacagaatttaaagttccttaccaaagcataacaaggcaactaaagaaaaacaattcagtgggagaagttccagaggagggaaaagtggtcaaatgaaagacattattctaagacaacagttggagaaactgatggtagaaataatgaaagtccataaaattaagaaaagatgaactgaggcttgtcctgataattcttgaaacacaaactctgactgtgtcctgaaagtttagggacacaggtatggaatatgtaaatgaactgtcacataatacacaggctaataaacttgcagaactcattactttaaaaaaaaggaccaaacattgttaagtttgagaaagttttaaattaatctaatcaagatcctgaatggagaacttcgaaaagagagataaccccaggcttacattcattcccacaaagtatctctcagcagtggcttcagacagaacgagcccacagttgtctagacggaccacaattctcagtatactactgtctatgtcttcttacataaaattctgctctatgtttaacccttaaggtctgtatatgaaatattaattactttcataaacctttaatttggtactctgacaagatacctaaaatacaagtcaaaggttttataaacttcagctttaaaataatggaaggaaaaaatcattcctgacttaaatatcaaagatgtatcctaaattgatacagaaataaagataattcaaaaaagcaaagcctcaaaccaaataaaaaagtgctgtaatttgttactctaaaaaaaaaaaggggggggtgaaagggaaaaaatcacaacttttataaaatgattaatgtgataaatgctcttccccaagtaagttgtgattcctaacaactcaagttcctgagtaactgacatctgttacagtgtcctcctgacacacatgaaattggacccagtaactgagaaggttaactcctgtaccaataggtactgaaatgaacctctctcaaaacaggtttgttgttgttttttaaaaaaggaattttactttcaggggtccacaggttaagtagttctcattcgggaacctatatgagagtacccccgaaacaaaaagtacaccgcacacacccacagtaccaggaaaaggttacagatacagatggcctctgtgcgcacatatgctctggcttcctcaatttccctttgccaactgctggccagaaaggtgcgagtattcactttggagaaaagactcctccgacagaaacctgcatacttgcattactcgtacaaagagctaaaaagttacaaaatacaggcctccctaacaccttcccccctccgtgaataaagctagactccctcattgatagactcccaacactactggagaacatcagcaaaactccaggaggaagcgccggcatcctcccactttctccccctcaattccctctcccggggccactcacacttttagaaaagagccgcggcgccgagaaagtgggttggttcccttcctccttcggactgaagcggcagctgcggaaggctccggcgcggtactgaggaagaagcggtgctcgtgtcgctaaaccaggcggcaacccgggtctcttccgcgctgccaggggaggggaggcggcggccccgcttacctcctcttttcctcttcctgggtcttttcaggctgcggcttctgcccgtccagggccacttctcccgggacagtcaggtttgggagactccggattttgtttttgtaaagtttcctctgggtggaggctgcggccggccccccgggtcccccccggccccgccgccctcgggactggggcgggggaggggggctctaggaactcctcccggagtccagccaaggagccggggggccggcgactggccaagggagaagacccccggagggggctgaggggagggggaaggtgaggaaaggacggcggcgtcggtcctgttctctccgccgccccagccgccgcttcacatcggggtccccgcccccccggccggggggtggttgccgagcttggttggggccccggttcatacactccggggcaagatgctacggccccgggcgggtggccgagtcggcggcaaggcgagggacccggccggctccgctcggcgccgcccccgctcccggctcccgcatgtgtcgctgcggctgggacccccctccctacaccttgggggtctcgccccacgccccacgggacgaggcagaagctctggcgcctcctcagcgttctctcaccgcggagcagctacccactcccggcccgtggtagccgcctccctgccccccaagccgccggctccggctcaggctcgggctccggctctggctccggctccggcgtgtgcagccgccgctgccggccgggaaggtgagggggggaaaggagtgcggccgcggctcccgctggcccaggtgagagcgaaggtctcggcggcggccagtgcagggggactggatctctcggatgctccttcgctctcagtctcagcggcggcggcggcggcagcggcagcggcagcgcccggagctcagctcgctgtctccctcgctctgtgcggggctctcgcctcactccagagagaggggcgggaggagagcggcgcctgccgatgacgcaagtcacctagcaaccgctctcttccccctccctcttctttccgctctgaggcttcctccgctggcctttttcccccttccagccaccccgccctgggcgcctctggcgcgctctgatgacgctccaagggaagaggaagtggggatcggcgagcgggtgggtgcgcctcgggccgcgggactcgcagccgccaccgccgctgccgcctctacggccgcgtcagaactgaagagaggaaggggaggagccgagtcgagcctaagctgccgcccgatcttacccctgacccgagggcggcctggagagcttggtctgtagcggtttccttcggggcaggtggggactgctcctttgggaggaaggaggaggcccaggccgcgtcttcaggcagctgcgcgcaccacccgaaggtgaggcatttggccccaaacagaccctcgaaaagccggactgatcgaggagttaccctacagcctgatctgcacctgctccagggagagagcgccccacccttcccgtggcgtggggtgagacccagcgttggataacgtgtggtcgggccgagcaaatgtttgatgaatgaatgaatgaatgaatgcctctctcacgtggcactcgtgaagctcagaggatatggtggaagtgcaagcgctttgtaaactgcagtgcattgtaaaaatgagttgtaatacattcctcccctccccctagccatgaaaggaaacaggggtgcggcttgagtacagagtcacaacctgagtctttagtggaaaaggagacgaaatgccgagcaagggaagggacccatcctcgcgcagattgttagggcggcgggaagggaggattggaagggagccatcctctgggagattgctgaaggatttttgactgtcaggggaagaattt

SEQ ID NO: 316901 - DNA, 4001 bp, Homo sapiens
gagaaatcttttgtgaaaggaagagtcaatctgtgtgtcaaacttcattgttgacttattttaagaaattgccacagccagcttagccttcaggaaccatcaccctgatcattcagcagccatcaacatcaaggcaagaccctacaccagcaaaaagattatgactcagtgaagactgagataattgttagcatttttgagcaataaagtatgttttaattaagatatgtatgttgtttttctagacatactgctattacacttaacatacaatgctgtagtgtaatcataacttttatgtacactgggaatccaagaaattcatttgacctgcctaactttgatactcattctatggtggtggtcaagaactgaacctgcagtatctctgaagtttgcctgtaatatcagtttggaaagtccctgatttatggatcttttaagctcactgttacattgttataagtaaatacattacaaagctttttaaagactatttaatttaatattttacattggggaaaatgtcaatttttaatatcattatcattttgaagtacctttgagatagtggagattctagggaaattttatcaccttttgatgtttcctatacatctatgagacaaaagaacgcagtgtaaaaaatgtagcaaagttttgatctctgcctttattttctgatactaatcaaaatttgaattcaaattcaaaaaagtaccagataatctaataattttgagaagacaggaatgtaaaattccggtcaagttcagacttctacaggcagattgttaatgtaggaaatcaagagtaaaaattatacaaacacacacatgcacacactcacacatactcctcacagacacacacatacatatacatagtccactttctatgtgcaaagcaacaatgctgggtgctttcagggatacaatgataaagcataatttcttccacttgagacttccacatggaagatggatacagatatttctgtaatgtgaaaaaaaagcgtgatatataccatatgtagaaattgcaaaatattttgagtatttagaagaagaaagaggcaggttgagaaaatagttttggagagaatagaattcaagcagggcctttacaatataatttctttcaactggtttcaagaattattcaaaactacattaagcaaataagtaaataatccacattacagactcttccagatcatatcttagagtcaggacacagcataattaccagctatctccttttatttttatacttatcaagtcatgatacccatagcagtttattgctgcgtgctgtagaataaatgattctccagataaatcagatgcatcttcctagataattaattttattcaagagtttatgggaaagacaaatgacttttatattaaaatcaacataaaatgttatggaatggaatgtaagtactgtatatattttaaagataaaagaggaggccaaagaaattggcacttgctcagactttagagaatctctggcggggcgtattccctctgtttgctgacctgatggccacaaatttaaaaataaacctgaggctctgttgtttcactctgtccacactctcccccaccagtgctccactcctagaaagattcatttatggtcactctaaaataaatatttactacagcagggtggtgattttaaaaaaagttttgcaaacagaatactaaaaatggttttctaattactaagtctacaaattcaagcaaccattacaatttagtctcaacaattaaaatttttatgatttaaagaaaaatatatggagagatgctatatatctatatttacaaaatagatatacaatcttagtttacaatgatatttaagacctttcttacctcaaacgtttcagtcagttctttctctctgacgctgttatgagaaatggcaagtgactggccctggaatattgtagctgttttatatactcaaaggtataatggaatggagaaatctgtggcttaaaggcctctcccctaggatcagttattactcatcaactatctcaatatgttgaaattggggaataaccaatgtttagtttcctagaaactaccaaataccaaaatcttttgtggtttttttctccaaattttgtgtcttgtatatttgaagtttatcactttacatgttgttgctccattgtctactctcacaattttttcctttacttcccacaatttaaaatacctctaagcattttactggtattgattataacctattgcaaagcatatttgatagtgctggaatcttaagaaaataaaaaatctaaaaattgtttaagatgggattaaaatcttttgcatgattcttctttcaacttcttcattttattatcaggattagagcttcgtagatgagtgaattgtatttttggagcaccacagcatcttgtttaccttatggaacactatactctatttctcaactaaaaattcacttacagcagaaaaggtatcattattaagtgcgggaacagaaactagggcccacaaaacattcaagaattaccttaaatatgcgtgcatattgtatatgcctttttcaagagtcataaaatttgagctttaactaattcgagagcttttaagaatattctgttattgagttcgatttctacttcaaaagaggttatatagtccagattgtagtagtagtgcatcaaagtcccttttcttctttttattttttctagaattcagttctcaaggcaactcagaaaaataatagcaggtaagtttttttgaggactttaagtgctgaagcacaaatttaaatgctttatatatataatataattaaatctcccaaacaaccaccttaagaggaaagtactatgatcaacaccatcccattttgagactgagaagcagagaatattagtaatcagtctgggtattacagctagtctctggcagatattgaattgagcaccagcaatttggttctaaaacccacatttataactggtgccttatactgtcactgttaacagaaggttagaaaaatcagcacaaagccagagaaacattaaactacttccttcacctataactcaacgtttaatcttatctcaatgatttaaagaaaactgcctgaatcagaaacttaatatattaaacctgttatgttattgtacatattttgaccaatttggggctcatagtacatttccccagggatggggatgacaggtgtgtgtgtgtgtgtgtgtgtgtgtgtgtgtgtgtgtgtgtattatccatttccttacctaaaacctgtcgttcaatttattctacttcaatttcttttatctgaaatagctctaatggaggttggcaattgccactgaattgtgaaaaccataaatgattttctgtccttgtgttacttcaattcttttgacatttaactgtgactatgcccatctggaaatctatttttctcttccttggcttctgtaagccaatttttcatgttctttttcttttaatagaaaccataagtcttattttctgattctttttctctgatttattatacttgacaatttatcttcttagtcttcactttctcttataaagtaatctacttctgactccttaagctatgccttcagctaaaactcttctctaattacccagaatcttgtatccaactgaataagcatcaaacccaacctattcaaaacctagcttactctttttccctcttaatatgctcctcacttttatttaatctttcagctgatgaccatcaatcactcagttatccaagcaatcaatctaagactcatcctatttttttcttgtgctttctcttccacatcaaatggtcattaactttttccttcttataatgctctggaataaatatcttccatcttttttgtcttttccttagtttagtttctcattctttactagagtgttacagtagcctcttatatagagtccctgtccgca

SEQ ID NO: 316902 - DNA, 4001 bp, Homo sapiens
ttgttgtttctgttataaagtcaaagcagtaaatatgtaatacttactattggctgaggaaaaatcgcctctcaaaatttccattatattagtggtcaacgaatgagaatccttattgttcttctgatattcaaatagtgaatttttgagcttatttattctgtttgtaaaatcttgattgacttcatcaatcaaccctttcatcctgcagccagaagggcatttgtagttctgaaagtgaagggagaaaattacagtaaggatctatctctcagattcagaataattttgcatgtttccatgcagcccccatttcttcctaccctatctcttccagataagttggcttaaaagtaggtaagaggactagttagaggtcgcagagaaactctggaatgagggtccacttagccataaattaggtgccaggaaattgaggccacaatactcaggagcctggttttgcctgagcatgcaactgaaatcctgtctgttcacccactaatgatccagagttggggaggtaaataaacagtgctcttgggagtaggttccttttctttatttgctatgtaggtaactattcaattattttctatttaaaaaagtttctgggaccaatcaggtcagcctgtgagcccctctagcatcagagggaaggaatctcctgcttcccccgctgactgcttacccagtcttcatcagagcagaagggccagtctgaatctttgcaggcagattgatgtctttccacaacccttgggccacgcacgcctcctccttcagctagaaagtcaccttcaccactatctgcagtctttaaagattcattcacatacacaaaagagagcaacagcaatgttagccagaagaggagacagtggcatgcctacaagtccccaggaagagatggcactctcacagagattaaggagagcagacacagggcttcggcaagcttcaggtttcttatcttcaaatggaaatcctaggacccattttatggagttgttatgagaattaaaggagacaaggtgtacaaatttcttaactgtgtgtgacacttaaataagcatttgataaatattaggagttttaaagaatccatcctaaaaggaaaattatttgaatctataaaatcagttaaattttaccttttcatttttactaatgactgcagacagaaagttgaaaactactgtagagctctttctcctgtaattgctgcttcagtagaaaaacctagactatcttaactgaatgttcctctctccttcaagtttctatgtaacctttagagatggattcataatttaaaagaataccattactgcggaaaagcgtattgccttactaactaatctcttctgatactgcaaagatatttccaaagataattcgtttgctttttcttctgtcttgacaaacacaacaataacctttcagcaaaactgtactaacactaaaagttctgcttattatggacaagtagcaagaaattaataactaaagaaaacaaatcttaccataaaatgttttattccattaactagcattataatgcaccaaggctttataggtacaaggatggcaaataattcttgccctttttaaaacaaaacaaaacaaaatgtggtaagactgaatgacagatgctaaagtttcccttgtgagtttgtacactctcatccatctaagatcttcctcttggtgtcatattaccctgtattcttgaggtgtcaagcccacccaggaaatttcctcccaggcctggggtcataaagctaagagtgtgtcaggacatagagcaggtagactctgacctccaggctctttgtggaataaacaccagagagaaagcaagaagaaaaaatgaaaagggccatacccatgctgtgcccaccacacttaggaccaggcagacgatcctcatggaaaacatcttttctaagggtggggctggctcctgaggagcactccagctgaaagaaaggattgctgccactcctagttcccatcctatttaaatctgcaagaggtttggttaatcattggctttgtcctgtgtagacagtcaaccctccctctacgtcctttgttcctcctatgctgttggtatcccagaaattcttgctcaattcccctcagcttgtttgcttccgataagctgttgcaaaggtagcatttgattctccagtcaacaattaggagatctcacattccaggaacagggtggctttgagaatgaaaagaggagcataggagggtatatccatatttctaaacgtgaaagaatatagaaggtgcttaggtaagctagctgtagcccccagtagtagtgatttagcaaacaatatttcactttatgcagaaattagggttgggtgatctggcttataaaaaaaataactttggggataagctggccctgaaggctttctataagtttatttagaacatattacttttctctatttaaaatattaagatgacagcagccccaggaacaaaacatcttgggttcataatccaagctgcaccacttccctgctctatgttcttggacaagttactttacctctttatacttcagtttcctcatttataaaataaggatgctgataagctaccccatgcttttatgaagaataaatgagttaattcttgtaaatctctcagaacagtgactgtcacataggaaatactcagtgaattatgggagatcataaagtgccatgaaaaataccatttatttcctgtttctgtgctagcaatctcatttctgagtgtatttccaaaggaaatgaaatcaggatcttgaagagacacctgcattcccatgttcattgtagctatattgacaatagccgagatatgaaaacaacctgtttccactgatggatgagtagataaagaaaatgtgtatatatatatatacacaatggagtattactcagccttgaaaaagaaggaaattctgtcatttgcagtaacattgatgaacctagagggcattatcctaagtgaaatgagcagatatagacagacaaatactgcttagctggtcgtggtgacaggcacctgtaatcccagctactcaggaggctgaggcagggagaatcacttgaacgcgggaggtggaggaggttgcagtgagccgagattgcatcattgcactccagcctgggccacagagtgagactccttctcaaaaaaaaaaaaaaaaacggaaaagaaagacaaatactgtatgatctttcttacatgtgaaatctaaaatagtcaaactcacggaagaaaagtgtagaatggtggtggccagggcctgaggcataggagaaatgggggagatgttggttagagggcacaaagtttgagctatgcaatataaataagttctggagtccaatgtgcagcatggtgactatagttgataatattatgctgtatatttgaaatttgctaaaaaggtagatcttaagtcttctcaccacacaaaaagataactatatgaggtgttttaagtgctaattagattaatagtggtaatcatttcacaatgtttatgtgtatcaaaacaccaatcagagagaagttcccctttaaaggaaaataaaaaaacaaacatccagctgtacaacctaaattatgcaatttttatttgtcaattatacttcaataaaggtaaaaaacatcttcagcttacatttaccagatgtattaggttggcggaaatagcaaataaaaataagagtgtcccagttaaatttgaatttcagataaacaacaaatctatttgagtataagtatgtctcatgtgatatttgagacacacttaaaatttttttgttgttcatctgaaattcaaactttactggacatcctgtactttatctggcaatcctaccttgcctcaaattctgcttcctacatgaagccaatcctaatagagtaatagctaatgtgtattgaatgtttactaagtcttgggttctttgcta

SEQ ID NO: 316903 - DNA, 4001 bp, Homo sapiens
acaaaattatttgttaaaccattatcttgaaatttcttacatgatttctttatcaaacattatgattttcttatatttaaaataattctcaaggcttgtgcattgtaattaaaattacttgctaacttaaaatattatattaaaggataatgaagcagaaaatacgcattgcaataggaaagttttgatttggattaactacattctcatttttttttttgtcagtagctatacatcctttggagcttaattacaaattaacaaacgacatgatttggaacaactgagcaacaactgagctctcttgcaattttgtgagtctagaagtcatcagatgaactctatttggaattgcattgtcatttattcattagattataatattatttaacatttagtaggatggtgctaagattaaaacccagccaggctggttccagattttcctgtttaaccagttgactatatacattcttaatatgtaaagattcggaggatatatacatatttcacattgaagtcatggtcctagtcagagcttaccctctctaaaacaaattttaagaaatgtgattcatctgcttattacaaatacaattataacagagaaaactattttctttttatttcagagtgccactagagaggtagcatggatggtctggctttactagagaaaaggaaattttaaaaaatatttaaagaaagtatatacttaaagaaaaacacttaaagaaattatgaaggccacttgttgaataatcaaaatccattttaaagcctaaactattaaactatctctgtgaggtttagttgataagcagaaatgtgaaagtgctttgcagagtactttacaaaaatttcgtcttacacattctttacatttttcttacctaatatgattaaccagacttaaccagattaaccatatgtttttacacacacaaccagattaactatatgttcttacatgtagagtctgataagtacaacactcaagttcccttgaaactcaataatgatccgaaatgaatcacttcatttaaatattattgtgtattcttatttctagtttaatgatactatgctatatgtaagaaatttggccatgatacgtttgatgataaaatttaaatttcttaaatatccattgtcctaaatgcatttctgtatttttagtaactgcaaattaacagcaataagtcagcaaaaataatagttgaggacaaactgttctacaaataaataaattagactgaaccgtgtttcataactattaataataacaatacacactaactctaatttgaacttttcatctgaaaaaagcaatatttcattttctatcattacacttgatgtattttgcttttaggcttagttataatttttataaatagtaatctcagtaacaatatatattaccttccttcaccaaagaacaatctacctaccaccagtttcttttatcttaaaattctgctcttttattattttatagtttgtgagattttcagatcttgtcctcttaattgtaatcctgtattgctagaagtaaatgaaaatcacagtactcagaatagcaagtgagaaaaacacatcttacattagctaagccatcctcatcttaagaaaacaaaggtgataaactagaaaacaagaaattactttgtttttatataagaaatactatgaaacattctttaaatacaataagtcagaggttaacaattccatttcataactataagcaatgctaatttcattaaaataagcacataatatgattatgttacatcttatattaataatactactaataatataataatgctttaaaaaattcacctcctcattgtcgttgacaccttgggacttaactagaaaaacacacaatagtagcaataatagatgtttcatggttttaagtttgtggaagctccaagaaaccatccttttcatgtagacttaactgagagatcttcaatcctatatatatctgagtcctctgctaggaatgacttcagaaatggttacctttccttagttaatatttaatttttggttcacttgttggctgaaccattttatcatttaagcaacatcttcccagcaaagcttatttacttgtcatacaactattattctttgttggtctagtttagaaacattaaatttcttcaattcatttaattggacaaaatgatgggaagttagggcactcctcaaagagagatgtgtatcttgtttctggtaaattaatgtggaaactacacaagctccgaaagaatatgtgagaaaacaaatctaagcttagtaaatttgacctactcacaaggcaaccactaaaatcgtgactcattaatgatataccataaatgcttatgttttctgacaatgacataattctatttcaaaaggggccattaaaatcaatagtaatgttatatcataatgtgtttatcttttgttttagacattaatcaaaataacaaaataacaaattcataccctattctatgaaaaatacacatcagaaagaccctttttttgtgctgaatagctttaatattttgtccttaattcacataaggtaaaatgttcaacaaattctaaacattattaagataactaataaattatagatttctgaatcaaaattatgatgatgattaaatacatgtttaacattctattttattgttatatagtttatatcatatgatttataaaaacaatgttattttaacactggtgaagtcttcatacatctatttcaattagtatgctcacagactaaatgaggcccattttccttcatttcccacaagccacaaaatttatctctcttgtctgttcacttgtgtgttgcaatcaggattaataactcctacaagaatcaataggaacaccagtcagtaatccaaatcccagtaagtgcattgattcaaagcatttttctgttttttgtatggaaagtgaaacattctcattaaatttataaattattttattaaaaagatggcaggttatcagggtttggatcagcgtattgaaacaatgctttgaaacagagtcttgagaatggtgtgggacccacgacatttctttcttctccaggtagcagagattgcattcccaaattcttttaactcagattcctagaaacaaattattctcttggtagcataggttgtcctcccaaattcttttaacttagcttaatagagacaaagtactcagtttaaattaagaaaaaatattcacttgagtctttccaaatttgtgttccctttattagcaatgagtaaatattatattttaagatttttttctttagctttaatggtttttaaagggatacatgatctgacagaaaaagcaaatatctatgtggctattaattaaaatatatacaggaatattttccatgaaaatataactgataacaaagtttattttaataatctagacaggattttattttagtgacgtacagattcttacagatttaaaaagaattatctgttaagaaaactctaaccttttttttttcttttgaggtaacgtattactacattttcaatgactgatgtttgatcaactaacaatagaatcatcatttaactttcagaagtctgtaaatttgtaaagttttttctagtatataatagactcttgttcaacactaaagtgaaggttcctttactttcctactttgttctactctgattggcattcttcccatggtcagaaggaggatggattcaatccagcatgcatgcaccataacagcacagacttaacattcatcttacaaatagttcttgagagtctcctcagtgacgggtagtgtgataggggctgggaatgcattggtgagcaagacagacatagtaggcgttcaatacataattacgggatgaatgagtgaactggctgtcattggtacatgcctcagatgccaaattatggtagtcatttatcgtatttaattcttg

SEQ ID NO: 316904 - DNA, 4001 bp, Homo sapiens
acttgcctctcttgcaggttgctattttggaagcaataaagactcagctcatatgaaagtgtattgcccattcttctgccaattcacgtttggttgtagaattttcttctcttccagcccccctccacctcccctcatgacatcccattagcatcccaagacaaaggcagaactacaggggagtggcgctgggacccctgtgggtcttttctcaggcaatgagagaatcagattctccacctggaacccataaaggaaggaacgccataacacacagcttttaaaacacatgtttacatacacttacaggaggacaggttacaatatattctagtcctctttctctcacttcaaattccatcagtgttgtaaatcggctcatcttatgcccctttctttctctttcctctagaccagtggctctcaaagtgtgatgtgatcagcatccccggggaacatgttagaaatgcaaatcttcagcccccactccagacttagggaatcccctaaagtccaagcactccttatttaggccagtgttctttctagaaccacaaacattgtttcttacagaaagcaaaactgcaattctcatttcatcctcaagcctgctgcaaggtagtaatatattagccccacgtgagcgatgaggaaaccggctctggggttaagcgtcggctcaaggtctcaaagctagtcactgcaggtggaagattaaagtgtttgcacttcttttcactactgaaacaaagctatggcactttattaacaacatctggattttttgctggttggctggttggtttttgtttttgctctttcagctttcgtcaattcggaaaaatataaaacagagtgggtgagagtagtgtgccatatgcctcgggtcgtcccgagtcggaatttaagggcaggactctagaaaggtgtttttccagtaaagaccgtttcgttctgctgcggtccttcctgtctttgtccccgggacagcacgcagcagatagaagcggccagagctgcatggcggggccgcgggcatccccgacgcgacaggttgtccgcgggaagacagccagtccgcgaggccccggcgcgccgcggctccgggccgggggtactggtttacagggcaaattggcacaccccaaagcccaggggacacccgggcctacgccgcagcccggaaaggagggggtgagtggtgaacccgaaaccgccgagggccgcgcggccagaaaccacacggagcgctagggtcgcagtgaagatccgggaggagggtgcaggctggaggggagagagcgggcgagaacccacgaaatggaaatgaggcggagagagcgggtcggcactcactgtgagggtcgctcttctcccggaccccgtcaactcggccgtcggggtggatgcgcaggaagaagcccccgtttttgcagtacagccgcttggggtccttgaagtggccgggcgggaaggcgccgctgccgccatcctcgggcaaggcgggcagcgtggtgatgctcccggctgccatggtccctgcggggcccggccgggatccccgagccgctggagccgcgcggggagccgccgtcccccggccccggccccggcctccgacccgctccggggcacggccccggccccggccccccagcctcccgcccggcagcgcgcggccgcgcccgcggtcccccagcctcgagccgctcggccgctcttctgtccgccggcccctggtgcgcggcgagccggcggcccgggacctggggttcacggatgggtgtctccgcggacgccgcctggggagagccgcctcccaagctgcagcgcccgggatcccgttgcaaccgcgggcaccgcgtccgctaatctggcacccgccgggccgcggcgtcacatcttctacatctccaccccccacacccaccagcctcccgcgcccccagttctcctccctcctgcgcgccgccccctactcgctcgggttttctggggccggcctctgagttcggcggttcggccacaacacgcaagcgcgcgacatcagtccggcggggagcccggcctcagtcgggggcgggggagaggcgaggggcggggggcgcgcgtcggaggccgcggcagggctttggcattccctgggctccaccgccccttatcccccaaaagtcacccccgcccaacccccgcaccacccaaaccacgtttaggctttctccacactgcggggcttttgctgcgcaaccagccgtgactcaacttttaaaagtttaaactcaactttctcccccattttttccccgctagcgtttcaaaacggagaagccgtttccaccccaaagtagagaagttgcaatccaaggaagagtctgtgtcagagcaggctttgaaaatctctaaatcaccaaaagacgaggggtacaagtggggcataaactttaaaattaaaggacagaggctgaagtcgtctaccaacaaaaggagagaaagaggccagagaaggggagcagattgggttgctaaaacgaaaaggtttcctttactgacctatcttgaattagacgacgcagaaagatgaggatggggataaggataaatccttatcgcgatcgaagcgcattaatgtcttaactcggacctggcatttgccctagctaaattgttatgcatttcttggagagagagttattttctgtaaatcccaaatgtaaaattgaagttaattgcattttggtaattttcagtaggatatagcaggtgccacagatgactaggaaaatatctattcagaaaacttgcatgtattgagtacctactgtgtgcaacacataatgttgagtgtgtgggagatgccaaatctgatgccagcgtctcacacactgagggagataagatgggtagcatgagtaacacaaatagcagtagaaagtaggccatagaagagtaagactaagtgctgtgacatttcagacatcggataactcagcgtggggaggcaggagatttggggaagcttctagaaggagttgcaagtatggacgtgcctccttgtagaaacattaggtttcaaaaggccatgcataagtgcatttgttcttaagtctccaagaaggctttaactccagatgcatttctagaatgttacatacaggagaatgagtaaattctttgaagctttaaaaccaggcatactgtttttatttttattatttatttattttttttagacagagttttgctcttgttgcccaggctggagatcaatggcacgatctcggctcaccgcaacctccacctcctgggttcaagcgattctcctacttcagcctaccgaatagctgggattacaggcatgcgccaccaccacgcagggctaattttttgtatttttagtagagacggggtttctccatgttggtcaggctggtctcgaactcccaacctcaggtgatctgcccgcctcagcctcccatagtactgggattacaggcgtgagccaccgcgccaggcccaaaaccaggcatattcttctttcttcttgcagttggtatatgttctatagaggaggaaaaaaaaaatttccccattcattactaggtttatggctgaagcccctgtaacaaaagacacattaacaagagaaaaacatactaacttatttatgtgagttttacacaaaacaggagacttcagaaattaagacccaaagttaagagggaagcctgtgtatttttaaggctaggattgataaagaagtggaagtcatggagaagtatgattggacaaatctgtgatctaatggtaataaactggggggacttacttagcaaggcctatttgctcagattcttttccctgtccgtgtgtcttcagagataaggatgtctgtttcctccaggtatagggaaggcacctctggaatgaaggtcttatggtctgcctcagaagagaagatctggggaaagtgaaagtaaccctcttgcttctgctcttttctt

SEQ ID NO: 316905 - DNA, 4001 bp, Homo sapiens
cagtttcatggcaaagctttgacttttctgaagtatcagggttgtaacaaaaagaataggttttctatcatcactaactcacatacagtagaaatagaagatgagatcaaactgaggtatcctctgtggcccttgatccagccctctcagcctctcttaggagatttaaacacatttcctcacatactctaagaaaggccatggccaacaccttagtttacacgaatgtcaggaaacatcaactactgccttcaaagaggtaaatgaccaattgtaattagcaagtttctgtttctcttttacagctaggtaatggcagagatccatgttaaattcccaaattacatgcaaattctgcattgatcaaaggtagtaaaaattttatgaagtagtattagacactccagatatcacaaagcagaaaattactatgatttgaatatttgctatgctttcttctggggaaaaaaaaaaaaactctatggaagacaaacaacacaaaagtaaccaaaatatcatgcttagtgagataggtatcttatattgggtacatgatttatggcatgaatgaaagcaagtcatgtgaaagacacagaaactaaactctgaaaggttattgtaaacaagaataaattaggaaaaagtttaaattaagctttttgtcggcactgttttaggaaacatccctgttctcttgtagatatctttcaacatggattttaaaagaaaatgtacatgttacatactgggtagtggtcaatgtcttgtttatctgggtgcactctttttgatctgctcttattttcccccctttgcttttctacaacaccccctctagcaaggcctaagctgtaaaactaccttcgtctcatatagtgtcttcgtagagaagatggtgaatatcctgggaatgagccttgctttctgagatctctagcacacctaaaccctccccagaagcattctctgagctccctgggctccaacctgctgcttgctgcctgctagtttggggtccgcccttgagctcacggaagttatcctctgttggtgctctgtcatgtacccagggagagtggaaacatagccaggagacagcagcgcgcacagtcacctgtctttcagtgtcagcctggttgctcctagatgttcctaacttgctccatctcagaccaatgactccacgggtcgttacaagaagaacagaagaaagaaagttttcttgtaagagagaaggaaaggttgccggaagtgggaataagctgtgatggctgatggagtcaaaagaccgttgagacaaaatgagaaggacgaatggaaataaatagatgttactgattattcctcaaatctcagaaaattccatttcaccccaacagatcttgccctttatcccccaaatgagcagttattcgatgagtgaaataaactctaaaatatggaaatagattcctctcgggagtgtgagggaggccctgggactcgctggtgcgtgtgcggagggccctctctccagctgggcgctccaggcgccctcaccacgtgcgccgcaggctgctgaatcagcgcgatcagatagactagacaggcgcagaggggcgggcatagacctgcttttctctcagcatgaaccatcaggtcttccgcattaggcccccttaacccaccggaggaggctagccagcctaccgccttacccacttgcgcgcctccgacccccctctggagactgctggctgccaaatcttcagaccgccggtggtgtccacgctcctctggagcctgtgtaagaaggagcccaatggcccgtggagtctttggtctgagatggagcaagttaggaacatctaggagcaaccaggctgacactgaaaccaggtgactgtgagcgctgctgtctcctggctacatttccggtctccctgggtacctgacaggccctggctggggctctgcctggtggaccaacccgcgctggaagagcgatctggccctactgagcaaaagccccacagagatctccccactcctactcacagccccaaaccgtccctgcccccagctgcctagaggcagtgaagagaaaccagaggagtggctgcgatggtctggaaacatagatggggtggaagggaagaggagatgagaaaggaaaaaagagagcgtgctgaaagaaaaaactcagagggaaaatttaaaactttgtttataaaaagtcctacaaaatctgcacccctaccaaatttaacctctgcgtttcttctaaaataaggaactttcccctaactgttcttggggaccaaaggctggccactctcctaatacggtgtagtcatggtctcaagatactaaacattgttaaatccaactctggagttagtaatttcaatgtttatcatgtctccctctctaaacgcgtccagttttctagagcacaatcttcttccaagcaggaatgtctgtctggtgtcccctagttatctatctgtctgtctatctatctgtgtatctatctatctatctatctatctacctatgtgtatacattgtatacatagacttatatacatatatacatatacatatacaatattaatttgaggtttatggtagcggatggaagagggaagtatttgggatttgattcttcttttcaaaaaataacttcagttatggatagggagaagggctgcctttgatgcctaatgaaaaatgccaggctagttcataagcagaaggtaaacaaattgagtgagaagaaatgagttttttgttctctcctgtcatggctggggactcgtctttgaggctagagcaaactgaaaacaaggtacccgtctgggcaccagcctctaggtaacatacacctgagaaatcgcaattcctcatgcccaggagaggggtgcgtgtgcgcacgccatatagatgcatctccacccaacccgcccggctgtttctgagtatcagcttggtcccagtggcctgggctcaggaaggtgagcctgtgtcccggcgaatacctgctgtccctcccgaatcttccgcggccgcctaggacgggttttgtaggagagcgagtaacttacttaacatattggcttcgtgggatccattgactttgccatccgggtagatctgcagatggaaaccgatgcccactctgcagtagaggctgccggtccggcgccccgaggggctccactggaaactgctctgctccaagccacttccttggctgcccagagaagctgcgggggaggaggaggcagaagaggaagacatagcgctactgctgctctgtctgctgctggagcctctagggttcctatcagtggcagcgggtccgggttgccctttgggggcgagacgcttctccccgtgagcccaggcgctgaggatcaggtggctgaagaagaggaggaggaggaaggacaagctcattcttccagccgcgggggtcctaagtgcatcttgtagggctgattctgggctctgtagcccctgtgcggctgcgtgcctctggctctgcccgcctcgccgcaccgggtggacatagcctcggggaagagaaggggagaggggaagagagaggccacccgagcggatctccgcgctggcaccgggatatttataacgccagtgatctcactgctccgtgcacgcctgcgaagcttcccctcacccgcggctttgtgtactcactggccggtgcggggagggagcctcgcggtcccgggggcgggggatgtgaaggagggaggagatccgagcgagtgagtgggaggagaagctgggctgagagaacctgcgccccggacgctgggtgcgcccataccagggccacgcatcccagcagttctctcgcgtcgcgcggccacccggattccccgactaggaccagagccgcgtggaaacgagctcggcgttagcagctgagtcctccaggggcagcgatagaaacggagggttgaaatgtggaaatgggtccttgtcctctccca

SEQ ID NO: 316906 - DNA, 4001 bp, Homo sapiens
tagccagcctaccgccttacccacttgcgcgcctccgacccccctctggagactgctggctgccaaatcttcagaccgccggtggtgtccacgctcctctggagcctgtgtaagaaggagcccaatggcccgtggagtctttggtctgagatggagcaagttaggaacatctaggagcaaccaggctgacactgaaaccaggtgactgtgagcgctgctgtctcctggctacatttccggtctccctgggtacctgacaggccctggctggggctctgcctggtggaccaacccgcgctggaagagcgatctggccctactgagcaaaagccccacagagatctccccactcctactcacagccccaaaccgtccctgcccccagctgcctagaggcagtgaagagaaaccagaggagtggctgcgatggtctggaaacatagatggggtggaagggaagaggagatgagaaaggaaaaaagagagcgtgctgaaagaaaaaactcagagggaaaatttaaaactttgtttataaaaagtcctacaaaatctgcacccctaccaaatttaacctctgcgtttcttctaaaataaggaactttcccctaactgttcttggggaccaaaggctggccactctcctaatacggtgtagtcatggtctcaagatactaaacattgttaaatccaactctggagttagtaatttcaatgtttatcatgtctccctctctaaacgcgtccagttttctagagcacaatcttcttccaagcaggaatgtctgtctggtgtcccctagttatctatctgtctgtctatctatctgtgtatctatctatctatctatctatctacctatgtgtatacattgtatacatagacttatatacatatatacatatacatatacaatattaatttgaggtttatggtagcggatggaagagggaagtatttgggatttgattcttcttttcaaaaaataacttcagttatggatagggagaagggctgcctttgatgcctaatgaaaaatgccaggctagttcataagcagaaggtaaacaaattgagtgagaagaaatgagttttttgttctctcctgtcatggctggggactcgtctttgaggctagagcaaactgaaaacaaggtacccgtctgggcaccagcctctaggtaacatacacctgagaaatcgcaattcctcatgcccaggagaggggtgcgtgtgcgcacgccatatagatgcatctccacccaacccgcccggctgtttctgagtatcagcttggtcccagtggcctgggctcaggaaggtgagcctgtgtcccggcgaatacctgctgtccctcccgaatcttccgcggccgcctaggacgggttttgtaggagagcgagtaacttacttaacatattggcttcgtgggatccattgactttgccatccgggtagatctgcagatggaaaccgatgcccactctgcagtagaggctgccggtccggcgccccgaggggctccactggaaactgctctgctccaagccacttccttggctgcccagagaagctgcgggggaggaggaggcagaagaggaagacatagcgctactgctgctctgtctgctgctggagcctctagggttcctatcagtggcagcgggtccgggttgccctttgggggcgagacgcttctccccgtgagcccaggcgctgaggatcaggtggctgaagaagaggaggaggaggaaggacaagctcattcttccagccgcgggggtcctaagtgcatcttgtagggctgattctgggctctgtagcccctgtgcggctgcgtgcctctggctctgcccgcctcgccgcaccgggtggacatagcctcggggaagagaaggggagaggggaagagagaggccacccgagcggatctccgcgctggcaccgggatatttataacgccagtgatctcactgctccgtgcacgcctgcgaagcttcccctcacccgcggctttgtgtactcactggccggtgcggggagggagcctcgcggtcccgggggcgggggatgtgaaggagggaggagatccgagcgagtgagtgggaggagaagctgggctgagagaacctgcgccccggacgctgggtgcgcccataccagggccacgcatcccagcagttctctcgcgtcgcgcggccacccggattccccgactaggaccagagccgcgtggaaacgagctcggcgttagcagctgagtcctccaggggcagcgatagaaacggagggttgaaatgtggaaatgggtccttgtcctctcccacctctacagcacacttgtgactgggcaacgcactcttgccccccaggacacgatttccaggttctcctctctttgccctgtaaaccctgctatctcgtcctctctctgggagcccttggagaaatgcgtcccaccaggagatcccactgcttctacgtctttcggcgttggaaaaccaaacagggattcgcagcccaacttgggaagcctttggtgtggcgcggttcggggagaaggctgtttttgctgttattagcgatttattaaagagctaaggaatgggtttattcagcgtttaaaacgccaccctgagtcatcatgccacgactggagctgctttcttgttggaaactctcggctgcgctgaacattatgacgaatttgtttttccttctgggaagctctccgtctgtattcgtgagagtgagggcacacgcacccccgcgctccgaccggggaaagagaggcagcggctggacaccagcacatgtaactgaccgcccagttgtcctctttcgccccaggatccccgtggcaggaagggttagctaactgctcgctttagcttacccagacctgccattgactgagggaccgacctcagtgaatgattaatgacgtgcgcgctggatttcaacctcaggaaacccgagaagggaaaatttccttgagaacagagaatttccctgtacgggcaacgtccccagactgttatttatctgggaaatacacctgacttgcatgcttggaatgtttctgtctaaaaacatatttgaaactttaaactaagctatgatacattattcattggttattttaatgaaacggcccgtgctattgactgataaggtcaattcagatgaaccaaggttgaagctaagaaacggccttacccattattgagtacctacttaaggttttccatctcaataatgaaacgcatataaaacaatgcagatttttcaggtttggaatcttccaccgccagagtaacatcaaagtacttgtaaaacagaaggttacctggaaagtgtagtaaaaccactgtgataaagaaagaggacatcacacatagatgtgcataacatgggcacactacatgagatactgtccagagctgaacacaccccctgtccactgttctaggctcaagttatatacttctcccttaactagggtgggtaggcagatccttacaaggcaaccctaaaagtagacattgagaacagtcacagtatctctcagaatggtctacttgactgaaatcaccttcttctggggaggatgattgtaggatggttctgaacctgggtgctgttccttcttcaggcaatgccctgaggtctgtggcaaagctgtcagggtttaagccacattgatgctgctgaatgccatttgtaagttcccccatgccacgcaaatacacagcccattcctcaagtgacgaagattctccaaagcaaatccagctgcttgtttctccctttccttttcccaaggagtctgctgaaagaggaggagagtggttcctgccccagctgcactatcagccccctgtctaaacccaggaggtcaagaggactctggagtccagtttctggagctgttatcagcctcttgtctttgctcccttctctcagtttctgcagccccgcctgcactgaaacaaccatcctt

SEQ ID NO: 316907 - DNA, 4001 bp, Homo sapiens
cctacatgatttcagagtagaccaagaacgcttctggctcctggagtcactagacaaacagcctgtctactcacatttccacttgacttgagtcttgagtgtcacaaaagtaccactctttggagcctcacgaactctcatttatcatttattcactcattaactcctgcatctgctcactcctcactctttcattcactcattcaacaagcatttactgagcacctactatatgccccccaccagactaggtgttgaagaaatcaccatgattgagaaagcctcagatttgaaagagcttagagaccactctttgggagaatttaaatagcattgatcagggaatctatcccgtcatctctgtttctgatatgaaacaagttactgctccaaactttcagctccaaagggctggatttctatctcatgactccatatggacacagatgcccaaaatgagaaaagacatgacagatgcccaaaatgagaaaggatgtggtaagcatcatgaaaggtgatgttgacccagagttgaacatgcctggggtttgggtggggtgggtggggttgtgggggtgggggagctttttgtggggaagtaagagtttaaggaaaggtgtgaggtggggtggttgtctgatttgcctgggcaaagtgaatcagggtggagagaggtgaatttcaaccagatagttcacactacaagatcgaagacaaggatcatgagaaatcattgaatcaataggatgaacaccaacgtcacactgaactgcatgaatctgatcatgtgtacaataaaaacccatgcttaacagaagaagagaagtcagtttctatatgacacctcctgtgtgctaagtactggtctagggtttgattcccaccttgtgaaatccacacaagagctcttccaggtagctattaatatgtcatcccaggtgacagctctgactcttaaggctcagacaggtaagtaaattgctcaggatctcatagtgggcaagttcaaagctggtatgggtagccagatcaatctccttattcctttctgtcacccctggttgatcactttttgcttttcacatttactctgccctttaaaaacattgccaaagaataagaaaaacaactatgaacaatgacaatttagtttcatataacacataatgataagatgatttgtattatttgtgctccatttaaaacaaaacacagaattttttataaaaagaggcagacccaggaaatggtcctgatctgatttctaccctagaagttggccatcttctagggttaagaaggagaaagacaatcacaaaagggcagagaacagcaataaatggtgaagaggagactggatatgccagaaaaacacccagtcatttctcacggccctggggctcagcccccacctgcccatgatggaatgcaggcccaaggaactccaggcccttggtggagtgagaagtggcagcaggtaataaagctgttaaaggagcgaggctcttaccttgttctgagcacacggatccagtgcaatcccaggcagtgcgagtgaattgcaggctgcagctgtgtcaggtagagtgcaaggggggtagactattcaacaggagccaggctgactgggtttttataacactcactgggtttttacaacactgtggcacgttactcacagctcctcccagccacgcccctccgagggagccggttcctgcagggaaagtgctggatgtaatccagtgaaaaggggggttacctgcatgccatcaaacgcttcctctaggcccttccctgtccaccctgtggccaggataggaggacaactcagcctcacagtgaccctccttgatggggagaggaccccagcagtgatgtctatggaggagtaaaataactataatgacatgatccgagctgccaaactactgagcccattttacctgagttctccttttccctcatcacatccgctctagtagggagtgcaatgattcctccccttttacaaaagcaggaattggttctggagatatgtaagagcttgtccaagttcacagaggcaggaaaaggaacatctcaaaattaaaagtgagattctctacatccatggtctgatctcttcctgcctgccactctcaataaatctttgttgaatgggtgactgaagttgccgaagttttcgtagtgtctgagttcctttttccatctgaagttactacataagcagaggataccctaattctagaggcagggaaatttacattaaaaattccctcttttttatcagggaattctaccaggctctgagaggctggtaaagagggaatttttaatataagattactgttgtaaatacttaccttcaggtctcattcagagagctcaggctgccctgcctgctacaggcacagtcccacaccagaatgacccaggtggaatcctggccacagcatgtgtttagctgagtgctatgcccaaaccacttagcctctcccatcatccatttgcagtgtgctgacaataacaacgtctcctttatagctgcatactaaatttttactgggctaagctgttaacataaagtggagcagaatcgttttgcctcatgacagggtcttaagttgtatactttgaaaacagacatttgttatttacatatgcagcatttaaaaagaaactcacttctacagggaagatgtggccctcattatatattatcacctcacctttcatagattttcagaagaagaaattgttcacttttccttaattcagccataagaaaactattgtttagtgtgatattaaatggcaactgacttttgggtttgagataaggcaatagggagtgatggggactgtggcaaactagagagtctctgcctccatagaggtcaacactcatctccaattgactgagaaaatgcagggattaggctcagtattgtcacactgtctgatttttaaaatgacatccccaaatccagatgtgtttatatgaaattggttggcagctaattaaaattttctaaaaataaagctgtagctcaacactatgcaggccaaaacttgtaactgtgtttggattttatgaacgatccacctgtttgagaattccgtggtcatagctatagatgttgaccaatttactcagaggctcagtctctgcatgaatctgttggaagaagccatttctgaagctgtgtgcctctctcctaaaattgcctcacccaggggtccgtcctcactatcctcacaaacaccccgctgaggccctgacctccacgaacaggctctctcatgcggtattttggaggattatttggacataggcaaggcaaagctgctttgctcaacaaggggagtctcctacaaaatggaaaattctacttgatccttgggaggcaggcagattctttctggaggcagattgcagttggaacacaaaacatatttacaaggaaacatgtggactccggggtctttctgggaagtgcttctctgagctttgccaggtaacactgcacattccccactggctccttgtggcccttccccttcctgtgactcccatcccagcgtctgctttgctctttcccttctagactcagcagcacagcatcagagcaggctgtggggcagtcacctccttggctcatcctgcccttccaacctcatttccaggtactcacacgcagacacataaatacacatacacactgacacacatacaaagacacacacaaacacacactgacacactcaaacacacacaaacacactcaaagacaccacactcatagacacacagagacacacacatactgacacctagacacattcacacacatactcataggcacacacacacagaatcacacacagtgacactgacacacacacagagacagacacacacacacatgcacacacacactgcaatctggccacactgaaaccctgtcccaccatttgcagatactccatgcatgcgc

SEQ ID NO: 316908 - DNA, 4001 bp, Homo sapiens
aattctttgtatttttctgttgtgtttgaatttttcaaatgatttgtatgtcttatttgtagaaagaccaaaaaaatcactttaaaaagaaaaaaaaaaggacctcctctcaatagtaactttttttggcttaagtgtccccttttctcctctgggacagatctgaaatcttaaacaagcagaaaacctccagcccagaacagcagacaccaaaacaactttgttgtgaaccaacatttcttgctgcctgggcgcttgtagaaaaagccttatttgtttggtggtattcgttatcaaagtgctgtttatcaggaaatctgctttgttcctatttttcttacatagataatatgaaaaaaactcagaaactctccttttaaactcaaagtgcacaagtaagactagaatcccatgtaaatgaactccttactggtgtgcaaaattaatgaaagctgctacatttaaggatagagatcagtaataagccttatttccacaagaaaaagtttggtcttttaaaagcaatacttggagttgattaaatctgttattattaattagattttctcctctgtgatgaacaaaaaacaattaaaggctttgagagctgtgagaaagactttaaagactatttgactcaaactttcctcagtgcacaacactccccaccctaacttgactgtaggagaaaaaactgagaacaagacggggtgtggcgacacctccaccatgacatagcacctcggccactaacagctgcagcaaatgcttggttcattaggaaacgttacccggcagaattccaaaggcctcggtctaacagtgaggtggttccatcacaaggagattctcaaccttggctgcacattcaaatcacttgggggagagttttaaaagtccacattcctgcgctactatgttggagacatagatggaacggtctggcgaggggcctgggcatcagcatttttagagctccttgtaggtgattcctatgcaactccagggtcaagtgccactccggatgaactacctcatctacactgctctgcaacagacagcctcaaacccacccccaaacacacgctgagactctgatgtggtcgcagcagctgtgaaagtgctaagtgcctctcacgtagtctctgtatataagtatatacacgtagtctctgtatatgagtaaaggaaagggtattacctgtaggggtctttcacctgtcaccctcggaagaagctgatgagaaaggcgcacagggcctggaagggtttccaacaatgttcccaggccttcttctttgcttcctcattccctccgggcctgggtccaggctgggtaggtttggctgtgggtcgggtggtgggtttggcttttcccagctcttccatcgagtcctttcccagctgtgttgcttctgtgagtttcactgtggccttgggcctcagagatggcgtcccagcctcaggctgctggttgggctctgggctgcccttgaggctggaagtcacctgctgcatatgggcctggggtccagcctccctgcacacggatggcctaagcaccggggccccctggcacgcatggtgaaggcgcctcagctcctgcagggcttgattccagtaaggtttggggtcagcagcgaaagcctggcacatgctgggctgccccctgtactcacaccagtaggtctggtctgtgttgcggcagtcgacacgaagccagacttctccagcaccttgccccaagctgctgggacgcatagtgcaggaatctctccctccagtctggaaatggaattcctccccagtgcttccttgcttttgcctcggggcctgacccaaagtccccaggcaggacaaggtcaccagcaggaggcaggggacgaacttcatggcgatactccgataaacttgcttgcaactctgcaccaggagagagaacacaagtgggacgagtcaccctttaaagggtgctgcacaaaagactctttctctgcaagggtggggaggatgttttgcagcaaatgagaaacatgcccacagaccttagacacgtaacacttggcaagggcagagcagccaccaggggccgcccaccacaagcaaagggaatggttttcctgagtgcctcagagagatctgccccagccctgtcacgcacaaagcgccacacacagctttggggctgagggttttacagttttccaaccacagggtgcttgctctaaaattggcccttgtacgggaacagccttctttgtcaacatttggtatatgccaaggtgtggcagtggtattctggaaagtgaggtttgcagctgggagtctgggctgcctcgaggctccctcctgctccctggaatccccatcttgggggaccatgggtttagttaatccaaaggaagccagaattttatgagcctaagtgttatgagatggcctagcaaatgcaaaaaagactatgtgaggttgtgtgaggatgtgtgtgccagagggacacagagacactccccctcccacccaccgagctgagagtcacctggtgtggcctctgtggggctgtcccgccatcaccgtggccacaggccacagtgctgcaatgttcacttcccttgttattgcatgccttacaattgcaccaactgaatgatgacgaggaaggcatgcaaatatatgttcacagtgggattcagtctattttagaccatgaattctatttcaaattcaattgaaataacacagttttaattatatcacaggaaaatatgattttaaatattattattattgttctacaatagaaaaaaaataaattgaaaataacttttgattctgtgtcaagaatcatagtttggtatggtcataactgtcttttgatgacccttccagagggcactgtggagtggactaaaggtggcaatttgctgttaggaatagggttgacggatgttgggggactagtttgaatgtgagggatttatcttggcgatcccacgtagggtagttggtacctggcacagccttccttccacctggatatcctgagtcctgagaagacctagtagggctggaactaaagccaggctgagcttcggcagccactgtgtgtgtagcagtgagagccttccagaagagggcatcaccccaggtggggagcagaggaagcttccaagaagtggtgccaaaccttcaagacaagtcagtcaatttgtcaggttgagaaagggtaaagggcaggtgttttttttgtttgtttgtttgtttgtttgttttggcctcattctgtcacctagaccggattgcactggtgtaattatagctcactgtagcctccaactcctgggctcaattacttctcctgcctcagcctctcaagtaactgggactacaggcatgggctgccacacccagctaaattttaaatttaaaatttttagggacagggtctcactctgttgtccaggccgatctcacactccaggcctcaagcaatcctcctgcttccttgtcctctggagtcactggaattacagatgtgaaccaccacaaccagctaaaggtaggttttttttttttttcacacagtcttactttgccacccaggctggagtgcagtggcacaatcttggctcactgcaacctccacctcccaggttcaagcaattgtcctgcctcagccacctgagtagttgggattacaggcgcctaccaccatgccaggctaatttttgtgtttttagtagagatggggtttcacgacgttggccaggctggcctcaaactcctaacaagtgatccgcccacttcagcctccctaagtgctgagattacaggcacgagccactgcgcctggccaagggcagattcttaaggcaggataatgcttcctgtaaaggagtgatcctggagtgcaggtttatggactgctgaaatgtcaagggcaaggaggcagtggtgagaatcaggctggagaggtgacttagggtggggtccgcagcccc

SEQ ID NO: 316909 - DNA, 4001 bp, Homo sapiens
gccgtagggagtaatatctttatctgaatgagaatgcgaaagccaagctccccccgcggccgcccctccggcacccctggaagcggggccgcccgagcagacgctaaaagcgcgcgctgacctcccgacggcccctgtcacgccgctgaatgacacgcacattcaagcgccgggccactttcattcataaaaaaaatgacattgttccgggaggctgcagccgccgacggagaaaggggcgcgggggcgcgggcggggcggacgccatctgcctcggccctccaggcgccctccccggcccgccgcgcccgcggtcgctcacacctccccgcgagccgccgagccgccatcaatgcgcggtctgtggccgcgtcgaggtacaaagaagcggctgttcgggcctcggcccgggtggggcgcgagctcaccgggccaaggcctccctccgcgcggccgccgggctgagctgtgcgcgcccccctcgcccgtccggagccggctgcgggtgtacgcggcggcggcaccggagctctcggcccggcccacgaggaaccgcggcgcgtgtgcaggtccggccgggcgccccttcccctcccctcgccccttgggacctcccttcagaccctcgacgtcccgcgggacctggaccgccagcccagtctagggcccgcgacgctgggacacgcgcccctcgcttgcctggagctcggcgcgcacccacggggaagcgccctcggcccccaggcaggggcagggtcggcagcggggacgctggaggctgctgcctcttcgggcgggcaggggccgggcttcgctgacgcgcacacccacccttagaagtccggtctctcgccttggccgaagctggccacaaactggggcccgggggagggggacgccaacaatgggaactttccgtctgcgcagaacccgaataacaacagcgggaatcgtggaaatggggccccccgcgccctcccgacaggccagggctagggagtcgcaggggatcggggctgcggacgccaacccccagcctggctccccgtggtggcctcgcacttggagggtagctgcggctccgggcgcaccacaagtcgccgcgctagctctggccgcgctctccggcaaggaggcagcggaatccgggctctaaccccggggcgtcactcacacccggcggcccctccgacccggggccggttcccgtccccaacgcctctgcccgcacgggccggcctctcccgtgcctagtgggtcccttcttacctgccgctcgccccacgacgcgctgctccgtccccaaggactccgaggaggcgccggccacgatggccacggccacgcagagcgcgagggcgcaggcaggggcgcccatggcgggggcgggggccgcggcgtcctcaggcagcgcgcgcgggcatgctgccccccacggcccggcgcgggcaccggcgggaggcgggcgccgctcgggagactacaggaggaggaaggcagctcgttagaggggcggacagggacgaaagcggcggtggccggctcctgcgtcccgacccctccgacccccagccgccccgcccgccgccgccgccgcccagggctcccgggccgcctggcgccggccgcctcctccccgccgcggtccctccctcctcccccttccctccctggctgctgcaaagccctcccagggcggcggcggcggcaaactttccggagcgggaagcccgcgccccggcccggcccgctgcagggacctctgtggttccgcgacagccgcgccccgacccctccgcgagcaccgttggacccctccgcgagcctgcccggccccaagcacggacctggcgagcgccggagcccggctcgctacgcgcggctcccgctccggctcgctgtccgcgggcccagctcccgccccgtccctccggccggcggcccgccggtgcgtccgtgcgaccggcagagcaggaccgcgcggcgccagctgcccgcgacgccgccgccaccgcgcactgagcctgggctgccccgcgcgccgcagccagtgggggacggtccgcgccccgccccggccccgccccgctcccgcccggtccccgcccggctcgcgggggcgcagggcacgccccctcggggcggagcggggcatccgagggggcgtggccgggcgggggcgcccggcggtctcgagggcgtgggagccggggcaggcgggctaggcccctagtcgcaccgcggggcggcccagggggcggcgggcacggggcgcaccgagggcgagggcaggcctgtgtttgcatagcgcgcagctcgggtcccctggggctgtgctcaggagctcagaggggaggtctcggcgggggtcgggatgtcaggaggcttcgccgagatgccgcggagctgaaccctgtggtgtgagcggcaattcctcaggtggaggagggcaggacggcattccaggctgagcctcccgtgtgcgccgcaggtctggggcagcccggcgcggcctgcgtacctgaccggcgaggtgcagaggctgcgttgactgacctggggccgcacgcagctaagccgcctgagagccccgcgcgaggggtccctaccccccgccccccaaggaggacacaggcctggggctggctgcctgcccggcctaggatgaagagcgggggctggatacccctggcttggggagcacagcccggctctgagggaggatgacagagagctggtggcagagcctgagctggcccgaggttctgggctccacggggtgggctcagagtccagctgaagaggggtgggttcccaggaggggaaggtgctgccctgcgggggacgctggaggtgcctgggtcccctcaccccacatgactgttggcttctgtgtccaccctcacaaggaaaaggccatctgctcccaccttcaggcaaagcccaaggaggtccggggcccatgggagccagtgagctggccgggagggccggccgggtgggctgcgtgcctggcttgtggcttccaggactggaggtgctcatcaggaaaatgggcgctgaaagcccctcagtgactggctgcctgctgaccccacccagcccatgcacagccccaccatgaatctcccagaggccagggtgtccctgggctgacctcagggacttggaagggccctgctcccaggaagccctcatgcccacccctctgtgccgactcggtggctcagcacctgtccttggccaccctcatttcctgctctggccaagcccatgtccccagaccgtcttggggcccaggctcacccacctccaagtgcactgtccagccccctccagtgcacagccccaggtcactgccagccaggtccgctcccaggacaccgttccccaaggcacagcagcacattggccctgctcttttttttttttttttttttttttgagagggagtctcgctctgtcacccaggctggagtgcagtggcacagtctcagctcaagcaatctctgcctccctgattgaagtgattctcctgtctcagcctcccaagtagctaggattacaggtgtgcaccaccacactcggctaatttttgtattgttagtagagacggggcttcaccatgttggccaggctggtcttgaactcctgacctcaactgatccacctgcctcagcctcccaaagtgctgggattgcaggtgtgagctctcttaaccaactaagtcatcaggttctgaaagcaccagcatgcgtgtgggtcctgacctgaccgtcttgccccttcccctgggggactggatgggactgtgggaaggagctcacgcgtggacaggtctccctcagggaacagctgctgagtggggcccctcctgtaggcagaagggctcagtggagctgtaggctcctttcccagtacctccaagaaggactgactccctctgcacccacggccacgggtctctgggaggggagcatccgtgcatctgtgaacacata

SEQ ID NO: 316910 - DNA, 4001 bp, Homo sapiens
tctgccgcccactgccatggctgaccgtggccatccaccagtcagcttcagccccagccaggaaacatggcaggacagaggcctccagagcctccctggccgagtggccagaggacaggcaggtgtagggattggggaggccaaacagatcaaagagaatgcaagtccaggccgctggccatggtaggggctcgcccagtatggcctgagtgcccacacagcccaggacgctgccgggccctcagagcagccgctcagccaggcccatgtgggcaggcggggggtaggggggggtgctgtggcataaggcccacctggtcaccgcccgccacccagcacccgaacgtgcccatataaggccaggttggatgcggcgcgcttgctgggcggcaggggaggggtgcgaagcctcaggactggtggacacagcgcggacaatcctgagtggtcaacacgcccaaagggccggcctggccacaggtcccgcctagccatgggggcagccagcgctgtgcccggatcctggaacatggcgggcatgagtctgcgggcacacgtcacccatcggctccggatgtccttgctggggctgggtcccagggcatggctgccacttagatgtcggtgccatgagcacgtaccaggccagcacagcgtgtgcccagaggcacgcagtcctggggtgcgtcacggctctggggacttgtccacacaaccgcccggcactgcctgcctagagctgggcaggcccagggcacacggctaggtcggctgggggactgggggtctgggggtcagtttcagtcccagacaccaagtatattaccaatatctcccatagcccatcctgccttccgtgggggtctctgcaggttcccagagtccttatcgggtccactgtggccacaaaccgcccactccccaagaatccacaggtgattagctgccctggactgcaggtacgagtatgaaagtgtttgcaagaccaggagcatgtcctggggagccaggactaaagcccacctggccagcaagcacgcatgaggggaacccctccagccagctaggggagccccggtgggtgctgtggacagcccatgggtgagggggccctggaaggaagggggcctggcgagcggggcggcaggggcggggcatggcgcgtgccaggcgggcactgtggcagggttcagggccgggcgggaagggggcggcgctggcggaggccaggctggccgggctgggcgccagaactcacctcgggcggcggcggccggcgggaaggcccccagcagcagcggcggcagcaggagcagcaacagggggctcggcgtcatctcggcctgtccggacctggggacattgggggcgccgtcactaacacgtggaactgggagataccgccctccccggtcccgggccgcggggatcaggggtctggccgccctccccacaggccctccccgcccgcgctccaggcggaggaagccgcagcggggagaagctgtgggtatcaaaggcagacaaagggtttacactaattaccgggctcccccgccgccccccctctccaaacaccgtctggattcctggcgcttgtaactccggccctgcccgcaggacacacaacactcagcgccccgcagataatcgcctgcgccattagcggacaaatttgcgctggggggggcccacgtggggcgcgggggcgggggcggggcaggccgggggcccgcaggagcggcggcggcgcgcatgacccgtgcccagctggggccccgaacccgcccctccccgcccccgccccggacccccgccctcccccgtgtgcccacctggggtcgcggccgcgcgcgcggggggctcacctcggcggggggctcagcgggcgggcggcggggtcagggccgggcccgcggcgtgcgctccgcggtcatcgccgccccgggcgccgcatcccgccgccccgcgcccccgggcccggtctcggggcggggcggcgctacctgggcgcgggcggctcgggccgggtcggggtccgggctcgggcgctcggggcgcggggtcccggaccgggcaggcggcgggggcgagtccgcggggccgggggccggggccgggatcccggggcggcggggcgaggggcccggggcgccgcgccgcgaggcgtccttccctgcggggctttgtcaactctcccggagcgagcgccgagcccggacccccgacccgcccccggcacaacttccggccaatccgcgcgcgtcagccctcccccgtgccccgccccgccgccaaacttttccccaatccgcgcgcgcacaccgcccccgccccgccgggctcccggccttaaccctcgcggtgcggacgtccccgcgggcgggcggcttccccgggtccggccccgcccccgcccccgccccgccccaacccgagcctcgccgcgcccccggccccgcccgcgcgcccttggtccccgcaggctcctaggaccggccaggagccgccgcgccctccccatacctgcgcccgcgcgcgcccgggtcgggtcctcaactctcgagacacctccgcgacccccagagcaggctccggccctgcccgcggcagtctgacctctgcgcagccccgggccgggcccagaccgctctctggttgctcagaagggggcggactggacggccgcgggagcttcgaggcttccaggtctgcgccccggggggtcttcgggagcagaagggagaagcagggcctcgcccagccggagctgctggggacggggtagggggggacggccgcggcgatgcaggcaggggtcctccccggggcgttcgggttacctggtgcctttggccaaaggtatgttcccacctgaggcctcccagcctctcacctgctagtgacgggaatgacaagaacattaatcatcgtaatagacgtcaacatgcgattcaatctccgctaccgggcaggcggccccaggagcagatgaagaaacggaggcgtggagaagacagcgcccagctcttcgcggctcttcctccacacgcctcgcctgccgtccctgcccagggcccagcacgcagggctcccaggccgcacctccagccgccccatggcctcccctcatcctgcctcccagtcttgcaacacaaacctcacggcctgcccacatcccgcctcacaccctcgactccgcggagtcaccatcccagcacctcctccatcccccagagcagcctctctttctggggcctgaagccccctcttccaggaagtcctcccaggaaaggctgaaactggagaggcctggcagccggtgtccccaggccgaggagagctaggcggggcgtggggggcgccagctgtcagggtgtgggactcctcaaggcccgaactacccggccgtcccaaggtgctggttcccagcccagcgtcctccaccccaaatcccgcgtctgggccagcgtgggcgtcgcgagggcggatggaggtgcgctcggacggcccatcctgcccccgctggcgcagccgccgctgtgcacccggggaagggtccagggaccgccgcgtggtcctcccggcgggagaacgtcctgcgccgccgccgcggccctgtcccacaaggagccagcagcgccggggcccacctgccgccctcccggccggagctgcagtcacggacaggtgggtggggcggtctcacgcccgtgggagagcggcgctgaacttcccggacagctggcgaggaggcagcgctcccacagatgtgcgggctgccggacacaggtgcgtggaaaggggacaggtgtgcggaaacgtggctgcgagcgtgcaaagtataagcagggagcggacaggccggcaggtgccggcccccgaatgagcgggcagtgggaggggcacgggcagcgtcgcggcccctggcgggcggggccgggacggggggcggggccaggggcggagcggcagacggggcggggcccgaggcggacagg

SEQ ID NO: 316911 - DNA, 4001 bp, Homo sapiens
cttggaaagcagcttgatcccagctccccagtgccgccagggcctttgccacgcaaagccagggctggatatcctcagccccaaggccgcagctgaggaggacgaaggcgaagggggtggccgctggggcgtctccacgaagaggcgggctctgccgcccactgccatggctgaccgtggccatccaccagtcagcttcagccccagccaggaaacatggcaggacagaggcctccagagcctccctggccgagtggccagaggacaggcaggtgtagggattggggaggccaaacagatcaaagagaatgcaagtccaggccgctggccatggtaggggctcgcccagtatggcctgagtgcccacacagcccaggacgctgccgggccctcagagcagccgctcagccaggcccatgtgggcaggcggggggtaggggggggtgctgtggcataaggcccacctggtcaccgcccgccacccagcacccgaacgtgcccatataaggccaggttggatgcggcgcgcttgctgggcggcaggggaggggtgcgaagcctcaggactggtggacacagcgcggacaatcctgagtggtcaacacgcccaaagggccggcctggccacaggtcccgcctagccatgggggcagccagcgctgtgcccggatcctggaacatggcgggcatgagtctgcgggcacacgtcacccatcggctccggatgtccttgctggggctgggtcccagggcatggctgccacttagatgtcggtgccatgagcacgtaccaggccagcacagcgtgtgcccagaggcacgcagtcctggggtgcgtcacggctctggggacttgtccacacaaccgcccggcactgcctgcctagagctgggcaggcccagggcacacggctaggtcggctgggggactgggggtctgggggtcagtttcagtcccagacaccaagtatattaccaatatctcccatagcccatcctgccttccgtgggggtctctgcaggttcccagagtccttatcgggtccactgtggccacaaaccgcccactccccaagaatccacaggtgattagctgccctggactgcaggtacgagtatgaaagtgtttgcaagaccaggagcatgtcctggggagccaggactaaagcccacctggccagcaagcacgcatgaggggaacccctccagccagctaggggagccccggtgggtgctgtggacagcccatgggtgagggggccctggaaggaagggggcctggcgagcggggcggcaggggcggggcatggcgcgtgccaggcgggcactgtggcagggttcagggccgggcgggaagggggcggcgctggcggaggccaggctggccgggctgggcgccagaactcacctcgggcggcggcggccggcgggaaggcccccagcagcagcggcggcagcaggagcagcaacagggggctcggcgtcatctcggcctgtccggacctggggacattgggggcgccgtcactaacacgtggaactgggagataccgccctccccggtcccgggccgcggggatcaggggtctggccgccctccccacaggccctccccgcccgcgctccaggcggaggaagccgcagcggggagaagctgtgggtatcaaaggcagacaaagggtttacactaattaccgggctcccccgccgccccccctctccaaacaccgtctggattcctggcgcttgtaactccggccctgcccgcaggacacacaacactcagcgccccgcagataatcgcctgcgccattagcggacaaatttgcgctggggggggcccacgtggggcgcgggggcgggggcggggcaggccgggggcccgcaggagcggcggcggcgcgcatgacccgtgcccagctggggccccgaacccgcccctccccgcccccgccccggacccccgccctcccccgtgtgcccacctggggtcgcggccgcgcgcgcggggggctcacctcggcggggggctcagcgggcgggcggcggggtcagggccgggcccgcggcgtgcgctccgcggtcatcgccgccccgggcgccgcatcccgccgccccgcgcccccgggcccggtctcggggcggggcggcgctacctgggcgcgggcggctcgggccgggtcggggtccgggctcgggcgctcggggcgcggggtcccggaccgggcaggcggcgggggcgagtccgcggggccgggggccggggccgggatcccggggcggcggggcgaggggcccggggcgccgcgccgcgaggcgtccttccctgcggggctttgtcaactctcccggagcgagcgccgagcccggacccccgacccgcccccggcacaacttccggccaatccgcgcgcgtcagccctcccccgtgccccgccccgccgccaaacttttccccaatccgcgcgcgcacaccgcccccgccccgccgggctcccggccttaaccctcgcggtgcggacgtccccgcgggcgggcggcttccccgggtccggccccgcccccgcccccgccccgccccaacccgagcctcgccgcgcccccggccccgcccgcgcgcccttggtccccgcaggctcctaggaccggccaggagccgccgcgccctccccatacctgcgcccgcgcgcgcccgggtcgggtcctcaactctcgagacacctccgcgacccccagagcaggctccggccctgcccgcggcagtctgacctctgcgcagccccgggccgggcccagaccgctctctggttgctcagaagggggcggactggacggccgcgggagcttcgaggcttccaggtctgcgccccggggggtcttcgggagcagaagggagaagcagggcctcgcccagccggagctgctggggacggggtagggggggacggccgcggcgatgcaggcaggggtcctccccggggcgttcgggttacctggtgcctttggccaaaggtatgttcccacctgaggcctcccagcctctcacctgctagtgacgggaatgacaagaacattaatcatcgtaatagacgtcaacatgcgattcaatctccgctaccgggcaggcggccccaggagcagatgaagaaacggaggcgtggagaagacagcgcccagctcttcgcggctcttcctccacacgcctcgcctgccgtccctgcccagggcccagcacgcagggctcccaggccgcacctccagccgccccatggcctcccctcatcctgcctcccagtcttgcaacacaaacctcacggcctgcccacatcccgcctcacaccctcgactccgcggagtcaccatcccagcacctcctccatcccccagagcagcctctctttctggggcctgaagccccctcttccaggaagtcctcccaggaaaggctgaaactggagaggcctggcagccggtgtccccaggccgaggagagctaggcggggcgtggggggcgccagctgtcagggtgtgggactcctcaaggcccgaactacccggccgtcccaaggtgctggttcccagcccagcgtcctccaccccaaatcccgcgtctgggccagcgtgggcgtcgcgagggcggatggaggtgcgctcggacggcccatcctgcccccgctggcgcagccgccgctgtgcacccggggaagggtccagggaccgccgcgtggtcctcccggcgggagaacgtcctgcgccgccgccgcggccctgtcccacaaggagccagcagcgccggggcccacctgccgccctcccggccggagctgcagtcacggacaggtgggtggggcggtctcacgcccgtgggagagcggcgctgaacttcccggacagctggcgaggaggcagcgctcccacagatgtgcgggctgccggacacaggtgcgtggaaaggggacaggtgtgcggaaacgtggctgcgagcgtgcaaagtataagca

SEQ ID NO: 316912 - DNA, 4001 bp, Homo sapiens
tcagagctggcccccaaggccatgcttgcaaaagttcaaaggtggcacttctcagaaagccctgaaacgacttccttcagagttatttgtgaaagacatttcatgcagaacctctcaagttcccactgtgagaaataaaatggaaagggagaaagccaattcctatattttttcaaattggaaaaaaaaaaagcagtttaagacaaatccaccaagattgtgaaagtttgggaaaagaggaacttttaaaatatgatctgagtgtagcgatgtgccgattccagaacttatgacccagcgggaaatggcttttcaaaaataacccaagccctctgcatgctggtccttggcctaacgaaggtgcacagtgggctgttcagagcaggagaaacacacttggatggacctcgcgccctagtccacgctaggaaaatcagcacagtccggaagaacctcctccccacctccacccaaaccacagaggcccctgcccttggaaagcagcttgatcccagctccccagtgccgccagggcctttgccacgcaaagccagggctggatatcctcagccccaaggccgcagctgaggaggacgaaggcgaagggggtggccgctggggcgtctccacgaagaggcgggctctgccgcccactgccatggctgaccgtggccatccaccagtcagcttcagccccagccaggaaacatggcaggacagaggcctccagagcctccctggccgagtggccagaggacaggcaggtgtagggattggggaggccaaacagatcaaagagaatgcaagtccaggccgctggccatggtaggggctcgcccagtatggcctgagtgcccacacagcccaggacgctgccgggccctcagagcagccgctcagccaggcccatgtgggcaggcggggggtaggggggggtgctgtggcataaggcccacctggtcaccgcccgccacccagcacccgaacgtgcccatataaggccaggttggatgcggcgcgcttgctgggcggcaggggaggggtgcgaagcctcaggactggtggacacagcgcggacaatcctgagtggtcaacacgcccaaagggccggcctggccacaggtcccgcctagccatgggggcagccagcgctgtgcccggatcctggaacatggcgggcatgagtctgcgggcacacgtcacccatcggctccggatgtccttgctggggctgggtcccagggcatggctgccacttagatgtcggtgccatgagcacgtaccaggccagcacagcgtgtgcccagaggcacgcagtcctggggtgcgtcacggctctggggacttgtccacacaaccgcccggcactgcctgcctagagctgggcaggcccagggcacacggctaggtcggctgggggactgggggtctgggggtcagtttcagtcccagacaccaagtatattaccaatatctcccatagcccatcctgccttccgtgggggtctctgcaggttcccagagtccttatcgggtccactgtggccacaaaccgcccactccccaagaatccacaggtgattagctgccctggactgcaggtacgagtatgaaagtgtttgcaagaccaggagcatgtcctggggagccaggactaaagcccacctggccagcaagcacgcatgaggggaacccctccagccagctaggggagccccggtgggtgctgtggacagcccatgggtgagggggccctggaaggaagggggcctggcgagcggggcggcaggggcggggcatggcgcgtgccaggcgggcactgtggcagggttcagggccgggcgggaagggggcggcgctggcggaggccaggctggccgggctgggcgccagaactcacctcgggcggcggcggccggcgggaaggcccccagcagcagcggcggcagcaggagcagcaacagggggctcggcgtcatctcggcctgtccggacctggggacattgggggcgccgtcactaacacgtggaactgggagataccgccctccccggtcccgggccgcggggatcaggggtctggccgccctccccacaggccctccccgcccgcgctccaggcggaggaagccgcagcggggagaagctgtgggtatcaaaggcagacaaagggtttacactaattaccgggctcccccgccgccccccctctccaaacaccgtctggattcctggcgcttgtaactccggccctgcccgcaggacacacaacactcagcgccccgcagataatcgcctgcgccattagcggacaaatttgcgctggggggggcccacgtggggcgcgggggcgggggcggggcaggccgggggcccgcaggagcggcggcggcgcgcatgacccgtgcccagctggggccccgaacccgcccctccccgcccccgccccggacccccgccctcccccgtgtgcccacctggggtcgcggccgcgcgcgcggggggctcacctcggcggggggctcagcgggcgggcggcggggtcagggccgggcccgcggcgtgcgctccgcggtcatcgccgccccgggcgccgcatcccgccgccccgcgcccccgggcccggtctcggggcggggcggcgctacctgggcgcgggcggctcgggccgggtcggggtccgggctcgggcgctcggggcgcggggtcccggaccgggcaggcggcgggggcgagtccgcggggccgggggccggggccgggatcccggggcggcggggcgaggggcccggggcgccgcgccgcgaggcgtccttccctgcggggctttgtcaactctcccggagcgagcgccgagcccggacccccgacccgcccccggcacaacttccggccaatccgcgcgcgtcagccctcccccgtgccccgccccgccgccaaacttttccccaatccgcgcgcgcacaccgcccccgccccgccgggctcccggccttaaccctcgcggtgcggacgtccccgcgggcgggcggcttccccgggtccggccccgcccccgcccccgccccgccccaacccgagcctcgccgcgcccccggccccgcccgcgcgcccttggtccccgcaggctcctaggaccggccaggagccgccgcgccctccccatacctgcgcccgcgcgcgcccgggtcgggtcctcaactctcgagacacctccgcgacccccagagcaggctccggccctgcccgcggcagtctgacctctgcgcagccccgggccgggcccagaccgctctctggttgctcagaagggggcggactggacggccgcgggagcttcgaggcttccaggtctgcgccccggggggtcttcgggagcagaagggagaagcagggcctcgcccagccggagctgctggggacggggtagggggggacggccgcggcgatgcaggcaggggtcctccccggggcgttcgggttacctggtgcctttggccaaaggtatgttcccacctgaggcctcccagcctctcacctgctagtgacgggaatgacaagaacattaatcatcgtaatagacgtcaacatgcgattcaatctccgctaccgggcaggcggccccaggagcagatgaagaaacggaggcgtggagaagacagcgcccagctcttcgcggctcttcctccacacgcctcgcctgccgtccctgcccagggcccagcacgcagggctcccaggccgcacctccagccgccccatggcctcccctcatcctgcctcccagtcttgcaacacaaacctcacggcctgcccacatcccgcctcacaccctcgactccgcggagtcaccatcccagcacctcctccatcccccagagcagcctctctttctggggcctgaagccccctcttccaggaagtcctcccaggaaaggctgaaactggagaggcctggcagccggtgtccccaggccgaggagagctaggcggggcgtggg

SEQ ID NO: 316913 - DNA, 4001 bp, Homo sapiens
cgttattgtatgtaaaataaaacaacagatacttcccctttcttctttaatgcttctggttacatagctttgggaatggactgggggaagtaaaaaccctccttttgtagttacttacagggtggcttgcaaatatccaaaaatgatagaaaactgtctacaatgcataaaccgttctttctttgaagtaaaaaagggtagacaaactatttgtccacgttttccctctaccttgtcttaggcaatttctgtacaataacctccttcaacttcaatgatggacaataataatgcaagtaataataataacaataataacaagggccctctgatagcaaaaagaggagaaatctttcctgggccacttctccctagctactatttatctcaatttctcaagctgctttgagaaaaattcagaaaaaaaaattggggaaaaatattaaaactgtatctgagaccttatgttcagaaagtttatgagtccctgagaagctttaacagagacattcacttccaaatgaagggaagagactatgcaggttcattctgcaatgatcaatatgagctttgcaatatttgccacacttagtctctcaagacatgtttcttcctgctccacattcaatataatttactttaggagccaaaatccttactatgcctctgcttgctaatttttttaaccaccaatttgtcagcatttttataaagaggattttattttcaacacccaaattcctatgagattgattttatgttgtaagataaatgggggatggggaaaaaatttttgataaatatggtcaaactagcatttgaagacatctagaacatctttcttcaatgtgattattaataagcaattataacccagtataatttatattgcactaaaaacttctatctctactatgctcaacataatcaggcataatgtcactgggatattataaatggggaaaacacattaaaaattactttcactcaagtatagaatattaaataaaaactaaatcagtcttgcagagcaaattaaaacaaaaatccttaccgaatacttgagtcatgtgttaaaatcgatgcttcatatttcataatttcttctaacattttcctggacttcaaagtagcagcgtctatcatatctgtaatataggatcagagacataaaaatccttaagcaaatagaacaactaaaacaacagcaaaagaacttcacagattattattattattttttggtcagtagtctttattttctcacttggttttgatgattcatcaggattataagtgagttggattgcttttatcagctgtttgacttctgatgttttgttttcaacttgatgtaagatgtcttccaaagactgtagatccttgtctactttggtttgataagtagacaggaaatctgcaatgccacaggtagttggacaataactaccctgaaaatataacagtgattaaaaatgtagacagatgctactcttaaaatctattaagaaaaataggtaaaacctagactatgtttttaaaaagttacaagtgccagatgatatttatgagggaattatttctattcctctgcccctctccagttcacacacaaagggagaaacataaaaactacttacgaatctttcatctaagatgcagcagttgtctctggtagcaacatactaaaagagaaaaaatacagaaatttcactagtttattatctgttttattttccagctttccattttaaacaacgttttgtgaagagcacacttactgctacacatgttgaagagagaaataaaagagcatagaagtagagaattaaattccgggggtgcaaggaccaactcatgatgtctgagtgcccggagctccgagccttgtagtgtcagcactgtcacctctcaggctccaattgtccctttatgtaagctcctgggatagccaggactgcaaatggctggagctgatcacggggcctccttaccagaagggtgggcaggtctttcccgttcctttttcctcatcctggcccccaacctatactgtcaggttcccagattttgcacacaggttgaagctcctcctttttggcccagctcaaggttttttctctgatccaaaattatctgcaaaggctagtgaagcattatccattgctgtgaggaggagggcagtcctggaggctgtgtgatgcaacttcttccagtacatggctgagagcaaacagatatgacctcgaactaagcaaacctagtctatccttaagatgggtcctgctgccatcacctgaattaccaaaagaactttcttagcttagggatcagttaacactattattttagcctagggatcagttaacattattatttttaatctgtggctgtggcaggaggagactgacttcccccatgtcccagttcactattcccaggaatgaatgaccctggaaatacattcctgtccctctgtgtcaaccatgttcataggctctcacttctcagggagcttttgagctcaatcttccctttgtctgaaggtgggcatggcaccccatctgccacagagaaaagagccaggagcccacttcattgttcctgtggttccatcaagctatctcagagaagagaaaaatccacctcccttgtatctaaggagagtagaggcatagctgaaggaaggggcaaaatgaggtgctggggaggggccatcatttctgtttggcccttacagcatccttgtgtttgggaaaacatgtctgtcatcactgcctattgagatttatcactgggcgttacactattattaatgtctctatttttggttatccctcatttcttcctctggaaccaagcttattataagttttgatgaaatatgttagtgggagaaatgcctccagtttgaaagaaatactaatactttaattctgtctttacaaaggtatatttattgactcaaaaacaaagataaatattcatattcagtaaataatcaataattataacaaagtgaacacatcaaaaccagatttgttgcttttcttctcctccttaatatatccctctctgacttagcagttattgtcaatcatatcaccataccaccagccaattaagtctcacaatctttctcatccatcttttccactcagctaatcagttgtcaatcaagtcagttgaattaaacatttaagtattagtattctttcaaacagctctacctcagatagcatttgtagcaaccttatattatatgtatacatgctgtatccactgcattagattgtaaactgatttctgtggctacggcatctaacatatatagctgtacttaacatagttgtagttaacactcaataactatgtaatgacttgaatcagttgcctctgtgaagaagaatgggatgcagaggtggaggacaggattggaaaaaaaggctttatttttctctgtaaactttctatatttagaatgttgaatgtatataaatattatctactaaaatatatataatgaaaatatgtaattattgatcattcacaaagatttacatagtacactgataattacatcttgctaactttttaatatgatttgaacatgaaaggtgactcaggcattgcctttgccttcaagaagtgtgtagctcaattggagaatgtataaataaatagttgttaaggctctggagtccatctccctaggtttgagtcccatctttacaatttactggctgtgtgattcagtacaagttactcaatctccttgagttccattatccatgtcagtaaaagagagataatacttatgatatggtatttacttaatagggctattactaagatttagtgggataatgtgttgagcacattacccaattcatggtaagtgttaagtaaatgtttgtaaggtttatgaattaccaaatatatttggtataaaatctatgtaaataggaaactcttttaatagagctattattggtagattt

SEQ ID NO: 316914 - DNA, 4001 bp, Homo sapiens
attcctgaatttcagtaaagagagctggcagacaatagtgagaaatgacctactgtacaataaagaacctctgttgggagctggggcaaaggccagggtactaaggaaatgacttcttgctccttccaatattgaaaggatactccagcaaataaaaggactttgcataaaaggaagagacaggcaagcctgtgttcagcactgacggcactaagggttctcatgaagatttccttctcaaatttatgccatagtttacacttcaagaattctaaccccagtgttttctgcatttcataaaaaacagactcttggctatttcaacaggagatcacacaatcagctttaagggccccccagtgaattagtggagagaaggagttaagagagagaaagagaaaagaggtcaatattgttggctcaagaattcaataatgcatggagctgctactccatcccagggccctgcctactctcttatctaatcaactgcatctttgacctgttttctctgctcctttatgacagatttttaaatgatgaatttctgttgtctttctctgttttgttgttgttgttgttgttgtgctttgtgtgtgcatgtgggcggggcagcattctttcctttttatttttatttattttttctagcaggtagaggtttcttcaagtttctaaactgacaatacttataaatgtaatttttgatgcagtttctgtaatacatggtgatctgcagctctggggtcatgctttcagttaacttcctgtaatttaatagctttattttttctcatagtaacatatttagtgttaactagaaacatccttcctacacaatctctctgaaaacagctttatgctttgtctctttggaagcctctgttccccaatggccataatctagttcagagatctgaggaatgaaggccatctagaaacacttgttatataaaaactagaggagaaaataagggtaaaatcctaaggatggacgtcagctgatgatgctatttaacaaaaggtagtctgccccagtcagctctagttcattccagacaaccaattttagaaactcagtttttgtttcaacagagactaacaatccggacttgagcagaattctccaacaggggaaccttcagcagatgtgctagagataggggcagtgatcccaaatagcatgttctctgcatgaggtcataatccaccagggcgtctgggaggatacagcacgcatacttcttacgctttctcaatactcagctcaagctcatcgtaaagaccctgcctagcatttccaaggcagattcgcttgtattatctcatttcttaggggtgtctagcaattatttgaaatgtacacacatcccaaaacacaaaacaatgcagtgtgtggaggattagccctccaccttgcattcttacctcttctcgagcttctctgaaggatgaatttaaagttcttcctctcctaggaagggaagacttggtggtgtcttcctgctgcccaaagagctcctcaatggtctttgtatcaatttggtagtgatgttcctgcctggctgccaaggtccagatgttggttttgcctcgaacttgctcctccggaatagttttccaaaaaaagcttctcatccgctttttcttaccaaggtggctgtagccgttcatgtgagtagttgggggtaggcctggtgggggaggtgggatgggaggctccccaggaagtggaggtggtgggggtggaggaggggaggaaggacactcttcccttgaacatgaacatggtggagatggagggggtggaggaggaggtggaggaggtgctggaggaggtgtctgcccaatcatgaatccaggtgctgtggcaatattcccattttctttatcactgaccaaggagacacaattcataacatgcatagtactgttgcctcctatggagataatttcttggccttggagaagaagacacaaacatcaaacttgtgtagcactttttcacctgctgctatctgccgccagaataaagggcaactgtcctcttccaaacctagcaagataaaataaatatcaaatcagttacagacaaacagtttcgcatcagcatttcccttcagaggctagtatcaatcctcccatatgagttggatatgaaaatcaatgaggggcaacacatcccaagttgcattacaaggacccaacgcttttctaaatgtgaatcaaattttaccacctggaaattctgccagagaaattgcaacaaatccaattggaaaccttatattaatcaacaaagcacatttatattgagagcctgctagaggctcagtaagtattgctcactttatgaataaactacttgtttactaactagttcgttctctttggacaatggttgcccaacccctagggaaactgcccaaactgctggagcattaggcatgagtgaccctacctttttccagtctggacatgtctcctaccaatcagtgggtcaaaaaaggcatcttgcaccttggacggataagacagggcatttggagatgatataataatggcctagctcatttccctggaatcagggccaccatatttatgctctacttggtgatgtggctttcccccaaatagagaaaagaacagcagatatgaaaaatgagattccagccctaaatcaagctttactgcttatagttttagacaagtcactttgcctcaccagacttcagttttctcatttgtaaaattaggagaacacattaaatgacctctatcatcttagattctagttaagccactctttggaaaccatcacctacctcttctgcttctgacacttttagcaaagaagagatacgcccaaggacacgctgcccatgtcacatctgccacatgtcccttatacacagtcaccaacttactttagtgggttgcatttttatggaacttcacgtttgtttttcatgctgggctgttaccgatctgatgtgaaagagaggtcaaaactactaaatttcttcagatacgagaacaggtaagtggggtgtagaaaggacgccatgcaggctattgagtgagtaccccaactagatgggagtgtggaaaggggactatttcctccagatcacaaagggccatacacaatggctttttacacggcacttcggggtgtaattttctttttacagcaccactgtcaaagcccatacttacaaacacaagttgatgaaataattttagactacacagaagtaaacaatctgatctcacaaattcaaatattacaaaatgatttacacagaactacatccaaaaggcagggctgccttgggaataagagtggagattctaggaatagactgctttttctcagaaagttctgctactttcaagatgtgcaacatgagctgaggttggtaacgtcacctacatttcagcatcctcatctacaatatgaggaaatacttgttccattggtttgtataaaaataaagagctaacacatgtatggtccttaccaagatgcctggtacatagttagctattatttataacaataacaagctgttatcatatgtgcatataatttccctttattttcacaggcattacatttgctttaaaatatgtattgggtttatagataaaatgccaagttacccctggctgctaggaacaaacttgtaatatttccattctttgctatcaaagtttgtgagagctgtcctttctcaatgcttggtgatcatctattaaattgtctccatattacaaaagcaaatattttagtgaaacatttgaatattagagttctgaaaactgcctctatatgggaggaaaatggcatctccagctattaattggatactttaaaaaatcattttcaccacttttaagtgtgcaatttagtggcattaagtacattcacagtgttgtgcagccatcaccaccaaataatttttaaataagtaaaatagaaaatatttttccaagct

SEQ ID NO: 316915 - DNA, 4001 bp, Homo sapiens
gttaataaactggaaaagcagtagtttggagtgttcctgatttacttaaaaacattttcaattaagttaaaatatttttatcagtagcttaacgattatactgtatacttcactactgaattcacttaagagtaacaagttacttaacagtgtaaaatcagtccaatcctaagttcaaaaactttgtcctttaaactaccaacaaatagaattggcgtaagattaggtcctgaaactggaataatccttaaaggattcaatgtcctccaaaatgttgtaagtcagtgttgtaatgaagccaatgattgtaagaaaataattttgacaactgacagaaccattgtttcacacaacctgtgtaataggcatcaacagaaaatttcactaacctggcattttcttcttctggcctttcaacttcattttcatctaccaagtaaaataaacaaataaataaataagcaaacaaaataaagaaaccactcttaaagaaactagtattatgaaaatctgaagtgatcatcacaagcactaacctaggtcctttgccaaatcactgtgcacatgcacgtcccatgggcctataagcacatccaaagttagatcaccttataattacttaacaagatacttattttatggaaaaaaaaatcagactttactgctataaaaataagcttaaatttaagaggtaatgaagatttccagatctttgtaaaagaaatcctacacattcacatttcaaagagtagtaactaatgctaaatcttgccaccaaacgatttttttttacaagtttatcaaagtcacatcatcaaggacctgcatggtgcccaaagtgcacttttactattctattctaaagacaatcaagaatatatgttttaggcaaggaacaaacattaactttcaaatctggtgttaacaagcaagaagggattgtgacttaaagttaaaaaccagatgtcaaacaagtacccttctagagagaagtacatgatgcattaaatttattttgagaaaaacaaatacatgagatgacactgaaaactataagccgaagggtcatgagatacctccatgatgtaggttaaacggtagtctcttaaaaaagaataacttcaccttaatacaggagacattcagagttttctttatgggccatctttctctctctctctcttaattaattatttttaaagcacgactttcagacaaggaggtacccttgcaggtgcattccatacaaactgaccatcaagaaacaagacgttagttgtacagcattaactttatttagctattattacagaatgactgtttctgaaagaagggacaggaagggcaccctaaggccacagggcaaaaacagacaccaaaaaccaccacctcagaatcgacagaaaaaaacaagggtaaagagcgcagcagctaggcgatcgagacgcctcggggaaagcacagcgaagccgggggccaggaccggtcacagccccccagcccggcccggccgccacaggggtggatgcgcatggtgggcgtgggccaggcgggagaccgccgcggggactgggggcacgcgcacgccgcgctcggcctaagtcaggccggacaggactcccaaccagaggcccgaagcggcggcgcgagaggccagggacgccggccgtttgagggccaagaggggaggcctgagagaacccgagagacagagacaggaagtttcgtaccgccatagagccactcttcctcctcatcccctccggtcccgccgctcagctccgacactaggcgctcgacctcgccggccgacatggccgccccgagcgcaacttaaacgcggcgatcaacagccccctccaaccccttccccagcctcgcagccccgaggcgcgagaagggcgcgaacccgccgacgaacgaacgaagaaagctcgagactccaatcccaggaaggcgacggcagcggcggcaaagatgaagcctccagcgcaggtccgtctgcgcatgcgcaggagacccaagcggcgcggcgcgtataggtggcttcgcttccgcggcggccacctgggcctggttgcgcctgcgcgctgaggtgggccccgcccctctaggatcccggtttgctattttgcgtggcttcctcccgtggcgtcctgagtcggccagggttccccgcccccacccttctttttaataacccgtattgccattgctggcgagtacaccattgttcccttctactcttcgtgctctttcttctcaactttttatttgttttttaatcttcagaaaggccttcttttattctttaatcagccttgatacagaatcattacctgtcactccctttcctcactgaatagagaagaaatcacaatcagtactatttctcaaaaaattaattttcacagccaacaaaagcaaaactaatagatgaagaatgcactctccttgttaaaaaccataaattactgtcaaggtcaaagaccgcctcattcccctacccttctctccggaggtagcccttgctacagatgcatatcctgtttggagttcatcattccgaaatttcctatacacttacttcatgtgttgtgctgttttggtgggagaacctgagattgacaagtcttaaatagtacagtacagtatagtatcatccttcgacttccttttttttctttttttttagcatccgtgtcttggagctctttttcattttagtatgaatcaaactatatctattttaagtgcttcataaaattgcatagtatggctatcacagagtgaatatggctatttctccattgatgtacacccagattgcttttgactttacacttttaactacaacaaaaaatgacaatgaagatccacacggctccttgcagatttgtctgtttctcaaagatagatcataaagtatgtacagtttttattttaataggtaaaccaaatgttcaggccgcttctgaaagcacatcttccagtgaaaagatgacataccatggttcaaactggagctctaggtttgtctaggttttttgtttgtttgtttatttatttgaggcggagtctcactctgttgcccagctggagtacagtggtgcgatctctgctcactgcaacctccacctcctgggctcaagcgattcttctgcctcagcctcccaagtagctgggattacaggcacgcaccaccatgcccagccaatttttgtatttatagtagagagggggtttcaccattttggccaggctggttttgaactcctgacctcaggtgatctgcccaccttggtgtcccaaagtgctgggcttacaggcatgagccaccacgcccggcctgtttttttgttttgttttgttttgttttgttttgttttgttttgtttaaaaaacagtcttactctgtaacccaggctgaaatgcagtggcagggtcactgttcactgcagtctctacctcccagactcaaacagtcctcccacttcagcctcctgagtacctgggactacagacaagcaggtgccaccacacctggctaattttttattttttgtagagacaatgtctcaccatgttgcctaggctggtctggaactcgtggtctctagcaatccttccacctaggcctcctaaagtgctgggattacatgtatgagccaccaggcctggcctcagttcttcattatacctagcaggttgtatagtcaggcaatcaacctttctatgcttcagttttctcatctataaaatggaaaggccaagttagatgatctctgaggtctctttcatttataaagtttacaaacagggcattcgcttgtcaacagagagaaatccattttgattgaacaactaaatgagttttcttgctccttgatgaataaatattgttttatcatttatttatttagcaattacagaatatctgctctgtttaagaacttggaaaatgaagacatgagtgaaacagtcccaccccttaaagaact

SEQ ID NO: 316916 - DNA, 4001 bp, Homo sapiens
caatttccctaatatggcccaaaaccctaaatatagccatattttttttgttcaaatacactcagttaaacttgtggatagcggaaatggtggtaggcaattaggcaaggagcacagaaaacaatgacaagtaaccgccactatctcctcctgcattcaaatggctttaaatgtccttggcaagagctgtcaaagtacagacacctgtaacatgctccttccgctccaggctttgtacccctgatggagtctgggttacagggagggaagggacgaaattacacaccttaggtccgaagtaattctaccattctgagaaggtacatggcatcactaatactcagcctaacaaaaggcatagaattcccactcaaattataaggcttgttagcctaaagaaaacatgagaatttaacttggggagtttaaggtcctcacaatatgccttccatgagcgcgcgtgcacacacacacacacgtttaattttcacatgaccacagtgagagactgttttaaatgatggaattcaagaaaagcaaaatctagaacataaaacttaatccagaatttatttcaaagtttcacttgaaacttttaaaggtttattatactgggtctagatctgtttaacagtgaactgtttttgcaagacattttggccaaaaagcacctagcatagtgtcagaattgggagttggtgctcaattttaaaatgtgttgaaaaattgttaaataaacttctcaacatacctgtgctcaaaggcaatataggacattttaaggcgtcttttaaaagttagcccttgaaatcagaatagcatagggattttaaagactggaatctgtggtcaaactgcttgggtcaaaacacaggctctaccactgacagctggattttgggcaagccgcctaagttatctgtgactttaagtttcctcacctgtaaaatgggaattataatagcacccacctcaccgcattgtcagaaaagtaaacgacagaaatcaacataaagcattttaggtagtaagctctccataaatgctatcaatattcaaaggtatgtgttcgagagatcaaatctattaaatatacatatcagctttgatcaattgaaatctcggaaatttcataattgcatcttactccccctttccacacatcatgcggcatcaaccttccacatgatgtggaaattacatactttcattcatccgtttgagagcttgtcatatatggcaagaaagaagaaagatgcctttttcgtgactgttgctccttcagaacttcaaaacactgtcacgtacacaataggttggagctgccctcaaaatgacagctcacagctttgctgggcccgcagaggtgcccaggcggctctgcccggaaggggttcaccccaataaccggagaatctccggtcgccacagccaagcacagcgcacgcccgggaaccccaaggaacacaagagaactctgaaatggggaaggaccctgagttgtggagaaagagcgggaggaagggtcacggagggtccggagccacactcggatcaggcgcgtccacgctgacaagcccgggaccaggtgccggcgataggcagcgccgtcctggacagtcccttccctttcccctacccgtcccctccccggcgagcaccgaagccaactcgggtcccgcgccagaattgccccccggcgccccctcacctaaaggcgggtccttccttaggagccctgccctgggcagacgccgccgcggagctgccgctgctgccccttttgttgaagagcttctggagcagggtcggggccatgatgccgccgccgcagctccggccgtggcgctcggggggccggcggctcagcgcgcagccgggggcggcggccgcggtggcggggccatcgcggcggcgcggccgcccagccttgcgggagcgcggggccgctgcgactgagtaactctgctcggcgccggagccgccggctgccggtcatatgactgagccggcccgccaccgcctcgcgcgctgacagttatctcctgcgggaggagcccgcagccccacggcggcggcggcggcgcgggaggagcgcggcggccccggcggcggccattggcccggcggccgcccgccccgggctcacgtaaccccggcgggaggcgggaggtgggaggtgcggccaggagcgggcgggcggcccagtactccgggcacgcgggggacgcggacgggggcaggcgcggcacttaaaggggcccgaggggcgagggcggccgccggggcgcagctccgcgagtggcgtggggttcccacggagcctgggttctttcgcacagcgagcatgcagctaggccgatctttgttctttagagacaaagcccctgaacttgggtcctcgctttgttcaggtacaagagcccgttcacagaaggcgtatgctaggggggaaggcttggtacgcgcggtggccgcttcggtgggctgtgatttgaatcacatagcacccaaggttttgtcaggtttcctccatgtccaaattcgattcctccaggctttcacaaaatttaaactgtttatccaaatcatttgttctgtttggcgtcttgggccaccataccatggttatataagaagttgcatttgaaatattaagtcccccctttaaaacatacacacacacacacacacacacacacacacacacacacagaactcactacatagatttagaaacttaagatattttatagcaagggattgtttttcctaatacatatttaacagtcaatcaaggcatatcagcagcagatatttggtttgaggaagggaggagttcatgtgtttgagtccgctttcctgccctgtcccaccccagtcccctttggaatttaatccttggtggtgcagggctctaaacagccagtgtaggacacgttaccagactcaaagcaacttcttaatctatgttttagagcgttgggcttcacgaatttttccgatgatgggaaatagagataaagttagtaagaccccaaccatgcctcttctagcttctccatgagtagtgaacagtgactcacctgggctctcttacacttgttgagaggaggactcttggagactcaaaaaggaaaatatatttccaaaaacataagtaatcaaaagaacctattctgggcctattttactttgcattttctttttttaattgtgttagtttctggacttggttgggaactagctgtgaataatgtgctgaaatttcacaaaggtaagagaaaggtggtagaaatggaaacttagtcatttgtttccttcggacttttactgttaaaatggtggattaagtgtttatcctgatgagcaatcatccttttgcacaattgagtgtacacagaaccctaatttgcaactttgctatttctgtttgctgaaggcctttacctcatagggctgccagtgttggtcaggatgctatatagaaggtattggctttatacgttgtgactttcagatacagtcccaggtcatactgtggccagcaactcaccacctttccttactccatccttggtcagaaaatgtcctttattctccagactaaaatctgcatgttcctcatgagcctagcagcttttgtaactgcatatagaagaggaatttgacatattgtgcctcattcctcacttcctaggactctttcagttccaacccagtccaaatagacaagatcatccaaaagaggcaattaaaaaatcataacctgctctagccatcatcttcaattttggttttgactaggcaactataaaggaagagtgtgtattttaaactattaaagccaggacttcagttaaaggagacaaaaggaaccaaaatgcttcccttctcccctctttctccctgtgcttcctctcagcatcacattcttcctcatcctggttctggccacacctcctcctttggatttttaaagtatacaaaaatcctagcca

SEQ ID NO: 316917 - DNA, 4001 bp, Homo sapiens
gggtgactctctcatctggtttattgttataatcaagccctacaagctttttttttttttttccaaagtacgcgcccacacgcacataaacaataaagttatatttctacaggacttgcactgttgggagaaggctgcacaggccccagatgtgcctttcgcggagattatacacacttgacacacatcccggaagagtgcagaaggcagcacctggacccacgggaaagtcccccacccttgtgcgtggattcccaaggcctttctcttgggaagccagcaaagaaaaggcagctgctccagtgactggaggtcgacccgaggcagagctttgtcctccccgggcctcccgcagcccccagtcctgcgccagagctcgactcccgggagccgccccgcgccccttcctaggcaccagggcggagaaggcggcccgccctgcgcccgccgccgccgcccagccgcggctctggtttgcggctgggcaggtgaactcttcttcccgcagctggatgaataatgaatggagccgggaggggaagccgagagccaggcgctgtggattaagccgtcttcctcccagcccgccggctcccttccccctccctaagcactggcggggcgacttccctggctcctcggagcaggagggagctcacagcgcctcgcgtccccaggcccggcatcccatgaccccaaactcttgatttacttattgactcatttatttggctgagcccggattgcatttgatatcatggcgacaactagtctcacggcttccttttctctcctgcggctccggggttttacaggtagcttggagcctcggaggaaaaccaggaggcggagggtgaagtaaaagaatgaacctaaactcttattaaccacttttgttctgggaagcaggctggttcgtgcttctccgtactggagagatttctttcagtgcaactgaactgcccacgaccagaacacgctccaaccagttagttataaaatcctaactggactttagggggagactaactgaggtaaggagggcgggagagcgatggggctttaagatgaaagactgtatgtttcttaggaacagaagtatttttaaacaggtaagagcaattgttcgctcctcacctgtgctccatgcagttgctttcccttcggggaaaggtaggtggtggaaagaaaaaggatcagtttcagagatgtcacctccatcggccacccacccacccaaaagcacttagggcagagagggaggccgtttcgggggtgtaatccgaatacaaaacaatcaggagtaggaatcttatcagaaaaagcctattccagtttcacttccacctcacccttcccagaaaaacttccacctcaccgaaataccataaaacctgctgagatttttaaactgcacgatcactcacacatacacacacacacgcacacgcacacacacacacacacgcggcaccgctctctcaccttcggaatgatgaggcaatactgcaaattccgccaacgctagggccagcccgagccacactttgaggacacccatcgccgcctcggcacccacgatggaggagcccagccttcagcatccaagaagcggctccgccaaaacgctggctccggcgcttggaacccgggcgcactgaaggtgggggaccgcgggcctttacctccgggaaaaagagatggacgggcggagagcgacactcatcagcccggaggcgccggagcgggctggggttcaattcactcgctgctcaggcagagagcgcgccgagttcccccgcaaggcaggacgccaacgtgagctttgggagaataagaggaggcagagcacagttctccgcgtcaaaatctcgccggaaagttgctggtcactggccgatgggatcttccagcatttccctcgggctagacccttccgatcccgggtccccgacagtggaaatcctggctctggtttgtccgaagcagctttttaaagttcgcttggcaccatacgtcggcgttgcgtcggcaccgcgggtcgccgggagccccgaaagacccacccacacccactccttggtcgagccacccggctcggcagacctcatctgccggggtccgctcgctggaaactgtgcagcgctgagggcagctccggggactcgcccgccctgcagccgcaccgcaccacaccgcctcaggctgcgctccctgaagcagactgttcggaagcttcagaggaaagactggggggcgctgctgctactttctcgtccccgcccctcgcctgggtgaggagggctgcggggacgcggcttgctgcacaccaacacccacctccgcgctgaacaccccggaggaggtctgcagggtagaggtgcaatgattacgggagtggaagaagagccataattttaattgcacggaggaaaaagctagcgaggctggaaaagacccccaaactcaaggccactctggcgagagagcctggaaacgcccaaaatacgccgggtctggaccccgtgtttaaaggacacacgttcagccttcctctagtctcccttgcctccttcctctctgctttgctcggtgtgaaaatggacccagagactcggagctttggcgaaattccagagagtcacgtggggaaagggagaagcgaggagggaggtgaggggaggccgggagagcaacctgatccctttattcattctgctggagttcagattggctttgtctggggaggaatcaaaagtgctcataccggggacggagggggtggagataggttgcacagttcttgctcaggcacaccggaaggcagatgaaccgtgtccacatcccttgttaggggaggaaccgattcggcgggctgggggagcgtgtgcccacatcaaaggccctggggctacctcccacccccacagcccgccactcctgctgaactaagtgcgtccgggggacctgattgatccttcttcctcgctctgggaccctcaggctgttgcatcctggcttttaccagcagcccgggaagatcttggtgtgtgtgtcctaggcggagcctgagagcaaatgcacctttccctttccctaggagactctgtcagtggaacacaacgcggtctgggagctgtgggtccagctgcgcccccagatgccaatggctgggaaagtaacatcaggacacggccgactggggcgcgcacttgaagagcagaggccttgattccccgccaggactgactgacggcagctatttttataggaccgaataaaaatagctggtccacgtttaatcgttttataagggaacagttgcatcagagagatgctgactgggttctgattggcccagagaagaaacgtctcgggtccctcaattgagtcgggatgggcgaaactgttggaggggaagcagttgcatgagctgtgctggcgggggtcccacttgtttccagtcttcacgaacaccatgacgcgggcccacgttctaacgtgcactgacgccacttggaacaattcacttttccgaataactggaataacttgaaactggcaggtccctgtcagtgttactattcagccagaacaaaggagaacctctgacaacctggctctgaatcttaagtatttggaggacccagggtttgcacatttcgccctcagtctctctgttgggctgtggtcattctagggacagaggttgtatcatctttgtataattgaagcacatagtaggtgctctttaaacatttgttgaaataatggattaagtgcctgagagcagcggccatatcaaggggagctgcgggccttaacctcctcccaaaaaaagacccctccctttttatttagaaagtagggcctgtgcggtggctcacgcctgtaatcccagcactttgggaggccaaggcaggcagatcacgacgtcaggagttcgagaccagcctggccaacatggtgaaaccccatttccactaaaaatacaaaaatta

SEQ ID NO: 316918 - DNA, 4001 bp, Homo sapiens
gattgagggctgtgtggtccaagatggcggtagaagagtctcccttccattatgtctctctgtagccactcagtcaccactttctcataaagcccttccttttccatgtagtgccagtcttcatcttcagttgagagaggtagttcagcctgctgcagcaacaggtcccccaggtagtggcctgagtgggaggaaccaggggccaactcccactgaggctcttcctcatttccttttaggggctggttctccagcacaaagtggatggttgagtcctcagagtcaatatcagtagcactcagtacaaagggagagatctggaccacctgcccttcagtgagtgagagtcctgtgttagtattgaccattggtggttcatcatccacaggtaggatggtgaggggaaagaggaagtccacttggtggtgcccgtcctccatccggaagatgatattgtcactgtaggtgttgctgccatcatgctgatacaccactcgccctgctgccaggtccgctggtgtgaaatacttgcacccagcaggtgccccaaacaccaccagctgcccatgtctcaagcccctgactgcagccattttcacctcttccaggttatctttatcactgataggaatgctgtgggtgctggacaagggccttgactgaccttcaaaaagcacaagtcccctgttatggctagccactgggaccagagtattcatggatttcactgtcaccatgaaggcaaaggggtctgaggcggcgccgtctccgtccaccacctccagctccagctgaaagaggcgctccccatgggagttctctgcagggggctgataggcaatcttcagctccctcagctcctgctgggtgaagaaggagactggaagccctagagggtcgtcggtgctgaccacgtagccctgttgccccgggtgccctggtgggtgagtgggggcgttcagaatgttgaacaccaggtcaccagggtctgactcgacgtcctccgcggccagtgcgtcaggcgtcagggctgtcagcaccagtggatccacctccatcatcatcgtggccatgaagctgggcctgggcggtgtgttctcggctccgccgcggatcctcacgagcagctggaagtgctcgcggaccagcacacccgcggacccagcgtcttggccctcaggccccagcagctccaccatcatgggcacgtagtcacggttgggcgaggaggtggctgtgtgctgatagcgcaccccagcacggaggaaagcctcacagtctacgcccttgcccctggggagaggggcccccaccgcgtccaccaagcgcccgtacttgggcagggggccgtcctcgtgaggaagtggggtaagccggcacctgcgggtggccgtggctccagacttcagggaggcgaagtccagcactctcctgtctatggcgcggctccagcttcgcagcttctccactaccaaaggcctgttacgcgtcaccagctccagctgggagaagaccaagtccaccgccagcgtgaagggcagcaccagagtgtgagtcggggcgtcgtagcgcagctgcagcagcacccgggcgcgtccggggctgtgggagccgaagtgagtgtactggacttggcggggcccgaaggtgcaggggaagcggcgcggggagagcgcgcccttgagccgcggcagggcgtccagtaccgtgacttcgcaccggtcccccggctgcactccaatcaccagatcccggagcgggtcgagccaaagggaacgacccaggggcacccggagtccagggttggcaatcagcacgctggggccgtcggggcgagtgccgtcaagcgcaccccgggcgggcaggtaaagcgccgggtcgggctcggtcccaagtgaggatgcccgtccctgcagcgcggggcgactcaagagcaggcaggcgagcgccacaaggagctgccggggcgtcccagtcgggtgccgagaagcccccgccatggccacggatggctcctggcgttgggattcccggggtggggtgccctgtgcaaagagggatctgctgagcggcaggtgcaggcagtggaagcagtagctgctgtccagtcggtagccgacttgcggatccagcaagagccagcggctgcgcttcggctgctgcaggtaacggcagcgggggaaggggctctgcccacttcctgctcagccccggtcgcaagtctctctctgctggcttctggggaccccagatacgcgcccagcgcggcgagacttagcgagggtgcagcgctgtcccctccgctcctgggcgcttcacccagcctaccttacacaccttctcgccgggagccgtggccgccgcactgctgcccgcgctgccagactccgaccagctgtctggatactctcttccccaggtgccacaaagggattgtccctcagggttgggagagagacggtgactgtactcgggtcagtcctgcgtctgtgagattgagctcctgttgtccattcatccagggattggtgtttctgaaaagggggagagacaccattcctcttccttaccgctgacaggagtgtatcttctagccaaaaactgagtctcacttcggacataaaagaagctggtgggagctattttgcaaataggattttctagctgtctgtctgatgaagcagcttattcaggatcttgtaattcggtgcttccaaacaaccctgacgtttttcttctgctcaggttttgaaaaagaaaatcagcacccaaacttacttgaacagcttgtaatctgggtttttttttttttttttttttttgtcattgggtctcacataacaaaatcaggtgtgcggctcggcttcctttcgttttcttagaatgtggtttccatatctgatcaacaatgacttgcctgttagtttattagacatgctgttttctaattactttcttcgtagacagtagccagaggggaggatgtcaaaggaaacagtagcagaatacttggatcaatttctgtggctcaatcatttaacacctggaatcagtctcttcatggctttcagatgaaggtgactatggatgtagtgttaggtacttaacagaatcctattaattttttaagttttaaaatagccaatttagttacagtgcagagtaatctttttctataaataaagtagtagtaatagtaacgtgcttccttataaaattaatgtgaatgtgagagactttttgatgacagtaaaaatagatgtctacaaactatattgatagaaatggcttcaagggggaatagaaatctttaaatgttatccccatgttattcttttagttttttaccgtgttacaaatgcctgttttattcacagcagcaacggcatcagctgattttcagggcaagaataatctgctagtgacttgaaagatttaattttctctctaaacatttaatttaatcatccagtgaaatgctatgggtctatacaattcactttagttgaatgttagtgtgccccattagcacacagatttgttcatataacagaattttgagataataagtttgaatcaatatgtgtttagcctaatgatacagtattagttcagtgtatctggaaaaatattatttaaaaatatatttctaattgaaacacaggtaaagtttcattgtaaatgagtcattatattatattttataaagctgctgccttgtccaaaggatgggtttttaatggtagaacttttattagtttgcatatattaaagttaccaaatgaatattcctataggagtgcagttttggttctttttcaagcacactcactcactttgggacaagtacctttttttctatgctattttcactggaagtagagatggatgtgggcagctgagataacagaaagctgaactactatgtttatatttttgtcctctgaccctccctcttcagcatatattcccttcacctctttttcaccattaaatgtctt

SEQ ID NO: 316919 - DNA, 4001 bp, Homo sapiens
tcctggtggaaatgtaaaatggtgcagcatctacaggaaacagtttggggttcctcaaaaagttaaagttaccacatgacccagcaattttactcctaagtatgtatacccaagggaaatgaaaacatacacccacaaaaatacttacataagaatattcacactagcattagtcacaatagccaaaaaggggaaacaacccaaatgttcatcagttgatgaatggatgaacaaaatgatacatccatacaatggaatactatgcagccataaaaaggaacaggcgctacaacaatgatgaacctcaataatgttataagtgaaaggagccagatacaaaaggccacatgttgcatgatttcttaggaaatattcagaataggcgatttcacatagagagcggattagtggttgccaaggactaggagagggggaggatgggatgtgactgctttaatgggtagggggagatttccttctgagatgatgaaaatgctgagcaactagacagtggtgaacctcttgaatatatactaaaaacccctgactgtacaaaagggtgaattttataattatgaattatatctcaataaaaaaataaaaaaccaagagtgatttgaaaaaaagttaatgtgcaaagtgcctacaacaatttcttggcacattgacagtgctatatgagcattaattatgattattacgatgatcttaagacacccgtgtctgcattttcattataaagttttcagaagataactctcctctcctcccaggaaattcacagagtaaaaatctcacattcattcaggataaacctgccatttattctggcatcttcatgaggccagactcctcgagagggttctcaaggccagtggcttcaactcactccttgatactttctatctcgcctaaaaatatcaaaacctctgtttatcacggagaccaggaggaaatactcgacatttgtatgtacctcgggcaaatctgccagttaaaaaagaagcggggatatgagtgcacaggtattttttcctaaaaagctaataaattaccattacgacctcctcctcacatttggctcaatttattttctgcatatatgttctctcatttaatcctcacagtcttctaaaagtataaaaaacgtctgaaagtataaatgtgtaaacggaggttcagatatttgatctcttaatgagtaaatggaagttcagacatattaaccaatttgccacaaattacaaaactagtaaatgacaagagtgcaggttcgagcccatatccctaaagcccatatacacctcaaccactgtgtgattcatcctggtttcactgtacatattagattagaaaaaattaataagttttctagaaagaaaagagacaatggagaaaataataatccctaataaaggaaattatcatgaactacgagatcagactaatgcagaccccccaggcagaggcctggagagatgcctcaggggacccaaactcgtgggtacggggtcacgggtcacctgcccgtctatcctgtttccagggtcgtccgcgcgggaggctgcccctctctgcacagacgccgggaaccgcggcccggcctccgtccagcccggacaggggccagggcgaagcctgggaggccacaaagccggctctccgcgccacggcttccaccggagttgcgggggtggagtgcgtccgaaaagaacggaggaggctcccgcccaagctgcaggacccacctcttcgtcttggttcccttgagcacgagcttggtagacttcacgtaggagtactcggccatggctccgggaaacttctgcgcggagaggctgaggccggttctggacgagtatgtgagtcggggcagcacaggggcgcggagaaacagaagcggacgcgaaataaacactccctgacagcctacgtctctgtagaacccgcctccgtcttcacccaaacgctgaatggctcagagttccacttccgggtttctgccggggagctacggcggccgcagagggccaaaaggcatccgcgcgcagctgctccctggcgccctctcaaggagcccctgaggattcgcgcctcccggaagggagaaaagcccgcccgaggcgcggtgctgacggtggctgggctgccgggtgcgctgtggaaccgcctcctgctagagcagcgggctggcgacggtcctcgccggggcgggaagcggctcaggctgccctcgctggcctgcggcggcgcggctggaagcgcgggccactcgtgcgtgggtcactcaggactgcgcctcgcgcgactgtgtgtgcaggaaacaagcaggaaataccctaaaagagaatgaagcgccatgttgagggtcgcggacgtcgcgagtgctgtgggaatgtgggctgaggtggagagttatggtagcccgtgttacaggctcaggggtctgaaagaagcctaatcgtggaggcggcatctgaggagggtcttgaaggctgggcaggcatttgcccgacagagatggaggaagctagtcctgtctgatggaggaaacagggcggaggcgtggagggagccgtgcagcgctggtgtgaggagcagcgagcaggccaggcctgtaaagcagagtgagggaaccaggatagagaaggcaagtcggggtcctgtggtcgctgaagaatttgaatgaaatcagtaaacaggtgagagggatccatcgcaagagcatgggatgaaaggaggagtagtccacggtgattcctctgcagcggtgggtgttattaatcgcgtatgtgacaccaaaaccaccccactcaagctgtggctctttccctaaagtagaaaaccgagaccagttgggttccaagcatccacgaagatcttattaaattcgtgatccctggtggcaccatggagtcaggattggctcatctcaaacctgactcagaaacaaaaccgtcacaatgtgcagagatgagcgtccttaccgctatcaacgtattttctggtgttttcacagtgctgcgcttcctaatccccattccatggcaatccacatgccatgatgcccggagtcattaacaaaggagacacacaggggctcctcacgttggctttccagggttttgatgaaaatctgtttcctcgtctcatacaatgtggttagtaatagtatcatttagggttgaagaattaaatggtacgagttatatagggtgcttattataacctacatggaaaatgcctaggatatgttagctatgctcatcaccaacatcgttatatgatggtaataatcagatagtcaggaagcctgacaccaagaaaatggatacatgctctgaaggaatgaatgtggagagatcagaaggtcaagaacaaagtcgtacaatatgtctacagtaaagggatagagaaaagaaaggctataaaagaaggaatgaaacagagttaaattatagaaatcaaagctaaggagaatttccagaaagggtagtatcatttaatatcatagaagtttaggagcccaagatggaaaaaaggcctctgggtaactgacattgaggcagtctttggggaagctccatttccgatagagaagtagactgaaagtcagcttgaagcagggactaggtgaagaagctgttggctggtcgcatggggaaataaataagggatggcatatgccgtatttctggatttctttctttcttgcccagcctctatatatgcacagagtttggcgaaaacttacaaaaaataaaaatgaaaccaatttcgtttgtagacccaaatacaatgctttctgttagaatcaagataaattcatgcctctcccttctattcaaaccgtcagttttgaaattaaacatcagcttttcttcttcattaaaatcattttcagctcttcccattgatggtttgggggagttgcataagcagtcaggtcttgatgagtagaggaggagggaacaaacactttcagcaaaggcagaattctg

SEQ ID NO: 316920 - DNA, 4001 bp, Homo sapiens
tacattctaatgtttttctgattatatagaaatgcatgactgtcatcagacatccaaaaggcatcaaatgtctaacatgaaatataaaatttgtctatagtcttagcggtctgcaaaattcagggctctcaccattctgagtataccgctcaagtttctttcctatgacttcttcaggttctgtcatttattaacacagtgtgtctaaaattgtcactgctggtcatctggaagaatctgagaagaagcagatccttgttctcattcccagagctgcatctctgctgaatagggtcagggtgctcacagcttagcctcatctgatccactgacagtctcagttatctcctgcccagggaagggatgggcttctctatccagggctgattccccaggacctggcagtgtggctgggacaagccagctctcagcagggaagacataagctgcctgggtggccatggaatacaaggtctgcacctgggcacacagaggcccccggagccgagtgagcagtgtcagctgctcacaggtaagtggagaatggatctgctgtgcccacacctgggctaggtcttgataaacagcctctgacatagctcgcacagaagtcaccaagctttttcgaattgacggtgtttggactcctagggcccgagacctatgccgcttgctgtgcccagtgcaagccctggaatgtcccctatggtgggcatcacaggtctcctggatttcactgttgtgcacagcagtggaggatcttgattttttattcaatgacaagctgcactccttttctggacagttccctgcaaagaaagcatgtgagagactcaccagagcagtccccacagaccctgatttccagaaccccctgtacacccaggtgaaccccacttgtctctcccactccttcctgaccatctcagcactggaatgaagtgaggctgaaccccctgtgagtccccaaatattctcagagtgctaagatctcaaaaatttactcgtcaataagtaactccctttccgctcaagcctcgtataaaagtttcctgattatttgccttttggggcaaaccaaaaacaaaaaaaccaccaccaccaacaacaaacaccaagattctacctgctgtgtcttggcagctgtccttggaactcatttttcttttcctgcagttttcccgatatgagctggactctggttctgtgaacacaatgagagtttgagaaagtgcctccaactgaacaccctgaaattcctagtccatcctggacacacaggagctgaggttaccaccaaaccccagctctcttctgttctccagtgtccaggatctgtacggccctggctgccaaggagctcccagtttccttgccaggggagcctgtgttgcttccctgtcccttctcaccttgaaagagtcaaatcttacctgatccagcagtgctgttcccggccttgagcttggtttcctcagaattctccttgtttggattgggctccgatcctgctgcaagagaaggtttaggtgactcacctctccctaggcagagtcccacagtctatctctgatgcatttttgcggatcagtctttcatgtgaagctcttctgccagtgtcacgagtgaacacatttctcaagtcccctgagggcactaagccatttcccatccccaaatctcaaaataaaaccctgctaaagacacagctcagtatccctgattccaaccctccttccagactccacaggagcagcccaaggccttaccttgcctttgtatgtgcttctcactggaatgggagaaggcggtcttgcctttttctttgaatggtttcttctcatctgagcccttttctgtaaaggagatctgttggaaagggggctggtcagtggagcactggatggaggagcagtggagatcggagtcttcatttccctttcccatgttgaagctcaagtgaaaggtgcgctctctctcacgtccaaaggcagagtgtgggttagtctgctagacctgccttttatacgtccctcggctgggcgtggcttactcttattggctgaagagttttctcattcctgccgcttcttagagcctcaatcagaagtttcttgctgtagttctactggggacctagacacagttaaagggagacattttcaggatcctgtcatggtgtccagaaaacaaagaaccgggagcacagggaccggaaaatcggggaagcatttcttcctatttctgtcccagttcctacctggaaggatttatgatcctgttcacctttcaagatgcacaattaaacatgcctatattgtcatatgttatatattttgcacagaaagagaatttattatacatagtgttaacattgtatgcatagatattataatttcttaaatgcttggaaacaacaaatgtcaaattatggttgattgtattaggtccacacatatatgatgaaataaaaatgcagagaaaaaataaataccaaatgaaatggcccttcctaccttaaaaatggggaagataattagatcaaatgcaataaaattgaattgattaggttgagtcagtgctaacctaattagcccccgattcctgaggtagcaaaaagtctcggtggaaaaactttcccccattctcacccttcctcagtcatcctgggagcgccattgtgttctgtgggctttattcagccctccctagtgaaaatggacttggtctcaaacaggtaacccaactgatcacaagacaaacagcctagattctgaacatcagctcctgtcttcacactgcggacaccacctgaatcccgtcaaagcccacattgattctcaacatccaccagcaagacgtattccagggcagcctctcaaaactgcctcagtgagacaggacaaggtgtggtggagctccaggttcagaacagctgcctcatcccttcctactgcggcggagtctgtctctgctggtcagagccctccaactagcctagtctatgtccaagcaagtgtcccctaaaaggaccttcttgtctccccctctgctgaggaaagcatgcaggaacgagaccttctatgttaaggagtactcagcctccagtcccaaatgacttgattgactgatgaactgattccttgaggaggagaaagtcacagggaagagactgtgttgggtgagtctgtgttttcccagctgtgctgcctgtgcaaatagtggaacgaaaaaagaattagtggtagacagacactgcctagtgaaattgtctgaaagtaaatggaacttatcataatatgatatcgttatatattataatattatgatatgaaatttgacatctaaataaattttgatatattatgaaataatatataaaatttggtcaggtaatttcataaattttgtaacaacattaacctataaactcaatagaaagctaggaaaattgtctgctcttgtgtaaatgactgcgttttggataactctgtaaaagctgtgaagaggggtctgctacttacgtgatagtaagtacttgataagacatcgacttgcacatctttgctgtttttaaccaatgctctctcaagatatgagaatattttactctaagaaagtattttcctagatatcgtaataggaattttgttaattttagttaataaattattacaacatttagtgattattaataatttatgtcattgttaaaatatattcctacagagaacatattacccatgtgtttttatttgtcctttaatctcaggtaaattttttaaatttttatttattaaattctatttattttagacaaaagagaccttgtaactgccatatgatgtactttcttagaaagagaaattctcaggcaaaacttaggactggctgggcatggtggcttatgcctgtaatcccagcactttgcgaggccaaggcgggtggatcaccttaggtcaggagttcaaggctagcctagccaacataaggaagcccca

SEQ ID NO: 316921 - DNA, 4001 bp, Homo sapiens
cgatgaacgctttaaaaagttggactgctttaataaaaaaaaaaaaaactgggtcacatgttccaacagaattccctcttttagagaactaattttacaaaataattcagagtggaagacaagacacgatggaatgctatttttgataatgagtagcagaaaaaagaccagagaataacacacccactgctactttgtttatacggttgtaacttgcacatgcaagtactctacataaagtattgcacaagaagaaactgtcaaaaatgaatgcttatgaaaacattcttcactaaggcctctaacaaggaatgtgctatctctgatttcctcggcaagtattgacagattaagcagagtgataatgctcaagatgaaaagacgtcttatactagtttttatcaatagtaaaagctgttggtactaattataatggctgtaaattcagtagcagaatcaactttacagacgatatctcctaggcagcacagcattttataaaaccaactttacttccatcaaaaccctttttcccccccaatccgacagaccctggcaacctgtcttgctgtgtcttttttcccctacccttccaaaagaaccccagccagtgaatcgaagtaatattttccgcagttcaaaggtaagggcaaactcagctctactaagaactcttgctcctcaccagcacacaccctaacccccacccccttttttttcttttcaaatcttggcctaggaaagattaatgctcccatatcattgcaaatccacaaaaatgcgattttaggtggcgaggaactaaactaggatggcaggaaagaccggcagcaataaatcatttcgccctagaaaccagcctctccagaacgcaggaaaccaggctgtgcccaaagaacctgccgcccggaagcaacaacttccatcaaacggcaaataaaagttgcaaagaagagctcagcgcccaggcaccctgcccggtgccgaggctgagagcagcaggcaatctacaggccgagtcagctcgcgggcggtggccgcggtgtccgcagggctggctccggctccggaagactccgggtcccggggtacgccaacggcccggggctgcgcgggcacagcgcccgcacccctccccaggaccgcgagcagtgggcggagagaccagagcaagggaaaaggcggacaatgcccggctgggctggcgcgctccgccggtccccgccagccctgcccgccggggcccgccagccgccgcgctaagtttgctcctcagccctcccttcccagccgaggcggcggagccgtggtcgccggtcttcctccacctctgccaccgccttccttcccgcggggcggctcccgcgagtcggtggcgaggcggcgcgcgaccagagcaggacgcgcgagaaggcggcgcgcgaggggtacccgggcgcgcgcgagaagagccaggcactggaggggaaggggacgtgcgggagagacgggcgcgcggcgctgccggcggaaccgccggagctcgggcgggctttcggttgaggctggggttgcgccgcggtttggtgtccgttacgagcgccggcccgggccgcgccgcgccgcttgccagccatcctggaccgccttccctcggcgcccaccaggaaggacagctggcgagggccgacgacctcgtctcccgcccaggctgggctgccggcggcgggcatcccggcgcctgccccggggctggaagagaaagtaaaatgaagcgcctttccccagtcaacacctacccgttcccagtcctagtacagctgcctcgctcctccagcgccgccggtccccgccctcgggcccctggctccgttctcttgacaatggcgcgtcccctttaaggaataatccgatcggaaccgatctgtggttaaacctccctccgactctgattttaaccggatttctctctcgctctctcccagagcccgacgggcgcccggctgtgctgcgaggtcttcccaccccttccctaccccgcccgccccctggccttcctgattggcgagaaacactacaacaggaacagcagtcctcgccctccactggcctggccagccgccgctcaaagttgctcctaccttctccccgccccttttcccgggttggtcttccctctaatcattctctgccctcgcctctaacgttgctttggagccctggcagtcaaggctcaccctcccgcctccggaaagcgaactttatttttattggtgaaaggacatcttcctgtacacttgattgggcaaggaaagagctagtctgcacgctccctaccattattactctctctttacgggcttgagaaacacagccgcaaagtcctctccgctttgccttctaggagcgactttacctttaaatgttgttaggggtcgaggacaaactcatatcctatattgaggaaagctggaaagggacaagagaaaaattcaaaattttctcccgatcagtaatgtatccagagctggcgcccggatcctgcggaaccttatccaatgatccagagaatggaatggttagaattgagttagaatacctgaaagtccagtgctaattcctcctgagatttactcaacaagtttcatccactgtccgccctactcataccattgattgcactggcattttgccacccggaagagctttaatcaagttatctgcaaacctggaggtttccttgcttgtctcgcaattgttcatttagaaaatcatttccattacaagttccgtttaagtcacgtcctctgtgacgttcccgcgtttccacgagacctgttacttttttgaaaaaattaagtagatggtacccttatgccatcctcaaagtgtaggacttcgttcccccttgctagaactgtaggaaaaacaccccaggtcacttgaacaactgagatgcctctcaggagaaaacgagtctgtctaagggaaagagggaatctgataccagaagcttgaccatggagcagaacctcacgcattgaaaagagaagaaattatggggaagcctagtgcggggtctgctttagagtttccccagtttcccactggagctgtaagaactaaaaggtttatttccactaaaattgagtacaggtacagcttcggtacccatctaagaatgttaggggaaaatggttatgtgttctctccctctttgccgatgaaccttgaagactgtgtaccccgggggctttagtacatttgcagtgataccccagtataatctaatggtgccaaggaagtgtcagtgctcagcagtaccctagaaaaggggcttgatgatgacagagaagggtaagtaaacatcagtagttggtagttcataggacttttccccaaatacaggtgaaaaatttcatgaggattcccgaaaatatgaaagagcaggaaacaaaagggaacgttgcaggaaggtggtttaggtatcactagtgggggcaagagacgatgaactatctgggttgcatttatatggccttcacagatacacacatcctccctattaagtccctataactaaatccctatgcttagcctattctgattttactgtataataaaactgcagccaagctaaactaatacttctggtttactcacttaccactctcaaactctgagactgcttctgggttctaatattctacattagaatataagaagaagaagatactatgtactgatatctagtatgatcttctggagataaagatatccagtgtttcaggcatgtacacacctgcagcttttgttcaaggtctaagtgatgttttcaggttctttctaaaacacctgccctatgatatccagcttgttactgccctcttttgctgcactagcagactgggcatataaactagagaaggcagtctacagtaacctctagattctcttacttgcattgaaccaactatgctgagattatcacctttcaagtataatttgtgttattcttttct

SEQ ID NO: 316922 - DNA, 4001 bp, Homo sapiens
tgaatcctacaaagaatatctgtttagggtaaaacatgtgaacaacttcaaaagatttacatttgacctttagtatttgcaacaatatgcattgcttgtgacaatcactctcttgtagggctgtgtagtaaatacaatgaaaaatctctacctagaggatttagtttaaatcataaaattctaaagctaaacttcatcctagtaactctaatgcaactagagtagaaattttatattttaaaatatacaaatatttaaacctaacttagtgtacgcctgctgaaaagcatagctctattcagttgaataatacttattaagtacgaaacagctttatatttaactcattcctattaatattggacatctacttgcaacctaaactctctctctctggaatgtaaaggaaatatcccccacccccgtccttttccaggcatcatttatacttaatctaatgttactaaatgacataaatgagagaccacaattccatttatcaggcaaaccatcacacctgtcaaagtcatgaatagtaataagaaatacaaagagcacaggataacttctatcatttaataattgctcactatgagaagtattgttcagtcgttttccacactgaattctttctctgtacacactcagaacacactgccaattgataaaaggaacatagcttcaaaagaaaattcttctaagtaaagaaaagctctctgttaagcatgcaagaggttaaacattgctgaaatagtgagacattttctcagcccacacttcccagttccattcaattaccaacagcacaagcgactataatacaagcgaatactgtattattaaatcagaacttcccatttacatccacctctaacctgagggggttgcaaggggatgacatttgctagtcaacagcagaacaaacagcccccaacttggaaatacacatgaccttggggtgtggaatgctcagagactgagtttcacaagttttatttggatctactgcataacaacacatctaaatggacccagcatgatgtaaatgtttctatacctacctcctcccttccaaaaaatgttaagagagctctgcactttgaagtctatgctttagatataggaataatattgatgattaaccagagactagtccattcaaataattatttgattatatttgttctaaacaacttgttggttgatttatttaacatcatttgctaatatatttggggggtttcctggaatggttcctatcctttgaaccctgctgaaagtattgctctaaaatatttatatttataaagcaagatataacataatgacatcaacttcacaaaaagcaaagctctcaacttcccctctagaatttagtgcataatcactaacagattgtcttgtaataataataataataataataataataatagtaattattaaaatatttttgtaatcattgccaaaagtccagtttcaaattataaaaataagcataacttgtttttaaatttttgtatggcagtctgtatttctcccccacttgtaatcatttataacaatattatttttcttaccttattttaacagtcacaaaagtcccccagaaagattcctaaacgctgtggaaatataaatcacaataaaaaaaaaaaactctcaaaagatcgtcttagctggggaaaaaaaaatagtttggtctaaaactatagaaatctccaaagtcacgcctgaatgagcgcccaggtggcaaacagaggactctctcccacgtccgataccacactcctttgtcaagttgatatgggtcctgttggtgaagcgggtcccacagggcacagagggtgcaagagggcgttgccttcaggtgctggagcaactggtccgctcgcgtctcaggttcagcaccgacagcacagtggacagtaccagctcctttcacctccagtttgtctcagtcactgaaccaggctgattctcgctcctcctccctaggcaggagctgctgccactcaacccgggggtgccccgcccccaccatctgacgtaactattttgcatatcaactcgccgagaggtgaggggccgcccccttgactgggcttctgctagagtcagctgcggcaatcggggcaacaaaattcaggcttaacgtcagcgtgggcatctttggacttcaggatgtattctcaaccagtccagtagaaactaaacgctttgacggtgctggagcctttgccttcgcggggactgccgtttctgcgcactctaagatcgctgcgggcacagctctggaaggaagacggggcggagagagggggcagtggagcacggagaggaccgagtgggaggcgggtggggaggagacggagaaatagaatgaatctattcaaccattcttgaaaacatctccaatccttttcatcttcctgcccaaactttgctgcctctccctgccatttggttatttgaacggatccgtatttggtgttcctactcccttccctcggttcacggagcctctggagggagtcgctgctgcagaaacttgcctggaagaaaaaaaaaaaaattctgagcactgagagaaaacgtgaaagcttgcagcgctaaccatcatttctaaacagaatcttaaggaaaaaaaatacgagtgctccatagtatatattatacttcatatgcgttcctataaaacctacagaaccttccttattcattctcatgatttaaacaaatcctcaaactgtatagacttggagattccagagggaaaaaaattaaataataaaaagtgaaagttatcagcttcaacttccactgccaaaattatgaaggttatgcaatatttattatgtctactatatcaatatttctatgaaagatgggctatgctggaagctttacatagcctttagcaattctctcagtatttgtgatatttcttgtcccagtgaagctctagcctccttgaaggcaagagaaagggggcctgtcatgccaaattccacagactgcttaaacttgtaaacaaacactttcagtgaactgaagcaatcaatcatccagaagggtgattattcacattccatgcacatgtcccacctacagctatcatgacttacttggacagagaagtgggtatctaaaactaagcttaaattttcttaagttggataaagcatgtttaataaaaaaggttgtttattcaaataatgtcatagcatttcacacattgctttccatcagaatgcatacacactgatatgtgtcatcatatgccaggagtctgatatcatctagcactggatccactcacaagcatttttcagggactctaatcaaaggaatacacttacttatttccccatcaggaaaaataatgcattttattttctctaatattaagaagttatttgaggaagtctatttactttgtggacccatacccccaaactgcttctttctagttacttaaaaaagaagaaataacagaggaaaaaactatggtgtttttgcttgagggaaggaacatttttttattctgattcacacccacataaaactttctctatggctttattccagaaattgcccatttcttttctgaacgtacaatccccagtactatttctccaacacaccttgactacaagttttgcattttgggtaatctgcaatgtttttgttttctcagacaactactgattttgcatttgtaagtgtcaagtgccatgactttttgcacagatatacccatacatgcatgtattatgagttcttcaattcccaaagtcattttaataaaggtggcagacaccatgatatgtcaggaaagatgatctgtgggggcagatgggtgttgcacaattacaattacaatggagccaactgtataacttgaacttaggctggctacggcgcacatgatatgcttcttttgggaacatcgcatagcacactttggtctgcttcatgccaatgtgctgaaatgtcag

SEQ ID NO: 316923 - DNA, 4001 bp, Homo sapiens
gagagtaactaggtcatgtttgtccattaaattctactgaatttaagttcagacgcaacactttagtttgtgcctttcaaaatcaacattgaaaaggagtcattcactgtctccatattcactcaaaatatgtggaaagtctttttaaagcaatctagggggaaaatgttcaatcctaattatgcgtaataaacagcgataattttgcaggataaggagggaagttttcagaatctaaagacacagtgccaacactttcttcaaaccaggagttgcctgctgacaaatcaactgctcagctgctaactgaacagttaagttagttactctacgaaatggtcaaataatgtgttttcttctttaccttctaatttttatccccatccatcccacaagcattctggttcactcttgatgttttttcactattactaatatttcgaccctgaatatcaatctgaactatgacagctcttagtaagaaattcattctaggtccttattattcctacaattccttgactgcttttcagaattagtttgtaaagattaaatcataacataaaggcccataagagtaatcttaaacatttaagaaaaatgttactgccaaagaaaggataattcaatcctgaggttcaaactcatcgtaccgtttatctcctaagaccaggaatcttggattatcaaaaagaccactggatgctaacagggccaaaagtttacttagaaacttggttcacatgcctaaggctatattaactgccaaatatggagctagagaaaaattgccatcatctcccactctagtacaccggggctctcttaacgacagttaatgtttcctagatccaggtacctgcaacactaacgtttgaaagaccagaacaaggtacagagccttgaacctaaaaccacagtatcttaatccaagttaatatcccacaacaatcatacagggagaacaggactttactattccagctaaaagtgcaagtgccttttttttgttgttgttatgaaggaaaaggcactctcctcccaccccccaaatccgttagaacattaagtatgtcttggggaaaaaagctgatctatgcaggaaattatagacgaaaatctatattcgccccaaagcggcaaagggccatcttaagaaatctgcttttagagacgcaggaaaaattctatcagattccactaacaaaatcaacacaatctagggaagcttctgttcctttctgtccccccatcccaacaaaagcgggaacccatcccccaaaagccattcccgagtcaataagggatcgtctgcataagagggggacgaagaaggcgcacgttacagttccagtatccgaacacgttcggattaaacccgcggtggcagggagaggggggttggtcaaacacgacggaacactaggtactgggtaagcgaagcggcggctgccttcaaacccggattctgtttccgtgcacagaaatggtgcccggaggccgccactttcgcatctgcgtcgcttctgcctccgtcgacacaacctcttttcccctccccccacgggcggggtggcgacggcctctccgctccgaaggaacaaggtacaagagccgaaaacgattcggaaacaggaacggtgggctacccaccctaaaacatcccctccagaaagcctgctcccacacttcctgtattaagcttccatcagcgcgccttcgggagctgctgcgtgcctccccccccacttcgccacctcatccccaataaacctcaaccccacctgtgcactcggagccctctgcccgcaagacgctcgcgggtcacctcccttcccaggcggcctcccacccctcacctagaggaaagactggtcttctctcacgcacacacggcaccgtagggagccggcaagaacaatgtctctgccgctacacctccggctcccgggctcacacaccggacgattgcctcgcgccgcggagcgcgaatggaatgtccctttccgaccaccacaccgacctcccctcccggcgcccgtacacacctccagccaacggcggcggcgggtacgtcgcgcggaggtcagaagagtcgctgaggaccgggtgcggcgggttcttattgctcgccgcccccttcctccgacaactcggaagcctcggaagccggagagccgcgagttcgtctgcctcacaaccacctcttcccgggcgccaggcgctgcgacgtgcgacaaggaccacggacgtcccgccccctttgccaccgccccctcttattgttttacccctgccgaaagggccagggaacccccgagcacagcgtcagccaatcacgcatctcctccagagccggacccaaccttcccgtgtccctctgcggagcacgcgcagtacgctgccgcgctcgcacacgctcgcgcccggaaagccggggaaccggaaccggcctaaagccaagataagagtccgctgatttgacgtcacaagcaggctgcctttctccggtcccgaggctccagccttgccgcccttcttcctgatcgcgcaagcgagagctggttcgcagcaacgcagtgtcttttgtagactgatattctggtcctttttattaatgggaaggagggaatttagtaatctctctgaataggtgtctgcaggttgctgctgtagacgagcttaaaatgcagccggtgatttcagctgtttgcacactaaactcacctacattgtttacttaacccatcctaggttttaagccccattaagaggccctgcagtaaaggaagaacatgacgtgggctttacagagggggaaaagactatttctttgtgtccttgttacgaatttaggcatggctaaatatcagtagatactaaagcattttacatactaaagctaaaagaaggcctgaaatacaaggattacagtcctgttctagctctaagcccagacttgcccccagggtgagacactggtgaccttgtttcatggacaaagccaagccaaatcttgtagtcaaggaagccactttgcatcttaggtctggcagtgttttcagagaataccgagatagcacaggaattttggaatgaaggactgaggaagtgttcaaagaaacggaaaggaaaaaatacattaatgaatgcttacgaactaaacatggtggacgcaagcatgtacatctcatcagttttcttcgcaatcctgtaagggcaattttaaggtatttggcatgttaagacaatacgtcaaataccttaaatattggcagaggcaatgccaacattagggcctccaaagtctacaatatctttacctttagactgcttaaagatactgttatatgcaaaatatttgggcagaccatcactttaatgaaatcaacctgatgtttttccttaaagcatcaaaatacattacatgccggctgtcctttaatatactgggcttatataccaggcattcttgtaattatacagccttctgagcctcacagtaaccctatgagctagttgctatatgtatgtacatatatatatatatatatatatattttttttttttttttttttttaagatggagtctctctgtgtcgcccaggctggagtgcaatggcacggtcttggctcactgcaacctccgcctcccgggttcaagcggttctcctgcctcaggctccctagtagctgggactacaggcgcatgccaccacacccaactaatttttatatttttagtagagacgaggtttcactatgttggccaggctggtctcgaacacacctgacctcgtgatccgcccgccttggcctcctaaagtgttgggattacaggcgtgagccaccgcacccggccagtagttgctatttttatgcccattttatagatgagaaaacaggcttggagaggtcaagtaacttacccaggactacactgctactattcactggagctgggattcaaacacaggcaatctgcctccacagtccatac

SEQ ID NO: 316924 - DNA, 4001 bp, Homo sapiens
tactctacgaaatggtcaaataatgtgttttcttctttaccttctaatttttatccccatccatcccacaagcattctggttcactcttgatgttttttcactattactaatatttcgaccctgaatatcaatctgaactatgacagctcttagtaagaaattcattctaggtccttattattcctacaattccttgactgcttttcagaattagtttgtaaagattaaatcataacataaaggcccataagagtaatcttaaacatttaagaaaaatgttactgccaaagaaaggataattcaatcctgaggttcaaactcatcgtaccgtttatctcctaagaccaggaatcttggattatcaaaaagaccactggatgctaacagggccaaaagtttacttagaaacttggttcacatgcctaaggctatattaactgccaaatatggagctagagaaaaattgccatcatctcccactctagtacaccggggctctcttaacgacagttaatgtttcctagatccaggtacctgcaacactaacgtttgaaagaccagaacaaggtacagagccttgaacctaaaaccacagtatcttaatccaagttaatatcccacaacaatcatacagggagaacaggactttactattccagctaaaagtgcaagtgccttttttttgttgttgttatgaaggaaaaggcactctcctcccaccccccaaatccgttagaacattaagtatgtcttggggaaaaaagctgatctatgcaggaaattatagacgaaaatctatattcgccccaaagcggcaaagggccatcttaagaaatctgcttttagagacgcaggaaaaattctatcagattccactaacaaaatcaacacaatctagggaagcttctgttcctttctgtccccccatcccaacaaaagcgggaacccatcccccaaaagccattcccgagtcaataagggatcgtctgcataagagggggacgaagaaggcgcacgttacagttccagtatccgaacacgttcggattaaacccgcggtggcagggagaggggggttggtcaaacacgacggaacactaggtactgggtaagcgaagcggcggctgccttcaaacccggattctgtttccgtgcacagaaatggtgcccggaggccgccactttcgcatctgcgtcgcttctgcctccgtcgacacaacctcttttcccctccccccacgggcggggtggcgacggcctctccgctccgaaggaacaaggtacaagagccgaaaacgattcggaaacaggaacggtgggctacccaccctaaaacatcccctccagaaagcctgctcccacacttcctgtattaagcttccatcagcgcgccttcgggagctgctgcgtgcctccccccccacttcgccacctcatccccaataaacctcaaccccacctgtgcactcggagccctctgcccgcaagacgctcgcgggtcacctcccttcccaggcggcctcccacccctcacctagaggaaagactggtcttctctcacgcacacacggcaccgtagggagccggcaagaacaatgtctctgccgctacacctccggctcccgggctcacacaccggacgattgcctcgcgccgcggagcgcgaatggaatgtccctttccgaccaccacaccgacctcccctcccggcgcccgtacacacctccagccaacggcggcggcgggtacgtcgcgcggaggtcagaagagtcgctgaggaccgggtgcggcgggttcttattgctcgccgcccccttcctccgacaactcggaagcctcggaagccggagagccgcgagttcgtctgcctcacaaccacctcttcccgggcgccaggcgctgcgacgtgcgacaaggaccacggacgtcccgccccctttgccaccgccccctcttattgttttacccctgccgaaagggccagggaacccccgagcacagcgtcagccaatcacgcatctcctccagagccggacccaaccttcccgtgtccctctgcggagcacgcgcagtacgctgccgcgctcgcacacgctcgcgcccggaaagccggggaaccggaaccggcctaaagccaagataagagtccgctgatttgacgtcacaagcaggctgcctttctccggtcccgaggctccagccttgccgcccttcttcctgatcgcgcaagcgagagctggttcgcagcaacgcagtgtcttttgtagactgatattctggtcctttttattaatgggaaggagggaatttagtaatctctctgaataggtgtctgcaggttgctgctgtagacgagcttaaaatgcagccggtgatttcagctgtttgcacactaaactcacctacattgtttacttaacccatcctaggttttaagccccattaagaggccctgcagtaaaggaagaacatgacgtgggctttacagagggggaaaagactatttctttgtgtccttgttacgaatttaggcatggctaaatatcagtagatactaaagcattttacatactaaagctaaaagaaggcctgaaatacaaggattacagtcctgttctagctctaagcccagacttgcccccagggtgagacactggtgaccttgtttcatggacaaagccaagccaaatcttgtagtcaaggaagccactttgcatcttaggtctggcagtgttttcagagaataccgagatagcacaggaattttggaatgaaggactgaggaagtgttcaaagaaacggaaaggaaaaaatacattaatgaatgcttacgaactaaacatggtggacgcaagcatgtacatctcatcagttttcttcgcaatcctgtaagggcaattttaaggtatttggcatgttaagacaatacgtcaaataccttaaatattggcagaggcaatgccaacattagggcctccaaagtctacaatatctttacctttagactgcttaaagatactgttatatgcaaaatatttgggcagaccatcactttaatgaaatcaacctgatgtttttccttaaagcatcaaaatacattacatgccggctgtcctttaatatactgggcttatataccaggcattcttgtaattatacagccttctgagcctcacagtaaccctatgagctagttgctatatgtatgtacatatatatatatatatatatatattttttttttttttttttttttaagatggagtctctctgtgtcgcccaggctggagtgcaatggcacggtcttggctcactgcaacctccgcctcccgggttcaagcggttctcctgcctcaggctccctagtagctgggactacaggcgcatgccaccacacccaactaatttttatatttttagtagagacgaggtttcactatgttggccaggctggtctcgaacacacctgacctcgtgatccgcccgccttggcctcctaaagtgttgggattacaggcgtgagccaccgcacccggccagtagttgctatttttatgcccattttatagatgagaaaacaggcttggagaggtcaagtaacttacccaggactacactgctactattcactggagctgggattcaaacacaggcaatctgcctccacagtccataccctcaggcaaactatagaatactcccattgtactaattgccgcaattcacttatctgccctactgctgactaaccttcaagtgtttccggtttggagctcttccgtgcaatgctattataaatattcttcaccatgtatcctgcagaggtgcagaactttctctagagcagtggttctcagaccttaatgtgcaccgaaatcacctgtagggcttgttaaaacagatagttgggccccactccctaagtttctgattcaacagaggcccgagaatttgcacttctaacaagttctcagctgatggtgctactgctgctctagga

SEQ ID NO: 316925 - DNA, 4001 bp, Homo sapiens
ttctttaattcctccaagaatctgtttttcctaaattgggccttctcaaaacaaatatatttatctccctacccctttctcccttccttctctgtcacatacacacacacacacacacccctacctttctctttagaacagctggaaaaaaaaacactgcctcgttcatatttttggaataaagttagcatttttactaggatattcaggaaaactgatagatggacaggatttggaggcattacacatctctggagagctttcttatgatttgtggcatcgagtctttcaataaaattacttgtctataataaattctggcagaaagtaaatcagaaattcactggtgagttgtcagtgaagttaaatacttcactctgtgtacttcactctgttctatacaagcaaacagtgactaacaggattaacctgagctctaatactgggtgtagatattcctcaacgacaaacgggttcccttcgtacaggcattaaatttatattatatttaagggggcataaattttgcttttgcaaacacattttactagaaaaatatttgatccagatgtcagcacaaaagtgtcatttctttcctttgcaagggagcagcaacaaaacaaccaatggggaggaagaataagatcccagacctctgaagaggacacaggtttccactaaagcaaggttgatactttcaaggaatatttttcctaacagctaaaacggtttaacacatagcatcttgtatcaattacacaaacaccattaaagccactctggttccctgggaaaggaccgcaactgaaatcccttctggcttcagctgtcccctcctgccgagtttgacagcacatccaaggcgcccaaacaccagccactaggctcccccccagcgccctcctctcgcagcaaaccgccaaggctcccgggccaaactccaaagtccctcaattcaaaaccgcgaaaatgtgaaccctgctaagcaaacggcagggcgcgtaataacttttctttctttcccttttgcgcgcgttcgatatgcttgtctctactaccaactcctcagctccacagcccgcttcccgcaacccatctcgaggggcggaggagagggagcgcccaccaaagaaagggctagtgagccctaaaacctcggcagttttcccggtgcgggagctttagcacacatcagcccaataatcagatgcaggaataaagcaggaagaaggctcctctctccatcgcaccccatccttcctaaggaagaaaaaaagcatgcagcaggagtttagctggacgtctaggtccttttatggggcgaacaggcccgcaaagcaggctgtctggaacctggaggaagaaagttgtccggccaagtggatgcctgggcgtgagggagtgcaaggcaccctgtcccgagcccgccaggggtaggggccaaggggaaagagaccggcattcgtttaagaaccagccccgcgcgcggccagctgcagccgccggcgagccgactggggaggggtgtggacgccgaggcccgcggagtggtgcccgcagctctacttacataacgcttcaactttttctccgggggggacttgcggagccatccggagcagaccacttcaccaccgctcatggtgcgcgcgtctcgggctccgggccgggcagctgaggggcggcgggcgcgctcccgacacagccgacgcctgccgagcgcgcagtggcgagaacctagctctcctggtcgcgcaccccggacggactgggcggacagactccacggtgcgcgggttccacgagttcgagtctctcctctgcaggcccacgaacctgaacagaacgcgagccggggccgcgggcgcgccggcctcctttcagtgcgcccgcctcgcctccagacgtgccgtctcgccagctgcctcagcagcgctcggactcagcgggactctgccccgactcggtgccggagcttctgtcctttgcgctccgccccctagggacaagacctccccagagcgctttccgaaacagacacagcgctgctcacacacacacacacacacacacacacacacaatgccccgcgcggtgcccgctcgcccgcccacccgccctcggtttcgatgcgcccggagcgatcctccttccctctcctcgggggagggtgggtcacttcgcggcgctcggtgaacgccgaggaaaggggaagccgcgagccgcctacgggcagcgggcgcggggctggtcccgggtcacagagggagccgcagggttggcagcgaagcgcggggcgtttctgagcggcgggcgcagggaggtcgcaggtcaagccggagggtgggtccgctctcgcggccgccgaagagggcggggagcagcagaggaacgaggcgcttggcggcttggctcctgggagggatcccgctgtcccgtcccctcgcgctcctcccccgccgcctcccccaccccggggctcgcggcaggtcctgagcggctcggccccagatcccgatccctccctccctctcccggccgccgggctccttcttcctccctctcctcctccccttcccacgttcaggcccggctccggtttctgcccagactttctctgaaactccgccggagtgcttccagccaaaacaacaagggccgggggaggagacggacgaagggagggagcaagggagggagggagcgcgagtccgagaggcaccctgggatctgtagttcgggaagcaggagcagggtcctccgccgtccggcggcccccaatcggctcctcgcccgggaagaccgcagaggcctcggctagggcagaggcaccggggcttgggcgcggggaagactgagggacattcgaatgttcagtccggggcttgccatcttgactcagcccggtgccagctcggagcttgtgctgtgctcgagatcaggagtttcgagggttttctttacttgagagcctgaaaggcaaaaccgcggggagaccaccatcctgccggtccccgccgcgcgagattaaaggacagaccaagagggcgcgggagctaccagcttggaggggaggacagatggggacccagggctggccagggctggtctctggagctgttctgccagagtgatgggggcgcttggcgaggccaaggatttggttgggtcctatctctgagacattttgaagtctcacaccccttccatttgttgcctattccacttaactttgtatttgtttgaaatctactgttcggatgctggactagaagagggacacttggccgggcgcggtggctcacgcctgtaatcccagcactttgggaggccgaggcgggcggatcaactgaggtcgggagttcaagaccagcctgaccaacatggagaaacccaatctctactaaaaatacaaaaattagccgggcgtagtggcgcgcgcctataatcccagctactcgggaggctgagacaggaaaatagcttgaacccgggaggcggagattgcggtgagccgagatcgcgacactgcgctccagcctgggcaacaagagcaaaactccgtcaaaaaaaaaaaaaaaaaaaaagagagagagagagaaagaaggaaggaaggaaatttactgggtaccctagttctatttgcctacttccttgtgtgtttcacaattattatactggtcctgagtttaacatgattctgtaataaacatcttctccaatttatttgtgaaaaagccccaaagccaatttcagcagataatataatcagataaaagtgctaaaaatatgacgacataaatgagcatttctggaaagacataacttcagtcattttcttattaacacaacattcatattctgaagctcctctgagtttgaaaatgttagatgattgtaataagaaattaggtgctggagtggtgacaagacaaagatccctgcatatatggaggtagtggcatagggtagtaagcaaataaagagtcaacaaaactaca

SEQ ID NO: 316926 - DNA, 4001 bp, Homo sapiens
agtactcctgactgtaagcatttgagaaaaaaatcttaataatgcaaaaagtcgatgattaataaatctagcttttgtttcattgtttgtgattgtgaagttgtatactacctccacctagaggtttaagactcacacatcttttgggttttctatggtgactaaaggagccataccattaaaaaaagaaaagaaaaaggaaaaaaaaaattagttaacactcaaatcacttagctggtacttttctgtcagctcgaaggaaaacttggcttccttatcgaatcctggtgttatattataagtgcctataattaatcacttcaattccttgtaggaatatgccattgaaaggattttcttttcttctgtgaatgttctgcatggaaagtgtttctgtttgcttttggatcttatcactaagaacgagaagcagtgaagtttttacagtctattacttcatagttcactttccccatacacccccttttctgagaaataattctttaaaacacccttgattttcaaaagcattaatggcctacaagaaacacatctttgccctgaattaaaatagtcaaatacaataaatatctcacctggcagggtcccacaccaagaaaacaaaaagcaggaactgcatgttgtagatgttcaattttgtcttcatcaccgccgctctttacaaagccatggaatgaaaaacaaaatacacttaaaattgccttcagtttcactatccaagtaaccccaaagaatatccttttagttagggattcgtgttaaagctatggagattacttcctggactctgtgtaggacttgatgattgagagacgatttcttttttatggacccccacccccacccttttcctttctgtttctttctttctttttttctttctttctttctttaacagcaagatgaccaagtaatcagacttctctctgccaggaacgtcccccagcctcatcgtcagcaaacactgttttgcgcacacgtaataataacaccctggactttaaactggcatagcagctggaaagggaatgggttggaggggaggggaggaaaggagaggagaggagagatgggtacttcacgccacaaccccctcaaccaagaccacctccgcaaccacagcgggaaaagctaggggcaggcagcccacttttgcaattactctacattacagtgaactgcggtcctcacgtcttcttttcttcactccccttaacaaaataaaataaataatttcccttcctgcccacccacggttgcccaagaccaagtcttagaggcagccgggttccgatcaagtgctgcgaaacgacgcgtttgacagctgctctggagccgaggatcacaataagagaaggcgcgtgaggctccggcagcaaacaccagccaggcaggcagcggtaatcacagtgagcaaagttgaagactataaaagagccaggctaacgtgctgccgagcaggtgtcctggattttattgtagttgcaaatatgcttctggtgataagtatcgaaattattttttaagtgcgctggggaggagggaggtgcgggaattgagcctcctccgtttccagggagcctctgaaagtggggtggggggagatgaggcatgcacgcgaggcaaagacaaacaggaaagtgtctctatcgggaccaacgtgtgcgaccctacctgaaacggcaagcagaattcggtgttttcttccttttgccctgatcttgacgagataggaaacttgggagagagagagagagagagagagagagagagagagagagagagagagagagagagagagaccgagactgcagcagccaagagagcgtggagcgatgggctggtggaagccggagaggagcgctaggagccgcggcggcggcgcgaggtgtagaaggaggcgaaggcgttcgtagtggcggtgatgggcggaggaggaggaagaggaggaggaggaagaggaggagggggaaaacgatgacaggagctggggccggggggggaaattggggggacgcgggcggaggcgcggtgcgcgccggcggtggcgggcacgagccccgcgcctggaggaggaggagtcaggccgggtaggagggctaaggaggttcccgggaaggcagggccccccctcccccccctcccccccccccacacacacacactcccctgcctcgatccctcgatccctggtaactgaccgtcgcccgcctggcactagcagcggcgcagacccgggcggcgtcgggcgcctgggtgcgctcggagcgccgctcccctcgcccacacctcgccggaggagcggagcccacgcgcagcctcgggctgctccccgaggccgcttgctggggctcccgagaggccccaaggttcctgacagagctgctgttgggtgttggtgtaaagccgggaatgtagtgtggcggtgatgccctagatccctggggccgcgccctgccgcccgtcccccaacatcaccctactgtggagcgacgtggctgctaagaggtaaagaggttccgctcctgctggagggcaaggggactaatcacgcctttacttagtcatcaacgcatccacgcaggaccaagttcaaagcatgttgcgtgaaatcagacagcaggaagtttatttgattccttaaccctcctgatataccattcattccttcacactcccgcaataaagaccgatttcccctgaaagctctgagagctggagaattcccttgagccagtcagtaaagtccatttgcagattacacacacaccttgggaaacctcccgctcacttccagcaatccttttccaacctcttttcacaggcgccctccctagcaggtgatcaaactcaatcaacagctccaaaaagtttacattacccaggagcaaaaacggacctgctgtgtttctactacctctgcaactcattccccagtgggaggaaaggtaacaacgtttgaggttttccccctttagggctttttgctggcaaagggacttggaattccagtcccatcttacactttcagcattgtgtgtttgatctgtctcatttctgttctgttttatctgaggcgatagaatccaaacgtgcaacttgaacaacaaaaaaagggggggacattttcctttttgtactgcacagaagacagaatgttatgcacattttactaaggcaaagcagagccagtgtttatctcctccagaagttgttataaacgttagacactttaaaggaaaaaagagagagagataagtatgctgatacgtttctgtcattttacattcagagtcaatatgtgccaaacacttcaattttgttagttatgcaccaaaaattcagatgtttttcctagatggtgcagtttttctaacaggcactgctaatctacagtaaattttagctttgctttgaagattatgggaggagagtaaaacctttacattgtaaatatttccagctgtcctttttaatctattaatcaccattttctggatgagcatttaatatgttacaacctaaacaaacatttgctctcttatttagcttgctctgtgaagaatggaacaccacccagctctctcctccatcattaatattcttttcctgacttgcccattgcagagtctaattgaaattcacaaagataaaaagcatgccatttaaaaccttgcaaccagagaacctaagtatcttatacttggcatgaacagttcacttgctactgtattttcctattttccatttctgtgagtcaatcttcattaaaatctctatcacctctccatttatattactaataaattgttgatattttgataatggaagttaagcagtgtatggtttcttcccagccttaattgctatgctccaacaaaatttttctttaatgaatgtcacaatttttgtaaatatattcatatattattctaatacttataaggtcttctcctggattctaatatcaaattataaat

SEQ ID NO: 316927 - DNA, 4001 bp, Homo sapiens
cacctagtagctataaatagtcacaatacatcaaaaactggtaaccaacttcaaacaaatattgtcttaagagcagagaaaatattaaagtattcaaatgaagataaacatctacaaattaaataagtgtatcactttataccctctagcctcaaaagtttctgtattgcctacttaagctaattttaaaaccaataactaagatgttcataaagttccacatattttcatttgaaagtgtttcttaatcacattttatattttctttctcaaatcaatatgtagtcattaaattagtagatattttccaaatgaaagcaaggctttatgagatagatggcgtctcaattctaagaaatgttttcatactttgaccattacttggacaattaaataaaaagttaaaagagaaataaaggtataataaagacttattagatttttaaaaataaatagttacaagaacattcttataaaacttgtatcttaagtcttctggtattttgagaatcatatcctaaaggcattaaagaaaagatgtccactgatgatgaaaatcaggaaagtctacaaaataaaatgaagttactgaaagcaataaaaattaatttcatgtttttatagcataggcaaaagaaaattcattacatattttaaatcagtactcctgactgtaagcatttgagaaaaaaatcttaataatgcaaaaagtcgatgattaataaatctagcttttgtttcattgtttgtgattgtgaagttgtatactacctccacctagaggtttaagactcacacatcttttgggttttctatggtgactaaaggagccataccattaaaaaaagaaaagaaaaaggaaaaaaaaaattagttaacactcaaatcacttagctggtacttttctgtcagctcgaaggaaaacttggcttccttatcgaatcctggtgttatattataagtgcctataattaatcacttcaattccttgtaggaatatgccattgaaaggattttcttttcttctgtgaatgttctgcatggaaagtgtttctgtttgcttttggatcttatcactaagaacgagaagcagtgaagtttttacagtctattacttcatagttcactttccccatacacccccttttctgagaaataattctttaaaacacccttgattttcaaaagcattaatggcctacaagaaacacatctttgccctgaattaaaatagtcaaatacaataaatatctcacctggcagggtcccacaccaagaaaacaaaaagcaggaactgcatgttgtagatgttcaattttgtcttcatcaccgccgctctttacaaagccatggaatgaaaaacaaaatacacttaaaattgccttcagtttcactatccaagtaaccccaaagaatatccttttagttagggattcgtgttaaagctatggagattacttcctggactctgtgtaggacttgatgattgagagacgatttcttttttatggacccccacccccacccttttcctttctgtttctttctttctttttttctttctttctttctttaacagcaagatgaccaagtaatcagacttctctctgccaggaacgtcccccagcctcatcgtcagcaaacactgttttgcgcacacgtaataataacaccctggactttaaactggcatagcagctggaaagggaatgggttggaggggaggggaggaaaggagaggagaggagagatgggtacttcacgccacaaccccctcaaccaagaccacctccgcaaccacagcgggaaaagctaggggcaggcagcccacttttgcaattactctacattacagtgaactgcggtcctcacgtcttcttttcttcactccccttaacaaaataaaataaataatttcccttcctgcccacccacggttgcccaagaccaagtcttagaggcagccgggttccgatcaagtgctgcgaaacgacgcgtttgacagctgctctggagccgaggatcacaataagagaaggcgcgtgaggctccggcagcaaacaccagccaggcaggcagcggtaatcacagtgagcaaagttgaagactataaaagagccaggctaacgtgctgccgagcaggtgtcctggattttattgtagttgcaaatatgcttctggtgataagtatcgaaattattttttaagtgcgctggggaggagggaggtgcgggaattgagcctcctccgtttccagggagcctctgaaagtggggtggggggagatgaggcatgcacgcgaggcaaagacaaacaggaaagtgtctctatcgggaccaacgtgtgcgaccctacctgaaacggcaagcagaattcggtgttttcttccttttgccctgatcttgacgagataggaaacttgggagagagagagagagagagagagagagagagagagagagagagagagagagagagagagaccgagactgcagcagccaagagagcgtggagcgatgggctggtggaagccggagaggagcgctaggagccgcggcggcggcgcgaggtgtagaaggaggcgaaggcgttcgtagtggcggtgatgggcggaggaggaggaagaggaggaggaggaagaggaggagggggaaaacgatgacaggagctggggccggggggggaaattggggggacgcgggcggaggcgcggtgcgcgccggcggtggcgggcacgagccccgcgcctggaggaggaggagtcaggccgggtaggagggctaaggaggttcccgggaaggcagggccccccctcccccccctcccccccccccacacacacacactcccctgcctcgatccctcgatccctggtaactgaccgtcgcccgcctggcactagcagcggcgcagacccgggcggcgtcgggcgcctgggtgcgctcggagcgccgctcccctcgcccacacctcgccggaggagcggagcccacgcgcagcctcgggctgctccccgaggccgcttgctggggctcccgagaggccccaaggttcctgacagagctgctgttgggtgttggtgtaaagccgggaatgtagtgtggcggtgatgccctagatccctggggccgcgccctgccgcccgtcccccaacatcaccctactgtggagcgacgtggctgctaagaggtaaagaggttccgctcctgctggagggcaaggggactaatcacgcctttacttagtcatcaacgcatccacgcaggaccaagttcaaagcatgttgcgtgaaatcagacagcaggaagtttatttgattccttaaccctcctgatataccattcattccttcacactcccgcaataaagaccgatttcccctgaaagctctgagagctggagaattcccttgagccagtcagtaaagtccatttgcagattacacacacaccttgggaaacctcccgctcacttccagcaatccttttccaacctcttttcacaggcgccctccctagcaggtgatcaaactcaatcaacagctccaaaaagtttacattacccaggagcaaaaacggacctgctgtgtttctactacctctgcaactcattccccagtgggaggaaaggtaacaacgtttgaggttttccccctttagggctttttgctggcaaagggacttggaattccagtcccatcttacactttcagcattgtgtgtttgatctgtctcatttctgttctgttttatctgaggcgatagaatccaaacgtgcaacttgaacaacaaaaaaagggggggacattttcctttttgtactgcacagaagacagaatgttatgcacattttactaaggcaaagcagagccagtgtttatctcctccagaagttgttataaacgttagacactttaaaggaaaaaagagagagagataagtatgctgatacgtttctgtcattttacattcagagtcaatatgtgccaaacacttcaattt

SEQ ID NO: 316928 - DNA, 4001 bp, Homo sapiens
ggcataggcatggacacgtgggaggatgagggacttcggttcagctgcctccaatgcaacctgctctgagcgaagtggccaggttcagggaaactattctcagcgaagagcgtccaggcagctgagcccagagttcccatttttgactcttcctctccaacctcccccacccagcagtcaggtcccgggaggtaattagtgtgggggagaggcaaagcttctgagggggcagggagatgggaaagtacgggtggaggcggtcttcttgtcataggtctcaccaagagaggagagatagaaagagagagagatttatttttgcacgtgaggcatacctaatgatattcccacagacagacagacaggaagaccaagagagggacagacaggacacacttgcgcgtttgaaatcgttcatacccccaaatccaggacgcagcctgttgtcataaccatcgagcaaactgtccaggatgcgggtgaaattttctgtgcacaatttctcctccttttggttctgtcctggggattcgtttaaactgcaagcgaaaaaaaaaaaaccgggggcggaggagattattttaagaatccatcagagaacaggtgcaaacaggtttgttttctagggaaagagtcgcttgccccaagctaaaggagaggaggttgggggttgggatgcagaagacagaaatggtcaggaaaagcgcgccccgccgcaagacccccagtgcccacacgcctcttggatcctgcgcccttggtgctctccgcatctatgcggtcacagaaaagcctggcttcggcccctgctcttacagctgagataagaagacctagtccacccagggaggagcgagtggccaaaggggtcccggagctagccatttctccactttccgttgcccacctcctcgcaccccagagaactcaccaaaccgccaggcacaggaagcgcaggagggcgaaactgaccccggcggacagagcgatcgcgggtaccttcttggcagaaaccatctttgcaacatgccatacttcaagcctgttcacgtttccaggctcttcagatgccctgagcagggtgcgaggagagggcagagaggctcccgcggcgtgcgcacactcgcgctcacactcgcccgcgctcagccagcccgagccgcggtgggcgtgtgtgtgcacggggccaggggaggcggaacctgccttcctcgccccctcctttctcgctcagcgctcaatgtgtatgtagagctatgtataccgctccacaccctttcgtgcccgcgcgctgaaggttctggggttcgtatccgcgcgcttgcgctgcaagactcggcaagtttgttccgactgtaactccggggatgaggaacggggtctctcgcccctcctccggcttcgcagcccccgaccccaagtgggctccccgcccacagcagtgttcgtcctcctacctcctggccccctcccttccgctgggatttggatctaaccaatgaagctcctctgtcatcaggttgtgcgaggacctgtttgtacccagagtcaaggttggaggtggagaaagggcgggtgacggggactgctgggcgtcgggtggtagcggtggtgaggagaggggatcaagtccgggctcaaaccacctttgagaccctcccattcaggtgttatggggggcggtagggagagcaatgaaagcagaaagattcttcctggtaacaggggttgcagctcacccggcggactctcgccaaactattgggaagtggactcgagccgcactctagtcccagtatttgctaagctattgctttaaagacaccccatttctttacccgcctccaccagacacgcgcacaccctccgctttgctgctccatccttttctggagaggaggggagaggtggagacaagcgacctctggtcaaaatcactttcacttcttgcgacactcttctttttcagaatggagttgacttacttccagaggttgactgctttaggtagggggaaaggacggctggagagagagtggggggggaaagagaaaatgtgtgtgtgtgtgtgtgtgtgagagagagagagagagagacagagagagacagagagagagagagagagagaggcagaaggtggggtatggagagaaaggatacataaattaaaatggagggggacaaatattagttcccttgtgacatgaaagggaacactaagctccatatctttactgttttactgagcaaagataagcattcccaatagatctttggaaacattaattattggctccaagggggaaaagcgtctttcaaattagtaatgatgcatgtggaaattttcatatgatggatcaatgagctaagtaattcccataccttggaaccaaacaccaattaggttctagtcggaactctgatgatttgttcaaattgagatgactagtggacgggtatgaagagggaacgcattgtattagacaggggttttggtttttttgtgtgttttaaacgtctggattcaagttttctttctaagggaaagcccaaagtgctcatcgtgggcagtagctagagctccgtgctctgtattctgtactgctttcttcatggaatttgttaacttcatcctaatcccatctctatcattcttttctcatagactgtggtctctctgagggcctgggctaggtaatttttgctcatctgtgtttattttatctgctgttacagtgcatggcacatagaatgtcaataaatatttattgaatgaacaattaaacaaagcaatgaattgcttgttctcagatccatcttataaatgtggatgactatcaagctctctcgtttgggaaaaatagcggaagaactagtgtatcctccaaatatgccatgaaagcattagtcaccacagattctccacatattatattatttctctaatcttaatactttcctacctttttaaaaagagaatttagctctgttgcccaggctggagagcagtggtaccatcatagtgactgcagcctctaccttttgggctcaagcaatccttctacctcagccttctaagtagttggaagtacaggtatgtgtcaccatgctctgttaatatatttttatatttttgtagagatgtgggggctctgcgatgtcaccaggctaccctcaaactcctggtctcaagtgatcctcctgcctctgtctcccaaagtgctggtatgacagatgtaagccaccgccttacatttgtaagccttttcctatactttctaaaacctaaatttgtattttctaaaccactttcccttgcaattttcattttaaaaatacacatatcaaaaaattaagaaaccaaaataatggctttggggaaacagttacatatcgtatctttaaaattcaaacttaaaatctgtgaaactattatattcaaattaaaagaacattctttcagagtagctacttccagttatatttttgttaattgggttatagtatttaagttcagctgaagataatactaaaggcatttatatctcttctcattttatttcacagtcttttatttatgccacttttgtattacttcaagaagatatatgttgaatttcactgcctgaaatctttaaaaaaatattgcctgctaacttgaggttttttttttttttttagaaatctaacattctgaaaagttataatttactttaacttatgaatataaatatgctattgtttcccatgtaaactcctatttgtgatagcccaggattgtcagtgaattattattattgtctgtgtagctgtgcagaaataggaaggtgttaaaatcatacctatacctctttttttctttaagttgatataagcctctgattactaggtttagcagaatttgaattgggcccaagtacactatccccaaatatcattatattaagccagtcacattttataaatttaacaaatgagtttactttggatataataagatg

SEQ ID NO: 316929 - DNA, 4001 bp, Homo sapiens
tcctgctccccattcttactttctccattctcccaacatgtcatctcctacacaccctcaataggaggtataaagttgctccatgcttctaatattagatgatactcatcacacagcatctgataccatccccatctgcacggctttgtcttttaaatacacagcctgctctgggtttacatccttctcctcctacttactaacttggaacttggactcaatttccttatctgtaaagtggggatggtaatggctttcaaagctttgttgtgagggttaaacagagtggtgatgcctacaaaatgcctggtatatgtgaacatttaattaaataaatacaatattactggctgttattattgttaccacttgaatgtaagctcctttaaggcagaatctctatcctgttcaactcagttgctgaagggtaattagtgcagtgtactgtaaaaaacagggactttgagatcaaaggacctgggccaaacctatgaatgggaccctagcaagtcatttgtcctcgttgaactggactgagaagctgtttgaggttaagaattgtatcttaatatttctgtggacctagtacctagcgcaaagcttgccacatagatttccattatatatgcaaaggaaatatgaatatgaaaaacagcaacagtgctgttaatggatgtacctctattaagtcctttatacttattttgttgaagaaagcaagctggaacatctctaactttaaagtcttaggaggaaagcaaatgacacatcaccaaaaaagaaagggaaaaaagaaaagcatcctgctgtagaagagaaaaggaaaggactgggttctctagcagagcaggcagcttcatgccccagatttatgtcccaggtagaacattggccaaggttttggcataggcatggacacgtgggaggatgagggacttcggttcagctgcctccaatgcaacctgctctgagcgaagtggccaggttcagggaaactattctcagcgaagagcgtccaggcagctgagcccagagttcccatttttgactcttcctctccaacctcccccacccagcagtcaggtcccgggaggtaattagtgtgggggagaggcaaagcttctgagggggcagggagatgggaaagtacgggtggaggcggtcttcttgtcataggtctcaccaagagaggagagatagaaagagagagagatttatttttgcacgtgaggcatacctaatgatattcccacagacagacagacaggaagaccaagagagggacagacaggacacacttgcgcgtttgaaatcgttcatacccccaaatccaggacgcagcctgttgtcataaccatcgagcaaactgtccaggatgcgggtgaaattttctgtgcacaatttctcctccttttggttctgtcctggggattcgtttaaactgcaagcgaaaaaaaaaaaaccgggggcggaggagattattttaagaatccatcagagaacaggtgcaaacaggtttgttttctagggaaagagtcgcttgccccaagctaaaggagaggaggttgggggttgggatgcagaagacagaaatggtcaggaaaagcgcgccccgccgcaagacccccagtgcccacacgcctcttggatcctgcgcccttggtgctctccgcatctatgcggtcacagaaaagcctggcttcggcccctgctcttacagctgagataagaagacctagtccacccagggaggagcgagtggccaaaggggtcccggagctagccatttctccactttccgttgcccacctcctcgcaccccagagaactcaccaaaccgccaggcacaggaagcgcaggagggcgaaactgaccccggcggacagagcgatcgcgggtaccttcttggcagaaaccatctttgcaacatgccatacttcaagcctgttcacgtttccaggctcttcagatgccctgagcagggtgcgaggagagggcagagaggctcccgcggcgtgcgcacactcgcgctcacactcgcccgcgctcagccagcccgagccgcggtgggcgtgtgtgtgcacggggccaggggaggcggaacctgccttcctcgccccctcctttctcgctcagcgctcaatgtgtatgtagagctatgtataccgctccacaccctttcgtgcccgcgcgctgaaggttctggggttcgtatccgcgcgcttgcgctgcaagactcggcaagtttgttccgactgtaactccggggatgaggaacggggtctctcgcccctcctccggcttcgcagcccccgaccccaagtgggctccccgcccacagcagtgttcgtcctcctacctcctggccccctcccttccgctgggatttggatctaaccaatgaagctcctctgtcatcaggttgtgcgaggacctgtttgtacccagagtcaaggttggaggtggagaaagggcgggtgacggggactgctgggcgtcgggtggtagcggtggtgaggagaggggatcaagtccgggctcaaaccacctttgagaccctcccattcaggtgttatggggggcggtagggagagcaatgaaagcagaaagattcttcctggtaacaggggttgcagctcacccggcggactctcgccaaactattgggaagtggactcgagccgcactctagtcccagtatttgctaagctattgctttaaagacaccccatttctttacccgcctccaccagacacgcgcacaccctccgctttgctgctccatccttttctggagaggaggggagaggtggagacaagcgacctctggtcaaaatcactttcacttcttgcgacactcttctttttcagaatggagttgacttacttccagaggttgactgctttaggtagggggaaaggacggctggagagagagtggggggggaaagagaaaatgtgtgtgtgtgtgtgtgtgtgagagagagagagagagagacagagagagacagagagagagagagagagagaggcagaaggtggggtatggagagaaaggatacataaattaaaatggagggggacaaatattagttcccttgtgacatgaaagggaacactaagctccatatctttactgttttactgagcaaagataagcattcccaatagatctttggaaacattaattattggctccaagggggaaaagcgtctttcaaattagtaatgatgcatgtggaaattttcatatgatggatcaatgagctaagtaattcccataccttggaaccaaacaccaattaggttctagtcggaactctgatgatttgttcaaattgagatgactagtggacgggtatgaagagggaacgcattgtattagacaggggttttggtttttttgtgtgttttaaacgtctggattcaagttttctttctaagggaaagcccaaagtgctcatcgtgggcagtagctagagctccgtgctctgtattctgtactgctttcttcatggaatttgttaacttcatcctaatcccatctctatcattcttttctcatagactgtggtctctctgagggcctgggctaggtaatttttgctcatctgtgtttattttatctgctgttacagtgcatggcacatagaatgtcaataaatatttattgaatgaacaattaaacaaagcaatgaattgcttgttctcagatccatcttataaatgtggatgactatcaagctctctcgtttgggaaaaatagcggaagaactagtgtatcctccaaatatgccatgaaagcattagtcaccacagattctccacatattatattatttctctaatcttaatactttcctacctttttaaaaagagaatttagctctgttgcccaggctggagagcagtggtaccatcatagtgactgcagcctctaccttttgggctcaagcaatccttctacctcagccttctaagtagttggaagtacaggtatg

SEQ ID NO: 316930 - DNA, 4001 bp, Homo sapiens
aatgttgacccctttgaaatgaaaggactgtgctgtgttactgtcgccccctctcccttccaacgtcccttaaattatcaggatttttaggcatgcttaggtttctagagtaaggtgaagcaatatgacttgatttattctgtttcaacttaaatttgcaagatgcagtaagacaaattcataacctcccgcaagagaacaatacaagcctacccaggctcgggcacttttcctactagcaaacatggactgttgtcttagcctgttgctcctgccaccaggtgtgcctgaacctggagagagaggacactttgaaacccagactgtgctctcggtggcagggccttggtgcatccgggctcgcggactgcgagggccatggggattgccagcaccgcgcctggggaggtgatggctgccgaccaccggtccggggaccctagtgcaggccgcccggctgccagcagatggtgccctcctcatccaaacacgcagggaaacccagctaaagtaacgctcagactccgccccagcagatccacggcgcaacagtcactcgtccttcccaaaatagtgccgagcacgtttcccctggaacaccgcagtagcccgtgtgtgtcgaaattacaaaccaggggcgaccgggtgtgtgtgccggagcggggagcgggtgcggagtgggacctcaggggccaggggcgaggtgaccgccaatgaaacgcagagggcaaagggacctgtccatttcccatctgcgtaagccgaaccgccgggcccctcgggaggccactcaccatattcacttcggagaccatgtctatgctggcgacatcgatccgcatcccaacgtcgacggggggccctgccggggaggtgggccacattaggaacagattctctcagtgacagcaggctggggagggtctgggggcttcccagcccttactccattcttaacgggctccctccctgctccccccaccacccctttcaggggactgcctgggaaaacaggtgtgggcacacgcgtgatgcagtgactatgcagagggtgtgtcggcccgggagaaggtcgcctccgcctgaggattcatccacctgagactggggacccggggtgtgtgtgtgtgtgtgtgtgtgtgtgtgtgtgcccagggtatagtgcacgcttacgaaaatgacatgccttttctttttttttttttgacatttatctttgacagaaaaggagaactaaggatgggttacaggttgaaaaaagatgaagcgttacctccgaagtccggccgcaagcgaatgtcatatcctttgagcaatctgtccactgtctctttcacgtatgacatgttgctgggttcattggtgctaaggggaagaagtagggaccgtattcaaaatgagcacaaactgtgagcacatataaaaagatacaggcacacctacccccaaacaacaagatacatgatccagcagacacgtaaaaagaaacataccaagaaaaaaagagagagagagagagagagcgagattcaacaacagcagctcacctgtgtgcacaacagaccatggtaatcatcacagggaaagagagaagccccagactctctcgattttgtactgtccacattactaactctgattaaaagaattgtcttttctgcgaagattcaaggaatgcaacttagtcggctgctgggcagtaattcccgaatggacctgcgcatgcgcagagcgcgctcactaccaaaagacaccttgtgccttgcaaacaatattcctagtggaacaggcaacagatttcaatccctctaaagttcctatttggggtgctccatgtcctccgggtagtcagagacaagctgctgtttccacgcaggggatcctacgagcatgtgtaaacggagtttccttcatgcattggaggttgctatgttgatttcatttctgccctcaacctgattttgttttttttactgggcgctcagtgatctggctaaggctgcctgtgattggcatctttcgttgacagtcagggaggtcctagaacggggactctggaggagggtctgttgttctctggttgcctgtggcgggcaccgggaggatgtgatcagcgggggttgtgggtgggggtgactgggagcagggaagagtggagagagagggaacgggagagttactaaaggtacagaggaaactcaggacgtatttgagaactccaaaaattaggtgcccttgggaggcatcctaggacatctggcttggtgtagacttctgtaggaggcagagtaggaggggcaagccaacttttcttccaccccacttttcttccctccccttgtcgtttttcatccaggttgggaaatgagggaaacaaaggatccagcagcagttctgggcaggcaatctttttttctagggccatccactgcaagccccacttatcctccaggttgtgataagaaaaatctccttcttaaattgacagcatttaaggtggtatttgtgacccctagcagaactctgaaacatccagacagtttaacctctgttcgccagtaggttgggattctgcaggagcaagtattgtttgaattaaatcaaattcagtaacttcgattctacaaatgtcattgagcacatgttaggcagaaggccctggactaggtgtttgttcttttgttaaatagtatatattaaattttgttgtgggcattctgggacttataactgattcaaaaagggttcttgtcctagagaaattcacatctaatgggagagggacacacacaagtgtaagtaaagcgaattgtaatccctactcctattatagtctgctgcttacttttatgagggaaagaggagacagcttaaaaattagcttctaactaggatggaagtgtctcaaggtcaagaaacttatgcatattcttagtatttccctacacaggagttaccaaacaaaaaaacgtaatagaaaaatttattccattacaataataacaaaaaattctaatgtacctaggaataactgggggaaaaatatgcacaagaagtttagagtgaaggtacataacattatttaaatacacaaaatatgacctagataaatggaaaatgtaccatatgggtaattgggaagactcaacattgtaaggatgtcaattctatccaatgtaagaaatataaccaatttgaatcaaaattcctacattctaaatggaaatgaataaactaattccaaaattcaaatagaagaatgagggggtaaataaaagccaagaaaacctggaagaagaagaagaaaaaaagagaaggaatatgggggcatttgcctttgagatatcaagacattattgtgctatatagaaactgaatcagtttgtctttggcatggaattcatgtagggataaaaagcaaaatagtacgagcaaatagagagcacagaaatactcctctattttaagagaagtaggaaaagatgagctactcaataaatgttgcaagacaatttattatccataagggaaaaaagtagatctttacatcattacatacatgaaaatatattacaggtagatacgtaactttaatacaaaaaacaaaactttcaaaactttaaactatataggagaatatctttatgactgtgataaaaggaaagatctaaagatgaacaaagttataaatgataaaaaagattattgcgataactatgttaaaatgtaaccttctttaaatccaaagcttcttctgaaaagtcaagttatacatagaaagaacatgttttcagcaaatttaaccatcagaaggtttgtataaagaaattaccagaaaaaaaaacttccagaagtaaataagaaaagatcaaaagccactctaaataaggaattgcaaattaaaggaattgtacactattttaaactcatgagatatgcaaaacttaagaatattaaaaattggcttttaaaactccatatattttcagtagacatataaa

SEQ ID NO: 316931 - DNA, 4001 bp, Homo sapiens
acctgtgttcagagaggttaaaggcccttgacacatgagatcatgtctccaggctgctaaacctgcactctgtcccttcagcacatatctcttcaattctgggagcttgatgtaattggctctggagccaattacaatgattgcaaatattccccaaaacaaaacatgtttatttaaaataaaacatctcttgggatagataatatgctctttactaagcagcttgcctatttgtttgaaaggaaaactcgtataaaatgataaaaggttgttatttcagaaaactactgtaaatctgtttttacttttgtaatattatgatgtatgtgtatacctaaatatcttttataaaatgctataatatattcaaagaataagccattacgacacaatatatacaagaaataattcatccagtattatgtttatgttcgtgtcaaacatttaagaatctaagggaacagggttaaaaaaaaagagagagaaaacttcagtcctacaaaagcactaactgtcaaaaaattctaacaggtctaatattacttagcctactttaatccaatctctattttctaagagaaaatatacttgttctatatgctggtgtggcaaaaaaattcactctagctttacacttacgtttataataataattcattttagcagtgatacaaatagttataaaggcatgtttctatcttcataatgattgtactttacttttgaattctatacagagttacttttttaataatgtaatgataaaagtacatttatttgaaacaagttgcatggtatgagtaccatgtcccagacctttataagtgtctatgtcttaatcaacgtattttagctcaagtcacccactactcctacgtataatcgaagaatgatacctgagcattttatatgtctaccagaatgacttaaacattttactgaaaggtattccagtccagttttgtttctgttaaatttgaaatttgtgatcggtgacacttttctctctctctctctctctgtcccatacacacaaacacacacacacacacacacacacacacacacacacacacacagagccaagacattcatgtggccacacatttttaattactgatggacagccaattttaaaaaaaaacactcaaagctggttcaaattaaatatacacggtcagtttttacttggatactatacatttttaatgctgatagatttgtttttagccagatttacaatatttcttgatgtaaaacactggtttgttccagaaagttaccaaaaacgaggaaaggggaaaagcaatagcagtaggtagaaaaacatcatacatatcatgctgtgtaacaacaagtttctgaaataactttgtttttaaaatgcagaatcatccagaaagttcttcggtggcattcattcagtaaatttactggcaaagtcatttctactccccctcactccctcccagtaactcaaccttcattagttcactagttcactagtttatactctgcttgaagtcaaaaacaactgaaccaatctcatgcttcagaaatatgttactttccttctatctgagaatgaatagatctaatcagaaaataaaacgatggtaaataccacatatgtgttaggaaatgcaaattaattacttaaagtggaataatttttaaaagaaaggggaataaggggaaaggggtagatagcaaagaatagttttaaacccctgaatttactcaccagtttcccaaatgcagggtcagtaacaagaagaccaacctcacccctctactttgactccgcagaagaaaaggggagaagagaaaagctttcaaaggacccatcggaatcgcttttttacgtgtgctgcactagctcaattctcccagccaggacttttcctcccacctcagcagcagctggctgagtacagaagggagagtgtggaaaggcagtgcacctcccaaacaggtaggatgcgactcccagcagaattgagccagggagccaatcaggccgagaggatggtggcataaattatcttaaaaagagttgagccaatcagtagcccaaggaggcggggttctcctactagaaattgagcccagtagggaaaagggctccctttttctaaaagaaaaacaaacctcttctccctcgcagcggcggagaaacgtttgagtggccttgaacagaatccctccctagggagaggctgcctttctccccttctgctcttcctcttgtctgactctatttcggggcgactgcctctttcctctccagcgttcggattctaaatctgtcttccaagagagacccgtgggaagcaggcagtgcctaattggttttccccaggttcgtgaggattctgttaatttgtgttaatcattttgttaattttgtgggtggggcggtgtctcctttctctttgcagatccagcacctggcaggatgccccgcacaaatgagcactcaggagatgttgaatgtataattgaatgaatgaatgaatgaatgagcaggctccatgcattcctggtcaccacgtttgctccccccaacccccttccaccgccttaatagtgagagaggatatgcagtcttcttctcccgccgggcaccgaaagatgacactaatgaataatgccaggcaagaactatctcatcttaatctcatcttacaaacacaaaaacagaagtctgattttataaatgttgtcatagccataggagctgtagacctattagatgggcaatcctagttctctgccccactccccatctgcttttgcatctgttaagcctcagtgtttggtacctaacttcagaggctctgctttgagttcctagcagagcccgacggttgccatggtaaccagaaagcctctggcagctggaacaactgtacaggcgaagacgctggaggtggtggaagcaggcgctttctctgcctagccatcttctgtcttaaaacgccctcccaagagcctgcttcccacggaagcctcctggggttggagtctttagctgttaatccaccccacaactacctggaattggccagattctggtttgaactgcaatttactacccagttacctgagcatatttgtctgcctcaaacggttcaagccagaagtaacagggtttgcgcacggccgtaaggtaactgttgctgcactacctactgaaatcacttaaagaaaccggataggggtaatgaggttactgattcttgttctatcccgaaataacaaatggtgcagtgctaggcgtttctccccctctttgattgattctccacccttttagtctcctctggaaatgcacattgaccctccttgtttttcttctcccactacacattaattaggcagtatttttctcttccacaaagcatgttagtcaaggtagcccatatcaaatagtttataaaacaaaaaaatttaattataatagattttagggtgaataaatttacgtaaaatgtgatgtcaatataaatttgaggttttttttcttttactgcttcaattaagaatatgctttggatagctatttaactgtttcattgaatgcacacactaactcactgatctgattagccagagaactaggaattaattcattagaagtatgttgtgaataaaaatacttgtctgattaccctttgcattttgctaacattggataaggtttgtaaacactgatgggaatatgatactttataatactgcatgcaacagtagctgatagtccttctgtcaataatttttaacaaggttttactctttaattttacatatgtaactgaaagacactgagaacagttaaaagaaattaatgaggaaaggtgaagggtatctccttgggtagtaagaatttgcctgtttattcttgtaaacgatttttaaaagctggagagaatttcccgtattctccaaaatccaggtttttgcaagttttatgctgaaatattttccaacttgtttca

SEQ ID NO: 316932 - DNA, 4001 bp, Homo sapiens
ttgttcttcttcctgggtgctaagtgacccacaagcttctttctttatacgaatcttcctctccgggccccagtgagggtgcattctccatccctcccaccaagatccgtgccatcttctgcttggccccttcccaaagctcacactgtctgtaccacccctaaggatctgtccctgtgctgcctctgtctctccaccccttgagcacaagtctgaagttccagaaagcaagtcctgtccacaataaacttcttaaagaatgaagataaccacctagtattttcagaataaatgatttgatctgagagaaatcttccaactgatgtgaaagaatatcacacttcagcccccacttctgaaagaagagcttagactttctgaccaaatcatacccaaaatctgtttggttttgaccacaatggagacaaagtgtgtgataatgctacagtcaaaatgtctccgcaggccttttgtgataatcagaattctgggatagtctcctgtctggtcacagagcaggcacctggacaggctaaccctccagccctgagaggtaccagggagctggtgagggtgagggcttttgtgtcgcttcactccctctccctgtgccaatacagcagaatagagttacgcttccgcacccaagtcaactgtgtttagcccataaacttcacagccagtgaaatatgacacacctccaggcaccactggacaaaaaatgtaaggaaaatccacaagagagaatgggacccactggcactggtgatcgattccgtgtgaacggagaggacatccagggagctagaaatagcatgcagagacaaaactgactcaagactgactcaagaggacttaagccgagtgacctgtccactctgcaagttctatataggtcacaaccactggctctgcttcctgtactacacacggaatcacacgagtagatgttcaccgggaagagaaacactgaggtgttgaaagacgaagggggatcacgagacacagcccagtctaccctcggccaacccccccaccccccaggctacaaccgcaactacctgcaacacgtgtgcacccaccaactctcaagttccctggactgtagaagaaccagccctaacctccaaagtccagtcctgtccctgcctgctcaataaccccagatgtccggcaaaaggccaaggcttaaacccacctcctgcaccgctcacctcctgactccagctgtcggccttctaggcaccgtccctcagtctccgctgtgggtccccacccaagctccctgcctgccaccatcccccacctcaccgtaacatcttcccccacccaccctgagggggttccccaagccccaggccttgctccgacttgaccctactcttatgacaagaaagtaccccgacccggtcccagcctcgccctccgcaatcaccgccagcaggcactcacctacgcccgcgctatgaccttcgcctggccctgacccacgccctcggcagagaccctcccctggccgaccctgacccacgatcccgctgggaccctccccagccctaacccacgcccttccactccgggctgacgctgcccccagcgtcccggagacaacactccgcggccgcacccgcgctgccgacccggggcctcaccttcggccaggacccgccgcacccgcagccgcagctcgcccagttccaccgtctgccccacgaagtcactctggtcgcggccggaagcaccgcccagggagcctggacccgccaagaagtcgagcgccgactgcagcagcgacatggcggtggctgcgccgcaccccgcggcagccggagtggtcgggctcgggctcccgctccctcgccgtccgggtcagctcagcaaccgccggcccggaggtgcaccatcttccgcctcgacgccgtgacgtaggcgcccgtgaggacgcgtcgcgtcaggcggcgacccggcctagccccgtcccctccgccgcggcctcacttcctggctgcgcgcgcaggcgcggaggtctgacggagacagcgcgtgcgcggcgtcgccgggcttgcgatgaacttccggctgtcaagctcccggccgggctgactcaagcggaggcgcgcggaacagtcgccgaggcgattcccgcccaggtagttcagcgccccagtccagctcccggtaccgttccccacatggtctgttttgtgggaggctccttctcaggtgtctccggtttaagcgcttcgccatcctctgggtggagtcagcctcccgtttgctgttagcgccgcgtttgcgaatgggttcgcgaatttttctctcagttggctaaggagcaaggagttagcgtgcgttaagctttcagtaaatacttggttttcgtctcatggaggtcggagtttcctgtgacgcttagtgagtaaggttggcagccccctcccagcagccaggcaggcagtttgcaggggaaacgctgctgcattgctctgtcttccgaggagagggccagggtctggcctggggcagtgaccagtagtgggagccgtgggctagaaaaaccttcgtcctgggcaaccacaacactgcagagactgccctgtgaccctcaaggttcgttctcaccctgacattttccaaggcaaaagcaaatcctcatgaaccacttggaagggttcgtaatgcccaactatttggagatgaaatggtgactttccttataggataataaggaaatggctcacagacaatgcatttttagtttttggcccacacagtatttgggggttgggagtgggtagcaggaggtgaattagttgctatcatttaaagactgatgccaggcgcggtggcttacacctgtaatcccagtgctttgggaggccgaggcaggcggatcacctgaggtcaggagttccagaccagcctggtcaacatggtgaaaccccgtctctactaaaaatacaaaaattagccgagcgtggtggcgggtgcctgtaatcccagctactcgggaggctgaggcaggagaatcgcttgaacccgggaggcgggcgccactgtaccctagcctgagactccgcctcaaaaaataaataataataataataataattgaaaggcctaaatgttaaaaacctagttttccagcttctgtggaaaaatcaaacctgtcaatattggacccaaaatgatgtgtgttaccaattacctagagtggtcccttgaggtaagacacagtcatttgcctgaccagatgggctcatgtatgttacctgcctggttcctatagtcatttaaggttgcaaccccttcaacagagttatttgttctccaactcaaaaatggattctaaagctcacatcagcctcttagccgtcccagaagctaacatctgttatctttatcattaaaagataatagcctcagctcgttggaacacttatctatgttatggaatgaagtattgcatgaagccaaatgacatctttaaaaatatatataacaaaaataacagtagcaatagcttagtttaggcactgatttattgcttacaacacccttttctgtaatagttcattgtagtgaaaacatctttgtgaagaaagcacagtataattaaccccctttattttgggatgagaaaatatgctcaacaatgccattattcggccagggccaacaagtgatacaactgcaattcaacgcaagtcatggcttttccagccagtgcgtttgtctggtcgactgtggaatagaaggatagagagctcaggaaagaatccctgctagagacagatatctgggcatcctcagcatagaggtggcagttggctctaggagctgaagagaggaccaacagagatggtgtactagacataaagaggttagaatcttcagagaatagacagtttgtggagaaagagcagtcagtgaaggaggaagaaaaccaagagagtgtcgtaacagagccaaggaacgaggatgttcggggcagagagtgc

SEQ ID NO: 316933 - DNA, 4001 bp, Homo sapiens
ttccttgttcttcttcctgggtgctaagtgacccacaagcttctttctttatacgaatcttcctctccgggccccagtgagggtgcattctccatccctcccaccaagatccgtgccatcttctgcttggccccttcccaaagctcacactgtctgtaccacccctaaggatctgtccctgtgctgcctctgtctctccaccccttgagcacaagtctgaagttccagaaagcaagtcctgtccacaataaacttcttaaagaatgaagataaccacctagtattttcagaataaatgatttgatctgagagaaatcttccaactgatgtgaaagaatatcacacttcagcccccacttctgaaagaagagcttagactttctgaccaaatcatacccaaaatctgtttggttttgaccacaatggagacaaagtgtgtgataatgctacagtcaaaatgtctccgcaggccttttgtgataatcagaattctgggatagtctcctgtctggtcacagagcaggcacctggacaggctaaccctccagccctgagaggtaccagggagctggtgagggtgagggcttttgtgtcgcttcactccctctccctgtgccaatacagcagaatagagttacgcttccgcacccaagtcaactgtgtttagcccataaacttcacagccagtgaaatatgacacacctccaggcaccactggacaaaaaatgtaaggaaaatccacaagagagaatgggacccactggcactggtgatcgattccgtgtgaacggagaggacatccagggagctagaaatagcatgcagagacaaaactgactcaagactgactcaagaggacttaagccgagtgacctgtccactctgcaagttctatataggtcacaaccactggctctgcttcctgtactacacacggaatcacacgagtagatgttcaccgggaagagaaacactgaggtgttgaaagacgaagggggatcacgagacacagcccagtctaccctcggccaacccccccaccccccaggctacaaccgcaactacctgcaacacgtgtgcacccaccaactctcaagttccctggactgtagaagaaccagccctaacctccaaagtccagtcctgtccctgcctgctcaataaccccagatgtccggcaaaaggccaaggcttaaacccacctcctgcaccgctcacctcctgactccagctgtcggccttctaggcaccgtccctcagtctccgctgtgggtccccacccaagctccctgcctgccaccatcccccacctcaccgtaacatcttcccccacccaccctgagggggttccccaagccccaggccttgctccgacttgaccctactcttatgacaagaaagtaccccgacccggtcccagcctcgccctccgcaatcaccgccagcaggcactcacctacgcccgcgctatgaccttcgcctggccctgacccacgccctcggcagagaccctcccctggccgaccctgacccacgatcccgctgggaccctccccagccctaacccacgcccttccactccgggctgacgctgcccccagcgtcccggagacaacactccgcggccgcacccgcgctgccgacccggggcctcaccttcggccaggacccgccgcacccgcagccgcagctcgcccagttccaccgtctgccccacgaagtcactctggtcgcggccggaagcaccgcccagggagcctggacccgccaagaagtcgagcgccgactgcagcagcgacatggcggtggctgcgccgcaccccgcggcagccggagtggtcgggctcgggctcccgctccctcgccgtccgggtcagctcagcaaccgccggcccggaggtgcaccatcttccgcctcgacgccgtgacgtaggcgcccgtgaggacgcgtcgcgtcaggcggcgacccggcctagccccgtcccctccgccgcggcctcacttcctggctgcgcgcgcaggcgcggaggtctgacggagacagcgcgtgcgcggcgtcgccgggcttgcgatgaacttccggctgtcaagctcccggccgggctgactcaagcggaggcgcgcggaacagtcgccgaggcgattcccgcccaggtagttcagcgccccagtccagctcccggtaccgttccccacatggtctgttttgtgggaggctccttctcaggtgtctccggtttaagcgcttcgccatcctctgggtggagtcagcctcccgtttgctgttagcgccgcgtttgcgaatgggttcgcgaatttttctctcagttggctaaggagcaaggagttagcgtgcgttaagctttcagtaaatacttggttttcgtctcatggaggtcggagtttcctgtgacgcttagtgagtaaggttggcagccccctcccagcagccaggcaggcagtttgcaggggaaacgctgctgcattgctctgtcttccgaggagagggccagggtctggcctggggcagtgaccagtagtgggagccgtgggctagaaaaaccttcgtcctgggcaaccacaacactgcagagactgccctgtgaccctcaaggttcgttctcaccctgacattttccaaggcaaaagcaaatcctcatgaaccacttggaagggttcgtaatgcccaactatttggagatgaaatggtgactttccttataggataataaggaaatggctcacagacaatgcatttttagtttttggcccacacagtatttgggggttgggagtgggtagcaggaggtgaattagttgctatcatttaaagactgatgccaggcgcggtggcttacacctgtaatcccagtgctttgggaggccgaggcaggcggatcacctgaggtcaggagttccagaccagcctggtcaacatggtgaaaccccgtctctactaaaaatacaaaaattagccgagcgtggtggcgggtgcctgtaatcccagctactcgggaggctgaggcaggagaatcgcttgaacccgggaggcgggcgccactgtaccctagcctgagactccgcctcaaaaaataaataataataataataataattgaaaggcctaaatgttaaaaacctagttttccagcttctgtggaaaaatcaaacctgtcaatattggacccaaaatgatgtgtgttaccaattacctagagtggtcccttgaggtaagacacagtcatttgcctgaccagatgggctcatgtatgttacctgcctggttcctatagtcatttaaggttgcaaccccttcaacagagttatttgttctccaactcaaaaatggattctaaagctcacatcagcctcttagccgtcccagaagctaacatctgttatctttatcattaaaagataatagcctcagctcgttggaacacttatctatgttatggaatgaagtattgcatgaagccaaatgacatctttaaaaatatatataacaaaaataacagtagcaatagcttagtttaggcactgatttattgcttacaacacccttttctgtaatagttcattgtagtgaaaacatctttgtgaagaaagcacagtataattaaccccctttattttgggatgagaaaatatgctcaacaatgccattattcggccagggccaacaagtgatacaactgcaattcaacgcaagtcatggcttttccagccagtgcgtttgtctggtcgactgtggaatagaaggatagagagctcaggaaagaatccctgctagagacagatatctgggcatcctcagcatagaggtggcagttggctctaggagctgaagagaggaccaacagagatggtgtactagacataaagaggttagaatcttcagagaatagacagtttgtggagaaagagcagtcagtgaaggaggaagaaaaccaagagagtgtcgtaacagagccaaggaacgaggatgttcggggcagaga

SEQ ID NO: 316934 - DNA, 4001 bp, Homo sapiens
agggggttaaacatttctagctacatgtaaaaagccatttgatgacttaaaacaaatatcctcaattgcaatattcagttatcctttgtcaataagtcatattgagagcaaaattataaaaagatcaccatcactccatgagctgagaagcttaaaaccgcaaatgtactgaaaaggaaaactgatactttttattaccatcaatttagatgacttagatgggaatctatcccagatattacaaagggattccactgctgtagagacttcaaatactaaaacttccagattacatctaatctcatgatataggcgaagagctgataatgggatctcctcctaggattcttactcttgaaaggacgccacaagcctttttgcccaacttcttgatgctaactttccagaaggaaagttaaataaacatgacatagaagcgatgctcatcacacttgcaaaaagcactttacaacagagagagcgactcgactcctcctgcagccccgccgcctcggcggtcgtgagcccctcataccctctcctacccccactggcagccggcccagttggctgtcccagcggggaggaggaagcaggtggtgcaacggttcatccggggggaagcaggtcagggtcgggggcgaggccggtgcgcgccgcccgctgccgggtcagggaagccgcagtgcccgcggtcccttccccgcgcggcgcggctccgggtaactaatgttccgaggcgcctgactaaaccctccaaatccaaggaatgtcagcgctaacactcgcgccctgggcggcagacaaatgcgtcccagcggagccgccgcgagctccgcgccgccgctcccctcggcgtcggcctgagctagccggcagccggcgcggggcggccgggcgccgacacaagttagttttccggcccaagcagccctgccgcagccaaggaagaggaactgctcctcttcccccggatagcgcccgagcactgccacagcaggggcttccccaggcgctgagggctgggggcggcgggcaggcggggcggggacgcccctccgccatctccggccaaccgcccctccctcgcccagggacgcgagggggaccggcggtccgggcgaggcctcggccgcgcatcgcaccccggctccccgccgccggagttgagggggaggcgcgctctccgtaagagccggaggcggggcgccatcgccctcccactccccggcgggcgggccgggggagcccggggctgcgaacacccccagacgggcggctgcgggaggggaggctggaccaaggggcctggtccaccggaccagcggtggcggcatcggcatctcgcctccttcaggcctgcacgcgccacaggccgcagcctggaccaaccccgcgtccccgggccgtgagcgctgcggtcccggccccccagagcgggacgccgggcggccgcagccccccggacccggctctccgcccgctccgcccgcagtcccggcgcggagagcggccgcccgagccgctgccgcggcagcgcgggtgtcggcgacggagcccggggcggggaagagcggaggaaggggcggcgagggggcgggccggcggcggccagggaggtcggagtgcgcggggctcggcaccccctcggcccgcgctgcgccagcaccacctgcggagctgcggtgcccacgccgtgccgcgaccccgccgcccctgctccctccacacgcgggcaaacaaaacaagttgccggtcgctgccgccggagggggccgggcgggtcactcaccctcatcctgctcagcgggcttgggtcgtccggccgcggggtcagggaagaccagaggaccactagccccaggaagcttcccaccaccagcaaactgcgtaagatgaacccaatcttcagcctcatcttcctccggcggcgagagactcacagcccggcgcagccgccgccaccgctctcccctccctccttccccctcctccggctctcctccccctctttcccccacccctaccgctacggctgccgccctctccgctgcctgccctttccagctccagatccggaactcccctcggctacacctttccccgggctcttccctccgctcctccccgtggccccctcccctctggcggccaccgcagagctccgactgacccgtgtgcctcgctctgccaggctgccttcctctctacctgcccccttccagatccgcagtcccctgctctccacgcgagcccccttcacagtccctgctaccttgtaactaacttgcacttttcccgagtccggttcttagcctttgccctgcagctcagctccttaaagctttcagatccccaaacttttattgtaattatggacaataactccgtccttaacgcctgtgccctccgggatcccgtggcccgccgccccctccgttggacctggagtcgctctcgtctgcacctctcccttagacccacttccctgagccccttgtcgagaggctttcaggaagccaaccaggaagtgggactaccgctgctgctgcagcagctccacgtggctgatttatagctgaagggtttttttttttccttcttattgattgttcttgctttttcacacggctccttaaggtggtgaatttgtaaccgaaaggcccaggtgagatgtgcaaatatcactggattggaggagctcacttggaaagccagtattcctcctgagctaatgaaaagaaaggctgtcgtcttatgccaaaagcaataccaaccttgttcacgggctggtaagtttcaaatccaaggaccacggatttcaactccaccctcattgcgtccctcagatctgatatttgccacttgatttctgcttttcaaacgccttttctgcctgtgttacctaaattacacagtaaaggatattggcaagtgtttagccaaatgccccaccctgaggaaataatttttctgcccatatctcccaataaagatgtctatgcctttatagcagaatgtatgtaattacattatcagtgtactatatcctaaactgctaatttaaatttaagtcgaacaaaacgttttaagattttatcctaagttttttggggttttttttcttttcttttttttttttttttttttttttttttttttttttttttgagacggagtctctcactctgtcacccaggctggagtagagtgcagtggtgcgatcttggctcacctcaacctccacctctcgggttcaagcaattctcctgcctcagcctcccccgtagctgggactacaagtgcacaccgccacgcccagctaattttttttttttttgtattttagtagagacgaggtttcacggtgttgcccaggctggtctcgaactcctgagctcaggcaatctgcctcgtactcccaaagtgctaggattacagctgtgagccaccacacctaggctatcctaagttttaagatggtaacagctgattcttttttctcgtactgtctcacatctgcaagttttttgctttaaaacaaagctcagttatgtaaagttttacagtgaaacaatttcaattatcaagatagataaagaattataccaaactaccttcatgtgctttttggcttggcttacaatagctagtatatcagggagttctgtagatgccataatttcaaaatttccacaaaatatctgaagtgatatcctcatgaacagcatggttccggaaatgtagaatggattgtagttaggtgtattattggttggctgaaggactgtacatcatattgtataaaagtccactatatagagtacctggaagagggactgtcaagtgttaaacacaaatcactgcttgacttagcatttatatcagccccttaggttaaaaccagttgttttaagtagaagatgagagattttgcctaagaccattttttttgtgtgacagagatctagagtgtgtaattcacgaagtatgaatctgct

SEQ ID NO: 316935 - DNA, 4001 bp, Homo sapiens
taatgagttacatattaagtagaaagaaaacatattatactacatatctttagtatgggtgtttccaatatgacagcaagctgttagcaacatactgttatcaagcgactgtgaaacggaatgaacgtccttaataactctgcctgtgtgccccatggcagcaccttagcaacaggggagacgaaagagagactttaagtttcgacagggtaaaaagctgttgctaagcaaaatttacaaccaaaatactgaaaaccatagcttgatttttaaagaaccacttcacaatcttaatgatttagttggcccaattcacctgaacatagacatgcatgccaaatggaaagcaaaaacctatccttgtcattaaacttgcaccaaacccactcccacctccatagctgaacagttacctttcatccacctcaagtcaaaatcaacctaagaccaatggtgaaagattatcttctcttcttcttgacctgtcttatccttctttactagttgtacatgtcacgatgttactggctgcaatcttaaaacatctacttgcttaaaccccaaagtctctagagtcttgtaataatcagctctgtcaagacttgggggaaaacccaaggcgatcccacaccggctttctcgagtccccgcgcgaggatcactgccttaccaatccttgtgtgatctttctctgggtggcacttacctgctgctccccgggctccgctgacttcaccaggtgcttatccttgtacagagaccagagaccaacgttaggcaggaaaattaaagccaccgtgaacaacaaagtcatctgcagaaatctcttctgtttcctcttcattgcaaatggtaacagagaagaaaagttaaaggagatggctccctgactgcttcttgtgtttaatgtcaaattcctttcctctcccctgcgaagcaccagaaactgagaagctacaaacttttgttgcgtgctcagcaccaatctgcaggattcagagggagttggccatctgcagaacaaacgcacagttactttccccccagaaaactatgacgaaggcattatctattggcttagaaataaatgacttgactaaagaaatcattaagcccattgacctccattaatataaagcaatagagtaaatatggtcgtttcattgactaaaggtaagttataaaaaagtcaacagcctgctagatacttaggtaactgggagtttttgttgctgttgttgttgttcgccccccacctccttagtgtgggagggctgggtcggggtggagcgggttaggagacagaactgagaggaactggctcaaccccttcaagtgtcaggaagaaaagtgtccgcttttgacattggaacagcgtcaccttcttcgtcttccctgaacatcttttcctgtgctccccttgggataacccacctgaactcaagttcaactccctccggagccagcttgccggcgggctccaccgggatccagggactcgggatccgggcagaactccggttcggatggaggtccacgaagtgccggaccctcgcgcgctgtctacacgctcctctgcaggcagcggctgggagccccgggaacctggtggaaaggaggctacagatgtcagcggagtccagccaggaagtggtggcgccgcgacgtcccttcctcgcgcggtcctcggaatgcgatcctctgagaagtgagcgctctgcccatcaatctcgtcccttcccccggtgacgctctcacgctccgctgttcatgttaccattcttttctggcaactgaacgaacccacaggaccatcacgagcacctaaagggcaatattttttgatctcctcttctcgtaaaggggatggaggcggagaaaccgaagtctgtgctgggcttggaagcggacgagggcgctgcgaggaggagcggaaggcggagatgcgccgcggctgcacacggtcgcccgcgccccactccccggcgcctgccttccgcggagacgtcgctggtgtctgccacgtgcggcagcccggagcccaggaggggagggcgggccgcctggcgggggtgggcaatgcctcccggcctccagacgctatataaacagacccggacgcgaggcagcggcggagggcgagcgtgacgctggaggaggagtgggagctcccagcctgcgcgggtcctctctttacctgccagggcttttccgggtaatctgggaccgacagggatgccagcaccccgtcatctcacccaaagggcgccaggccagagattcctggggaaaagtcgccggctgcaggcggttgtcccaggaattcctccatggtgccggcgggagcgcggcgagccggggcgcggcggctgcgggaggtggaggcgacccgggacagggccggtcccagggagaggggatcccccgagccgcgcgttccgccgttcaggccaggtagggggtggggaaggaggaggaagaggatcccgaagcaagacagagctgaggctcagagttctcaggcagcagcttctggaggacaccgtggagacccaaggcggctttatttgggtctgcaaacacccggggccccggttaagattcggcagggccaccccgctcctcccccgccttgcacgaccgcactccgcgcgccttgtcactgcgagggctacctgtcctcgcacactcctccgcgatggccagaaaacgtgggactcgagataagactctggcagatggtactcctccctccgcctaacgtatcaatgcaccaacgcccctgaccgcacactcaggaacctgtggcagcctcgccaagggacagcgtgcccagcaccgtgcactgggcactcttggatctggagctcacaactccggaaggaatggggacttagatgaggtgacagacatgcatgcatgcaatgcaggctgaatccgcctgtctggagccaaaaataaacgccatggtcacctctttgttacaacctggatatgatgcccacatgcgtggggtagacatgcttgggatagataagcctgtggacttcagacggtattttctctttcccttttttcttctttctcgtcctcatctctgtccctccctccttttcttctcgccctatctcttcctccctttctactctctctagtgtctcacttgagaaagacctagatttgagtgggaagagttatgccttaaactgttctcattataaattcaaaatgtacttgaagaatacagatcgactgtatgatggcatgaataaagcgctatgctgtaatatttgtttttgtgaatcacttgaattttaaaatagtctaaaaatatatttaataaatgttgttgaatgtgtcctttatataaagaccaattacctttagattttatataaatgcaacttaatctagagtgcaagggacttaattcctcacccccacccccacacatacactatgccttttgtagtctgcgttattttctaacctttttctctctaaggaagtgcagttttgaaacacagaaatgtgaattctgggaagcaacatagcagggagaggtttcctgggaatattgtcaggtgctcaaggaaataaatttggagaatcatttaattatattggatatatttttaagtactgatacagttattaattttcaaagtaaaataactcaaaagtgcacttggaattaaaaaagtaaaatctctcacattttaaacaatacctgttttttaataccttaaaaaatagtcttggatcaggaatagacatactagcattctatttgttgaatccagggtgttgagttgaaacatgcttcactgttgttaaactagcaaatggtcttgcatacagcacccattcagagaaaatcgttaattactattacttccccaatcaagtacacgcagaatacatggtagaaactgaaaggagaaaattactatgtttacttctgttttatagcatagttccagaccataactttagctttt

SEQ ID NO: 316936 - DNA, 4001 bp, Homo sapiens
tcaatgcctaacagaatcagccttcattctttttttttttctcttgccttagaacttttccattcccactaccacctctttaacaatgattcattgttttcaaggacatctggaatctcaaaataactacctttatttctaactagactgtcaccccaaactaaaataccacattcctgcaaaaccaagtcttcattcctatcacccaagctcaaaacctggaaccctttattatcagcattagctaagttctaccgattttgtttcctttgaaatctctctcctatctaacccttccttttttttcctcactgtcaccatcctgattcaggctctcaaggtctcatgtatggactggtacaacagcttgtgggctgggaccttttattctagaaactgctcctttcaaaccatcctgcatactcatccaagccattcttagttagacactactcaccctctctcctctttaatgtagtaagtttcactttctgtgacttccattcccatctcattgttaattactctaaaactaccctaaataggtgtttttctagatttcctctctggcagtttccctctcaagcaaattgttttctcacttatctacttttgagtagtaacagaaagcatgggctttggagtcagaatacttggctttgtatttctttcttttctgtacagacagggtctcctgctttattatccaggctggtctctaactcccggcttcaaaagatcctcccgtcttagcttcccaaagtgttgggattacaggcgtgagccaccgcacccagcctgtatttcagctatatcactaattgatcacttatcactaaccttatgaccccagcaaaaaaacttaactctaaatcatagttttctcatctgtaaaatcggggaattaggcataagtactcacgattacctatttaatatcttcctgtcaaccctcaagttccacctccaagatgcattctaagtatccctcagctttcttgatctccccactccacccttacatgctacattctccacacaggcttgtgtatcccaaacttgctgcctaacaacacaaacccccaacccacacctactccttcaaataagctaaatactgaagactgcatacagactacacgttctggaggtccttggtcttggcctttgttaaagcctccgcggccaccccctcgtccaaatcctcccctgccgccgcctctgaaattgccgccgcctccaccgccgcctccacctcggaagtggttgctgctgccacctcggttgaagccgccacctccaccacctcgattaaagcctccacgacctccgcctcgaaaagacattctctctcctccctgatgaaaaaaaaacgacctatgtcttctgatcactgtagcctctgagtatactccaacccctcggagctgcggtgagaacaccataaaggagacaaaagcagccctgtcacctcacccacggtcagacagccagtgaccaccaacctgatgggtgaagagtttacttctccatggtctcgtgagcgccgaccgaccacacaccacccttgccgccccatgattagtatctcctccccctacagacagcaaggtcttcgcaccgcatccccttccttcctccctccctccggcagttgggttccacgtccagcattttcaaatcctccggcttctacggccactcaccggcgccacgtgcccctctggccctggccttgcgcacacacccacccgcggggtacttccgccgcgctggaacctcctcggttaccgtaccgccacagagttttttaaagaccagaaacttgaataactggtttgccaaaaaaaaaagccaatcacccgcggaacaagcaacactggttccaaaacagcctttagcgctggaaaagtggcaataatagataaccttaaccactaatttacaacagagaggccaacttgcctgacgctgagccgtggaagtgacgtataacagcggcgtcctttgcagcacgacgtcccggaagtgctgcggcaatgttgctcttggagatagctggcgttagggatccgccttctctcccagaggcggggcaggtttctgtttggttgccgccctaacggccagaactaaagcaccttgcaaggaatgaagttggttcttgaagtccgtgctgactggctgggcgcatttgcgcatttgcttctctggctgcaaaatggcccgcaacagcactcactaatttgttgctaacttcaggaactgtgcggacaggtctctgaggcttctgagccgcgctatgtccagtagatctgggcgcctcagaacctgtcacagccgacggaagcgtttatctgagtttcttgtttcttcccaaccttttgattttcgcaccattacgcgctcaactatgcctcttcttttgtcctatggtctcaactaattaaaggaagaaaagcaatgcatgtgtgtgtgtaattttaaagaaactatgctgtcttatagaaaaccaaaccatcatttttatcttttgtaccaggtattcaagtatgttttgagcaccgacgggctgtgaactggactgtgctgaaagctcctctccctcttctctctttaagccctttatatttgacatcagcttcccccacattctccaaagcttctctcacaaataaaggtaatgacttcccatttattaaatttggttggagtcttttacacccaaaccctctgagaccttaccttgatatttgatctcgtgtttagaagagggtggaacttggtacctatctaattcagagggttattgtaaatgggattttaaaatacctttgtaggcggggcgtggtggctcacgcctgtaatcccagcactttgggaggccaaggcagatggatcacttgagatcaggagttcgagaccagcctggccaatacggtgaaaccccttctctactaaaaatacaaaaatcagccgggcatggtggcacacgcctgtaatcgcagctactcgggaggctgaggcaggagaatcgcttgaacccgggaggcggaggttgccgtgagccgagatcacgccactgcactccagcctggacgacagagcaaggcttggtctcaaaacaaacaaaaaacaaaataagtgagagaggaaactttacttgttctttttcttttagtttagtaaatgctgcaatttgattttaacgaatgttggtctttttatgggcctatataagtgtattatttttgaaacaaaaaatgaaaattacctatttagtatgaaacctttgcttatcttttgctgtgtatttgctcaattctgaattgaacttgagattgtcacacacagattgcattttcaactgaaatgagatgatttttgtctttactcttaaaacttagtgagaaaaagcttgcttgaacaagaagttttaaagtatgtcaaaatgtttattactttcttaaaaatgtcaagctgctcttctttctcagaaatccaaaacttgtagaagcacagatcaggccaggtgctgtggctgacgcctgtaatcccagcattttgggaggctgaggcaggcagatcacctgtggtcaggagttcaagaccagcctggccaacatggtgaaaccctgtctctactaaaaatacaaaacttagccgggcgtggtggcgggcgcctgtaatcctagctatttgggaggctgaggcaggagaatcgcttgaacccgggaggcggagattgcagtgagccaagattgcgccactgcattccagcctgggcaacagagcaagactccgtctcaaaaaaaaaaaaaaaaaaaaaaagaaggagaaacacaaataagtacatttcatcttatatctacagtcatacattcacaaagttcttcctcttttctcaaagccaggtgctcaggctgagaagattcaaggaaagggttcctcacgtagttatacagttgtgttccaggggaaggaaaatattgttcggtttt

SEQ ID NO: 316937 - DNA, 4001 bp, Homo sapiens
aacttaatacaatgttatatcctcacattaaaaatgtgtcatattttatcagtgactaaataaaaaacaatttagaataagcgcctacactgagattggcaaactaaaattcatttacaacatggcatcaggaggctgatgatataaacatgaaggctatagagaaaggaacaatttggcgtcttaaaacaatttagaaatgggtatcaggtgacaactgcttggctgacttcagtgaaaagcggcatttaacaaattaactgtaacttatcaagtaatcactcagtaaatgatgaaagctgatctttcccacattatctagaattaacataaatggcaacattctactactagagaaataatgataaatagttccacgtctcttatttaaaaaggaaattctcaaccatgttttggtttgcatgtataataaccagagagacacagatacaataaatcaccactaaatgatactcttaaaaaaattttgcaaaactccaccacactaaaccatctgatgcggcatatttttggtcccccaaatcactttcaattcctgagacctaatttcaggttacttttttaatgcttatttgctatcaaatctaagaagctgttaaatgctataataatctctcttatctggtcagtcctactctgttgggtctgtacataggcctctccaggtccttataaatgtgcttattccctatgaaatccatgtatgttcctatcctgctcttctcccaagtaattttgtgtatatacatatatatatatatacatattttacatcgttttgttttgtttcaatcatttcaacatataaagttctatatctgaagtactgcaagaataagtccttctttttaaagtttggaaacacagcccataagggaggggaattaaagtaggaactcattagaaattctgcatgcagtaaagcaccattcaaagtatttttgcatttccattacatgagagaaaaaatgtactttccattcacaaggaaacaatctaattcacgaaaagaatacaaaactgaatacttctttctggacaatttccctctgttcctccaactgaaagtaaaaataatgccaactagtctcaaagaataaacaaaatattagaaacttgccatatgtttctgtatttaaagagaaactatttaattcttacataatgaagcataaacagctgttcaggggatatctggccaaataagcaaaactctccatataaccagggggagtatctcttcttttggctgcgtcctcctaggtctagtcacacatattccaacataaaacgcctgcacagatagctagtgttttctgactaatgacaataacccaccactaccaagagcttgtaggtaaaggctccctttctacctttagaacgctgccagcccatactagcgctaaataaaatcagctaaatatgatcccgcttctcgtgtcaccgtccccactgctagtgctattagtaagatgaccgaatccactcttctgtctgtgcacccttcaagaaaatatttgctattttacactcgcgaattccccaactacatctatttgaaaacagtggtttatatatgggggcggagttgatagaaagtctgtttgtgcttttatttaggtttcggggctccaggttataactcaacgccctcccgtcagccaaaacgtctagaagctgggccgtaattgccattatttccccagtcctgcagttccacctcacagttaggtgggcagaaatgtatgaaacagaataccctttcctcgtcttctgggccgtgtggaggggctgctgagccactgagctctctcccctaatctggttggatgtggacccagtcggagcccctcttcggtggcaagaaccaccgtcaacccgggcgaaagcccaacgtcttccacggcagccccagcgcagcatgggcgccgccattgtaactccagggtcttggtcaggtgactcagcctcactatgccgcgaggctccctgggaagcgtagttctggaaatgcattaaaaacgccataggctcggaccggaagactactattcccggcgagcattgtgattcgaagcctgccggaaccccgcggagaggggagggaaggagaaatagaggagagggtgggagggtttctgggtggggaggtgtgactcctcctagcggggagttggagaggtttgtggctgtgagcgtgtgtataagttagagtgtgagcgcttgatgcttggtgctaaagcgtggccgggattttataacccagttaaccttgcaaggggaagtaaatgaccttgacagctcagcagagacttcctcagcccccaaacccaatccgttatattctctgtctactctcctgcttcactcagcaatttgtgcgttaatgcaacaaatacttatttgcatgcctaccgtaatgccaggctcagttctcttaggcactgtagttactgcagagatcaagacagttatggcccgcatgttcatggagcttacattctaaagaagggagacatacagaagttaacaaaaataagatacttccatataggtagtaagtgctatgtttaagcagaggtaattggagacaaacagccctagattgaatgttcatgtacattttaacctcctttttattattggccagtatcagaaacacactccttatatgctaggagcagataccatcgtcccagcggacttccttcattttcctgtgtcaaaactaataccccttgttaaaactgccaccgatttcttgtgtttgaacacagtctagaatagtcatttagccactctctatttcatcacccgactttgattgtcctcgtagtgcttttgactgcctgatgtttatcttctatttccacaaattcctcgtctgtcttattcactacagtacaaagtaggttccttaaaaatatttgttgaataaagtagtgcagtgtggagaatgcatttgacaaaggatggagtggatgccctttggagcagtaattgtttaggggagagatgatgagttagggtggtggcagagccaaagagaaatggatctgtttgagatagatataggaagtaaaattgaaggactctgatggattggatatgatggtggaaggctaggagaaacaaataactcctggatttctggtttgcacaactggctgatgaagttatccaccgagataaggaaaccagaaaaggaacaggtttgcaaagaaaacatatgagtttggttgccttggagacattcaagaggagaaatcaagtagacatcagtgatgcctaattctgagtatagagcagggcaaggggaaaagctgcatattttgtatacttcacattgatagattttcagttattgatcaataatccattgattagttggctgtaacctttgatcttttcctttaatacacttcaattgcatatccatatggaagaaagaaactttagttactgtccttaaaattgtcatcatttattttttccatcttttctactttttcatccactatcactgttctaaattgccacaccagaagtatcagtcatttgaccaaggatgaaaatgacaaaaatgacagggactggaagggagtggtggagacttgttccaaaatttctctctaattattgccctttatttaaggttcagatgattctctagatcctttactagagtcttccctctgagtttccatgttttccacctttactctaggtaagctagctttcttttacttatttagctcctcaggtttttctggcccagactaggggtcaggagagttgcctctgagcacaaaatggcttcacttttgttaggacaacagaggagaatggaatcttgtatctctagctaaaaagagagggggacacttgttacctcatcgctggtaatcagcatccttaaaaggcgattcactccatcaaatggaagattgggaatgttttgaaaaccactgtaaggg

SEQ ID NO: 316938 - DNA, 4001 bp, Homo sapiens
taacaaagatcattgcttttgtttttattcccagagggtcagcctattcagtcaccctctacaacaaagtggaaattatctggaagaagatgaaagaagatcccatgtagcgaaaaaggtggcatggaatctcagccaaccaggacactgtcagacgttcctttaaaagagccttgtatcacagatcatatatgtgcaataatatacataatcccccagtgggagatgtcttctacatggcagttatcacaactgtgtagtaaagattcctccttcccattctagaggatggggaaatagcaattgaagctaggaatcacaggcagcatgggttgtaccaggatcaacttgtcctgtttctttgtctagaaagatctccccatattcaaatggcagtctcctcctcataccttaagtttagacggaatgatgctagttcacaaagatcctccttgatgacccatcctgaagaactggttttcacgtgaccctttcccacaacatcctattatcaccatagcacttaccatagcagtcattatttcattgattgattgacttgtttttctcggtgtataagttttctaggggtgctgtaacaaagtgccacaaaatgaaagccttgaacaacagaaatgtattctctcacagttctagaggctggagttccaaaatcaaggtgtcagcaggctcatggacccccaagtctctaggtaaaatccctcttgcctctttctaatttttagtggcgactattgctccttagcttactgtaacattccaatctctctctcacacacggtgttctccttgtctctttgtccaatttttcttctttcaaatttccaaatttctcagtgtccaaatttccttctttttaggacaccggtcatattggattgcatatctgccctactccagtatgatctcatcttaacttggctaattacatcctccagtggccaattctggcttctagaaccgtaagaggataaatttatgttgtttaagccccacagtttatgatattttattatggcaatcctaggaagctaccacaataactcactttgctttgtttaatccagggtttcatatacttatttgaccaaataaatattttctccatggtagctattaacaatctctaactccctttgtggaggggaaggggggacatacgtgttttagaaaagtaaagctcatcttcctatttcacagatgaagaaactgagactcaaggaggacaaagaattcacacacttgtgtgtggtaggatgaggatcagaacttgggctccacaggcactctgggtgctctttaccatttgcttctatttacttctcagctgccccaggaaatatggtggcatacaagattaggcttggcttggcgctcactaagaatagaacagggaacttttcccaattaatgaagggctctttgaaaaaatcgacccaatattcttccagccaatagaaaaaaatgattctcctttgtagaggagttggggcaaatggattctaaaaatcaattataaaagcagctggtccaatgtaaactgatgtctcagctgagtttggactgactgaaaatccagccacagcttggttttcacctcttcatccctccacccttccttgtgcctaaagagacaagagaatgtgagcccccacccctgacatgtttgaaaagggaaacaaattcattgataacattgtggtctgttcaattctttgcttttctttttgcctccttaccccaccatcttcctcaggtacacaggacacaccagaaataaagcactcccaccccagtgaaggggagagagtgtcccctaccttctacttgataagctgcagtggctgccgcccatccaaatcctgcagggaaagccatggtttaagaagctgtctactgggatcttcagctgccagaagcagagcaccctttggccagaggagccaggcaattgtgcaaacagaaaatgagctctcaccctagaatgaagcctcagaatacaaatatttatgcaaacaacaaggaagcaggggcaaaggacacttgactgccacagccttgataagaatccaagatactttgtacaaggccatcatttatactttcttcccccagcactccctgattcttaacagagttgataaccctgggtgctaagtccctgatttggcagggcacccatttacctgatgttttgccttttaaagtaacatgaacattgttttaaaaagtcattatcatcctactagaattttcccttagttcattcatcccaattcctgatccgtactctgtagaggtaaccacttttaaccatttcttctgatatttaatcccatattgtgtaaataatagggtgttgctgcttatttttttcaattttagataattattgacttctgggtatagggcagaggatctagcactctctctctctgttcctcctccctccttctcttccaccttctcccatctggccaacatgataaaattaccttttcatttaaatgaattcaatatttatatttctatgagtctgtatggctcaaagctgagccatatagtatacataccatgcttccatgcaacttttaattttctctagggttaatccactgcctgatctttatgtttatttcatcttctttacacctattactaattcatccccaaacactctgacagaagaatacatctctgagttgttcaaacaactctgtcttcctgctccattctgcactgtttattttttaggacaccacagagctttgacccacgatctccttcacatcattcagagaggctccttcacctctcccctggtctttctgtttcttttcccgctttagagaagcacatcctcaaataactgtctgataaagggggcatgggacataaatatttcaaaactctgtagttgctctggaattgtctttagtctaacattgctcttaatatgcagttttgtacaggattttatgatgaaaataattttcactcagaattttgaaggcattggttcctgattttctagcttctggtgtggctactgacaagtttgatgagaatacaagtcctgttcttttatatgtaaacttttttatttccccagcccaccctctctgacccccaagtttctgtttctgaaatttcagtcatgttcattggtgtggaacttctgtccattgtgccaggaacccagtgggtatgggtttccacagaaatgtacatgttaacagtaggggaaactggatgaggggccatgggaactccctgtactatctttgaagcttctgtgtaaatctaaaattgatccaaaataaaaagtttatttaaaaaaaaatgactatggattgggaggccaaggcgggcggatcacttgaggccaggcgttcgagaccagcctggccaatgtggtgaaaccctgtatctactaaaaatacaaaaattagccgggcatggtggcaggcgcctgtaatcccagctactcgggaggctgaggcaggagaatcgcttgaacccaggaggcagaggtttcagtgagctgagattgcaccattgcattccaccctgggcaacagaatgagactccatctcaaaaaaaaaaaaaaaaaaaaaaaaagactatggaaagagaggaggtatgtataaccgaagtgaggaaagttacttactcggtttctctacattgccattaaatcattctacattgtgtaatgacaggaacataaagtttgaaacaaggtataagtaggttgaaatcctaccttctccagttatcctaactctaagaagagattatatacagaaagaaattggaaaagacactgaagatatttaaaggtacatgtttggtgaaataacctaacaaatgcatggcaaactattaaatttggcttatgttgtcattcagttctgaagcaattgtaaattgagagaaaaaataaatatcgaaatgttttcacgatagaacgctagat

SEQ ID NO: 316939 - DNA, 4001 bp, Homo sapiens
gtaagaagaggaagagacagcagggatgcaggcataggacaaaggccatgtgaggacagcaagaaggtggacgtctgccagtcacggagacaggcctcctgagaaaacaagcctgctagcacgttgatcttggacttccagcctccagaactgtaagaaaataaatttcggttgcttaagcttcccaatctgtggtatctcgctagagcagccctggaagactaattcagcactcaaatgaactactcacaggtcatggtatgagtcccttcagttaaaggaatatgatgaattggagtcttaacttctactgaatgaatcaagaacccaggaagagaacaagaggaaagaaacaaagatgatgaaagaaagaagaagcaaaggaaaactgaagctgggttgggatcttcctgcagccctagagactgagaaaaggatgtgcttatgtttcccctggacaagacacggcacaggtgaaggagtaagcacagtgatgccttagcatctctccaaggaggcctacaaaggcaaacagagtttgtattcatgtcttactgctgctgtaacaaatcactacacacttgatgactacggacaattcaaatgtattctttcatagttgtagagcccagaagtctgaaatcaggatgttggcggagttggatccttctgcagtcactgaagtaagcacttatcccatgcctcttttccatttgctgctgcaattcttggcatttcttggctgcttgatgcatcactccagtctctgctgttgtcttctgatgtccttcccccttgtgtctctgtgtcttctttttttctgtctctcataagggacacttattgaatttagggctccttctaaatccagggtaatttcatctcgagatctttatcttaattatatctgcaaaaatcctatttccaaagaaggtcactttcacggagagcaagggttaagactcagacatatcttgtgggggtggctgctcagaccactgcagacctcaacaaatggaagctagggtaaatggctagatgcccacaggacagagaaagtgatgaactgaagaacacagcatcacctgcatctaagatactagagtacttctcagcagtgggccacacaaatgtctgtaagaaaaagaatcaactctaaatatctaccgaaatcagagcatgtgatgccaccttaagaactttccattttattacctctccggcaactaggtcagaaaccatggtaaacaggcagaaataagaggaggcagagaaagaaccacggccttgctccctcttccaatagagctaagaaagacttaattctaaattcaatttggaattttaactacttcatagtcagattattctaagcatcaaaattagacggtattttgcaatttaaagtgtccatatgcatcagccagggtcctagcaggaaacagacagcactcagactgggttattgaggaaagctttaaaaaaagactgtttacgatggtgtgagcagggttcaaggaaagcaacaaggaatagtgcagtacctcagggcttgcaacagcaggaagtcattgctgcccatgaaggggctggggtagaattggtttacaaaacctgcagagagtagcagtttgccaaaggctgcctagcacgagaggaggcattagtcgagggacacagccaacccactgcagtccagcaggaaggaaaccagcagggtaaagacttcggtttctctcctcccacttaccttcccatctcttgctaatgtttcccattgatcaagtccaaatggaagataaaggacaatggagtccattgatgccaacccacatgggttggcccagagcaaggaaaagtagagactggatatggataggcaaatagaaaatatccagtacacaataaaatttaaggtgaccagagaaatagaacctacctacgttttcttctaaatggaagggaagagttatctccaccaagcaagtgtaaagggacattgggaaacagaaacaaagttccttttataaggatttcctaaaagtctcatttgttgactgaaccagtataatatataacagaatgtgattataatttaactactgacctggtaatttagagaagtgataaattctgacaggaatatatcagtcttggttctgggacttgttcttctggactcctgccttgcactggtgtttattttcttatgatcttttgctacaaagacttctcaaaccccctcttcatttattttcactctgtttaagacaggcgactttttaccatagctgcttttgcctctgctattctacagcaattattcttttatctttcaattaagcctccttgcattcagtcatttatgcattgaatcacgctatctagtgaaagacactttgctctgtctttgcaacaaaacctcgactcttctttccatccatcagagcattgctaaggaatactaaatatgtaaactagaaacgtagatataactagtacaacatacatgtaacagatgacaaaatagaatgtcaactacagcaccaagataacaattagtgttttgggtgctggtctaagctgcaacatagagactggatatggataggcaaatccatccatctatgttggtttcagcttctgatcactctaagttggtttcagcttctgactgtcactgtgctaaactgagctccatttggaaggatggaatggtatagtggaaaaaaacatcatgatagtaatagtagctatcatttattgagcccttataatggggtaagcactgtgctaagcactttacatgcttcataactactcatgttccctcccttccatttaaatacgaggaatctgaagtttccttgagttcaaggatttagagaaggtcatagatctagcagtcggcagaactaaaattgtaagtcagatgtgactgaacaaagtctgtgctctccagcctttcaatcagtattttccatacattaattcacctctgtagcttactatatctgtgaccttaggaaattcactcaacctccctgtgcctcagtttcctcatatgtaaaatgagaatgaggataacacctggtcttcctgtttcccaaagttactgagaaaatttgttgaatttaaaactgacttgctggggggcagtacataaatgttattgttaattaacagtttttatacctactatactaggctatatttgctcatgggctgcctccccttagaacagacctcagagtaactagtccttgagggaaccgacccttatctagctagtctaccgacgactgcagtcctggtttctttttctagactagctggcggcctggctgcaatgcctcgccagcccagtgatctctcagacctgtgggtgtgcccactgaatcttgcccatacatctctgtgtttcttctgatgcgtgtagtcagtcatgactctgggctctaagaaccttgagaaggacattcatcctgttccagagcttttggacaggagagaatgactcctgtacaaaaatgtactgcaaaatctgtccccaagggcggcaagtatttttctcagcagacgtttttttctgtttctcttttaaaaaaaaataaagttgtcttattacataactgtaggacaagagttcaaacattaatgctgaaaatgcaaaaggtgccctacattcaaacctctgttgcccagaagaagcaccctttgcaacacctaaatcctttaactctttcatccctctgctacatgaacattacaaagttctattgatccgtaacttcttggtgacgtcatgtgaaacataaaataccctaagaaacctcaactcctagaaatctgcctggcttgattgcaaaagcaaaagaattcgagaattttataagcactaactcaattttcattattttcttatcattcataagtcaaagattttctttgtacaaacaattaagcacaaaaattgactccccgaatctattctatgaact

SEQ ID NO: 316940 - DNA, 4001 bp, Homo sapiens
aggtattagagaatagagaattgatagatcaggactactctccccaaatattgaaagttaatgcttacaagtgtattatgtatgtctcaagatatcatctggcatatggcacatgggttataagaatgaagtttagatcttctaggggactgactggaggtttttagcatccatttcatcagaatctgaggactgctgagaatgttgaaatatagattgcagaatgctctgttattctccaaaggacactttcattctttgaggtgaagccaatgtgcacctattgagtcagcagtctaagatggtgattcatgctcctgcttatggcctccatatataattccaattcctagccattattggaccttctgtgtttgaagaccctgatctgaacctgcttcagtaggatttttcaggatcagatctgccccagcaaatccttggccaaaagaataagacttaaagggatttcttggaacatggcctattcagaggtcttataagggacacaatttatgttgcttttttataccctatgctgtctgggaaagactttgtagtcttacctaaggacgcatagcttacttaagaattgatgggtaagacgagttaaaataatttgaatgatgaaataagaccaaggaaaagtaaatgtaagaagaagaataaaaagtcaagagtaaggttattcatgttacagttaataactgataattcttgggaacacacattttattccactggcaaaacacattactattatgaataataatgtacgaattaggtgaggctgttaactgacagcactaaatgaaaaccttaattttacaaagcaggataaatgcagatgtcccttgtgaacattaaagaatcagccagaaaagtaaattgaagctaatgatgaaaagtttcccagctgtagaattcataaagttgtatacttcccataatctcagtctttatcatgtaaaaaaatttttaaacattgcccaaagatgaacacaccatctgaagaataatttcaatgaaaaatataactgaattatcttatttgtggttatgtttcatagctatagaaaaattttatgtgagggatatttttaaaaatacaatgcattttcaaatactgcatgtataagattcctctaaggggatcaaagaaatctctaagttgacatcatgcatcattggcatggtatattacactcaatggtaataaatatttgaagtctgaataaatgcttaatggtggatcacagtctttatttgcattatcttgtaacaattagcaaatgtctaattttaaattattctctctaggtcttgcttatcaacaaaggaggaagagataattgacaaattatatcattccatttactttctttaacaagattcttgtgttgattttttttgtcaattccaattcaacattacatggcatcgtggagctctgattaatgcctctctggtccttatccctctccccaacatattcaccagttcttctgtttcttactttttatttcattttttaagtgataatataaaattaaactagtaagaattcctgtaaatggtcacaacaaaagaaatcttacctctctctaaagcatgtccaaatgccacagcaagcagtagtaccaggaccctcttcatttttctaccagagagtcttgcagcacctcctctctcctgtaggtgaccatgtaaaagtggtagccaaaagtaattggtttcctttttacaaagattcctgactatgaattaatcaattattaatctcagaagcaacacagaattattattaaacacagaagcaaggggctgttatctttggcccaaaagagataaaataatatcaatcaaggtaaatagacaccctggggatactgtagtggaaaatctaggagattttaatcattaactttgtcaaactgcaaaagagccaaggtatatagattattttccactgctgttcctcactaaagtttacttaatatgttagtaacgcacaccttctccccctgtatagggctgtgtgtcttctttggacaccccacctttctcatatgtaagtggaaaatcggaaactctgtctttacctctcttcctctctttgtttaaatctactacaaataagcattaccttaaaatattgcagaccagatgttctaagtaaaaggggaaaaagagtgagaagccaattcaacataatattttaaatccataattctgatgctatgaagtaatcttattttagatgatggcatagtactttgtatttctatgctgtattgcactttgtgaagcactgacatatatatgaaaaataacctttgaagtgaggcaaataactggagaggttaaatggctcaccactgccaatcataaaaagttagtggcaaatcttggactccctacagtgattttaaagctccttctactaatagtttacaactagtatattttatgggcatgtaatttgagagctcagagaggccctgtaggacatgaaatccaacatcttcattttacagaagagtgaactgagcactgggtaaattctgtgacttgtctagagagtcataggtagatcattcattggaattagatgagttccactcctggtttttgcagtagccctattttcaggaaatggtcaggtacaggttgttacacatgctctaaaatcaaatccctactcagctttcatagctgtgtaaccttgggaaatttattttacccctctaagtttcattttcctcatatgcaatgtggtgataactcagtacatttgacacaacattgctatgaggttaattaaggtaatctgggtgcagggctcatggtaacatccatcacatagtaacatggattaatgtcacctattactcttattctagttattgccacgttctcccactggctttccaaatttataatatctgtgaaggtcaatgaaactaatgaggccattggaactcagtggaagagtttaaagacagccctgtgtccagggtcccgcagataagtgatttaaaacttcattatcaactcagtagccaaggattatctacatgggcagagtctatcaaaatttcagtaaaccaatttaggtagttacatgtttagtcagattttctatctatactgaaaatccttgggtgttaggttcagaaaatagagtccagctagttggaaaaagatacctatgccagatcaaagcacaagtatttctgtaaggccagtggaaatccatatggtcaaggagatagctttcctgtccaagagccaactctatcttgttcaaggatcaacttcctgattactataaatctaaattttcagttccctttggctgaattcctagtttactgtgcaagttaatttaaaaatgtattttagttctatggcaaattatttggaaatgatactccaaatgagtgtgaaaaagtttaaaaactactcagaaccccggaactcaaaagaggtaggtaacacattagcatattgatacagttttcatttttctttaagataatacactgtatttatacttctgtatcccttttattcaactgtatttcgtcatcttctgattagttcattcaaaaagacacactcagattattttctacgaattttgatacagagtttaagaccagctcattctttcattttttaaaaaattaaactttatctctgcttttgcaataatatttaccacgtttgtttaatgataaactacatgtagcaagaattgcaacatctcatttagatgccctcttgagaaatctctatacgagctgccaaatgcattctcttggctgaattttctaactgaaattcggcaaaacaggctagtagctaaatatatgagcctttttttcagtcttatttatgtaactttccttaatctttcaaatgttgattgcttactgtgattctaaaactgggaagaaataatcataattggcctaaatgagaggcctcatgtgaca

SEQ ID NO: 316941 - DNA, 4001 bp, Homo sapiens
tcagagaaatgaatccaattaaatataaaaggcaatagtgcagtaaaaataccgggtatttctggtattctatgtattatttacttttggtgatcttacttcagagatttgggattctatttcatttcctcagaaaatttggtataaactcatcgctctcaacatactctgtcttttggaaatatgaatggatatagatgagagctaataccactaacagttctcatacacatcaatattccttgacaatcgagaaatcactttcttatatttttaattttatttgctttgcacagaaatcctctgtgttggtagtcagaacattgtaaattcattttataaggaaactaaagctcagagagtaccaatggtaacttgaaattatttggaattagaacgcagtacctcactccaagaccacagcatttcctaccagttggactagtccagatcatcaccagtggtagaataggtagatatcattctcctggtggagtaagcaatctctttgaaaaaacagtgaaaagagcatcaacgttggtcttagacaaagatttgtatgcaagctccaccaataagcttaattatatgccaggtctgtcccacagaccctggctgagcaatggatgaaaggaatagtcagacacaggtatgcagtgtaaaagcagctaggagattggctggcattagtggctgaagaatgagccgtcctgaacagctggaccagctgtaatcaaatgtgtgaacagctggagctgcttgcttttattcaatacagacataatgctgaaagcctggagcaaacacaatctgtgggtaattagcattatttttcccccttttggggagcagtcacgcagtgtgggctaatgggccctgttcccaaagattaacagggatgggcatggttagaggttgtatattaacagacggacccctcccctggagcattgcagcctttatgttttgccagccaattgattctggttggcttgttgtttgcaaaacttatcatattctgccctccagatgaggtattgactggcctccaaagttgttttagctagcactgaccagtcccatggggttatatggaagttatctgctatggcctcaattaatcctttcataaatgggctagcagctccattttctctaatgcttttccttttctctttaaaagtgtcgaaagtaatgggttcatatacccaattgccttgttcgtcttgcatcactgggcaggccaagagctacccttctaatgccgcttgcctaagacagggtcccataactgttgtgtatcccttgtcttttttccagtttactgggggaggggggtcaggaaaaacctctgtttccttgtttgtatctttacctggtaacagcggggctgagggaggaggaggaggaggaggcagtaaggtaggtgatggttccttctcccttccctgtttaggctcttctgagtcgagtggggccaaagcagccctaaggcccataatgttaaagatgttactggtacccattgcccttgtgcatgatattgtttaagatttctgcccacttgttcccagagctctaggtctagcatgccttcttccaggaatcatgggttatgggaaacaacagtttgcattaggtcccttaattgagcctgggaaacccaggcttcactagctttaagcagctgtttcaatacttttatatttgctgttgagctgataactgttgtcccatgatgaaaccctagcttgaaaattccctcaaacttggaaatcccaagcaggcacccattacttattgactgggcagtcactttacctttgttctcaagggttctgtcgcaatctgttgctgagttcctcataggggacaccagctgctgggttcatgctgcagaccctggctgagtgactgatgaaaagagtactcagacacaggtatgcagtgtaagagaagctaggggactgtccagcactagtggctgaagaatgagcagtcccaaacagctggggctgcttgcttttattcaatagagacataatgctgaaagcctggagtaaacacaatctgcgggtaattagcatcattccacctttcagggagcagtcaggcagcatggatgatcaaaggtcagctcctggtcaacataagtaaacaaacctgtttaagataaattcccctacccttccttgaacccactccttgccctctgcctcagggttggagaacagctgccttcagcttattctccctcaaagctgtgcagagtcttgtaacctttcagaaggtctgctctttccctatagtttctctcaccactctcaccagtctcctacatctcccccttttctgttttttgcatcaggttttgttgattgaagagtaaagatgtgtgcagagacaggtttgacaggtgcagtggttacagctcgtgttccagcttggcatcctagaattagtaaataacataagacaaacatgagtatgatcagtaatattattttccaatcaaggagtaatatgtagtgttacttggcacctcagtccaatgtgtgccattcctgaaggacccccactggggatatgtcgatccttcctagccaatcagtcacattgttagaggctaggaagggggtgcctgcccaagtaacagggtggaagaaagggggatctagaagatgggcccaatagagggtagcaggtgtgagttgcaggcaaagtgagagaataagaaaggttaataccctatgaaagttgcaatgtacaacagaaagcatagaaaggaacaaattatctggagtgaatggtgtctgtgtccagagtaggattcactcagcctcctgagttgtcttcttcagcaccgtgtccagggcctgtgttgtccgaggaagctgcatcatctggggtggtgggtcctgcagggttatttcctttatttttggtactgggttgagtcccagccacatcgtggtatggtttgatgcattgagctggaatccaaagaggatctgagggggtgtgaatacaagcatatcctcttccccacattagcaaatcatttggaccacaccatagattactatttacatctttccgtaacaccaaaggttttatatcgtgagtgattttagcaaagtgctaaaatggaatgttggacatcccatgtgtgacaaaattgtgaaaatgttgagctggtataacccagactgttatcagttctaatttttgtgggccgccccataaacgcaaaagttaagagaagatgtttaatgacatattgggtggactgtccaggaagagcatgagtgctaattaggtgggaattggtatcaatggatacatgaacatatcttagttttccaaattcagggacgtatgtaacatctgtttgccataactgattaggttctagtcccttagggttaacacctgttgaggaaggggacgtgcctgtgagctagtaatctgggcattgtaaaataatttgtttagctagactttgggttaactgaaattgtttagataaatttctccaattttggtggaaaaattgatgtgattgggtggcttggtcaagcagtgatgttataacttgcagatctgcttcatcattgccataagccaatgggccaggcagtgagctgtaggcccaaatgtgtgtgatacaaacaggatttgttcgttgatccagcaattgctgaagtcaaagaaaaagtgcacacagggtgggctcaagagtggacttaatgagggctgttccaaggttctgcaataaataaatggagtaatcagagttattaacaatattgatgggctgaaagggaaaggtttccagggctaatattagggctccaacctcagctctctgagtgctagtaaatccagatcggctgagggagttagttacgcagtttccaccagatagctgcttttccatttttaccagagccatcagtgaaaatcattaaagcgttagatatgggggagtaaactacctt

SEQ ID NO: 316942 - DNA, 4001 bp, Homo sapiens
ttattgactttactatagcctttaaaaccccattatttcttgctttgtttggacagtagattttattcatcttgcttctgaacatcagatataaaccattatgtgaatagcatcattaatttatcatttaaattattttgtttttatctattccagttaacatttcactattttaatagtcttaggttatctagtgcttttaatcaatgcaattagtgcttatttggggtttaagctgcatattatttttgtgtatccttttctttttctggattgacatttaccttctaggattatgcacatgcaaaacgagatttggtagtctgcacagagatatgtccgaactgattaggttaggcccatacaatcttttagagaaaaacaagatctttaggatagcctaattagcacttgcaatattaatagggaatttttaaaaattaacgcatacaatacagatgctgctagacttaaaatggggctgcatgcccataaacccattacaagttgaaaatgtcataagttgaaaatgcatttaatactgtgataagcccatcctaaagttgaaaagtcattaagttgaaccactgcagttaggaaccacttgtactatcaagttctttgctctttcttgatatctgagagtttaatttgtgccattaagtcattctttttattgaattgattggatagctgtcaaattgctacctcattcagtgaaacaatcatctgaaatatagatgcttttcaacttacaatggggctacaccccaataaccccatcaaaaattgaaaacattgtaagtcaaaagtgtgctttggacttaatgatataatcaatttatgatgagtttaatccagccacaaccctgtcttacactgaagagcatgctgagtatgtatagctttcacaccatcacagtcaaaaaattgtaagtcaaaccattatataataagtcagggaccgtctgtattcaaatgtgtgaatgagatagaaagaaagggatctggtgaacttacagtctgataataaagaatatgttatgaataatgtgttgctatgcttataccacatgactaggattagggagagttatgtttaaaaagagtgaggcttgttattttacttcttcctctgacttatatcagtcaacatttgtagaatccaaagatttaacaaactctttgtgtgatgccatacctgtactctgatttggctgaacataaaaagagctagtaaaggaaagttgttttctagtaacagaaaaattgtttttattcttattctatttctaatccagttacttcctttaaaaagtggaacctctgttgattccctggtagtaagtacacatgagtttcacttcaaatgtgaaaattttaaacaagaagttaatgcataatcaatgatgataaataactttacaaacttcttttttattcaaggtattgtcatttgagttctatatgatgatgcactcagagaaatgaatccaattaaatataaaaggcaatagtgcagtaaaaataccgggtatttctggtattctatgtattatttacttttggtgatcttacttcagagatttgggattctatttcatttcctcagaaaatttggtataaactcatcgctctcaacatactctgtcttttggaaatatgaatggatatagatgagagctaataccactaacagttctcatacacatcaatattccttgacaatcgagaaatcactttcttatatttttaattttatttgctttgcacagaaatcctctgtgttggtagtcagaacattgtaaattcattttataaggaaactaaagctcagagagtaccaatggtaacttgaaattatttggaattagaacgcagtacctcactccaagaccacagcatttcctaccagttggactagtccagatcatcaccagtggtagaataggtagatatcattctcctggtggagtaagcaatctctttgaaaaaacagtgaaaagagcatcaacgttggtcttagacaaagatttgtatgcaagctccaccaataagcttaattatatgccaggtctgtcccacagaccctggctgagcaatggatgaaaggaatagtcagacacaggtatgcagtgtaaaagcagctaggagattggctggcattagtggctgaagaatgagccgtcctgaacagctggaccagctgtaatcaaatgtgtgaacagctggagctgcttgcttttattcaatacagacataatgctgaaagcctggagcaaacacaatctgtgggtaattagcattatttttcccccttttggggagcagtcacgcagtgtgggctaatgggccctgttcccaaagattaacagggatgggcatggttagaggttgtatattaacagacggacccctcccctggagcattgcagcctttatgttttgccagccaattgattctggttggcttgttgtttgcaaaacttatcatattctgccctccagatgaggtattgactggcctccaaagttgttttagctagcactgaccagtcccatggggttatatggaagttatctgctatggcctcaattaatcctttcataaatgggctagcagctccattttctctaatgcttttccttttctctttaaaagtgtcgaaagtaatgggttcatatacccaattgccttgttcgtcttgcatcactgggcaggccaagagctacccttctaatgccgcttgcctaagacagggtcccataactgttgtgtatcccttgtcttttttccagtttactgggggaggggggtcaggaaaaacctctgtttccttgtttgtatctttacctggtaacagcggggctgagggaggaggaggaggaggaggcagtaaggtaggtgatggttccttctcccttccctgtttaggctcttctgagtcgagtggggccaaagcagccctaaggcccataatgttaaagatgttactggtacccattgcccttgtgcatgatattgtttaagatttctgcccacttgttcccagagctctaggtctagcatgccttcttccaggaatcatgggttatgggaaacaacagtttgcattaggtcccttaattgagcctgggaaacccaggcttcactagctttaagcagctgtttcaatacttttatatttgctgttgagctgataactgttgtcccatgatgaaaccctagcttgaaaattccctcaaacttggaaatcccaagcaggcacccattacttattgactgggcagtcactttacctttgttctcaagggttctgtcgcaatctgttgctgagttcctcataggggacaccagctgctgggttcatgctgcagaccctggctgagtgactgatgaaaagagtactcagacacaggtatgcagtgtaagagaagctaggggactgtccagcactagtggctgaagaatgagcagtcccaaacagctggggctgcttgcttttattcaatagagacataatgctgaaagcctggagtaaacacaatctgcgggtaattagcatcattccacctttcagggagcagtcaggcagcatggatgatcaaaggtcagctcctggtcaacataagtaaacaaacctgtttaagataaattcccctacccttccttgaacccactccttgccctctgcctcagggttggagaacagctgccttcagcttattctccctcaaagctgtgcagagtcttgtaacctttcagaaggtctgctctttccctatagtttctctcaccactctcaccagtctcctacatctcccccttttctgttttttgcatcaggttttgttgattgaagagtaaagatgtgtgcagagacaggtttgacaggtgcagtggttacagctcgtgttccagcttggcatcctagaattagtaaataacataagacaaacatgagtatgatcagtaatattattttccaatcaaggagtaa

SEQ ID NO: 316943 - DNA, 4001 bp, Homo sapiens
aatgcgtgtatctgtcacgtagaagtatcttttctagttaaaggaaaaaatcttcattaaaaccaagtaactatctttctgggctgtaacagggcctatgtcagtatgagctgagactgaaccaaaagaagggtagcatttttacaagttcttcttgaacagaaaagatctgttcaccattcagtataaagtttaactgtggagcttctaatagacctggtgtctctgagctcagtgactcattgaggctcttgagtaatactagtgaagtccagcagctaaatttagattgactcagactgaagaatcaacagattgaatagaatagagcagctcaatgaatagtttccaggaattgttaggaatagtttccaggaattgttagtaatagtctatacagggctgtgtggactattgttagtaatagtctacacagggctgtgtggactattgttagtaatagtccacacatcatatgcacacacacacatgtacacacacgtacacacacacacacacacacaaactcccaactccctccatctcctagctgtggtcatgtccaggcctcttatccagctcctctccttattcacagttgaagactgtgaataagcctccaacttagtgacctataatgaatgaacaagcaaacaaattggaatagaccaccagggaaaggtggcatgtgttatttatgctcaacctgaggtccctatggtcttcttttggctagaatggagcagtcacttatgctacaactgataaggcaagcaaagaatctgaagttctgaattgtttccctatgaataatgcataactctcccttgaatgctcactatgacttaagtcttatgaaaccccctctttttcattatactactttggcacttaatgcattgtctttttctggtttgcttatctaattttcctcttctagactgtaaactttctgaaggaagggctcatgtctcatttaccagtaattaagcactgtttagatgctcaatagagtgttcaatgaccaagtcagtgaatgagcacccatttcctggtgaactataagagattgtccctttgatgctgaatggatgcaagtcagtgtttaagttcaacggttctacgacctgactgtttttgagaaatacatggaaaattatgaaaatacagatatgcaggctccactcctgagattctgtttcagtacgttttggatcaatcttctttaacaaacagcccagttgattctgatgcagacagtccagggacaacatgttacaaacttatttgggttttttgttctaggagtttgaggcttggttaacctctgaagtttaatatctcaatttttttttcctacaaaccagttgtaaaatgactgattgggttcctctgaaggaggtcataaaaatgacttgggaaaatcaaataatttttactgacaattcctaggtgaccaacacttagttgtataaattattatgtactatattattatatactaatagtataataataataatattattattattattattatactattaggataatgtcctccaagaagtaataatggcattagtgtaattgcatcttagtattacctggatcatctggactgggtcagttacttcctgcccacagaaaggcacatctgctctctgaaccaggagtgcaaggtggagacccccttgcccgaagtgatgtgccagagcctctttgacttcctgtttcacatacttcttgctcagcctgctgtgtggataacctggagtgtccaacacctggacctgcagggctacctctagcccacctcgacgcatgaagctgtggaggtgacaactgcggcccaggctacaacatgtggtcacagaacagggagcaaagctgctgtgaaagtctgtgcttcccagcagaatgtttccagcagaactttttccactctgagtcatgccaaagagggccaagttgatgatcatcttgttggggtctgtcatggctgtaggaaaacaaaggcatagcacgcataattaggcttctacattcccccaatgtaagttttcttacctggcctggttgcactccaagtacgattttagatttgttttcccttcattcgtagtgactaaagcatggaggaggactgctccactaaagtggagatcccccagtgacagaagggaatgtggaataattgtagtttacaatgagaagggagagagaagtcaaatacagataaggaaggatttaggaaacagaaaaaatcccaaattacatgaagatcataaaaaccatgtttaagagaaatatgttaactcatcaatgtggtaggtgagttggtttaggaaaaggtgttgaagttcctgagctcaggggcaaagctagcagtagtatttaaaagttattcactattggagaagtaagaatagaacagtagaagaaacaacccttcttgctttctaacaacatcccccatcttcccacttcccgacccactgcctgaatacacaagtggtatctgcaaaaaatcatccttcctgatttcctgaatgcttctttcctatgaaatatgaataatgttaaagaagacttctgtttctgcttaccaaatttttttttttacaaccagggaacattggtgaaaatacaaactacttgtaatttctgttataaaataattaataaatcatctctatgttccattagtgtaagtgttggctctttaataaagaaagtaaagcctaacatattgggcagctcagttagaaggggggagaatcttgggagaatctattccatgtacaatacctgtacagtggccgatcctttgtacactgcatgatcccccatagcattttaaggtcattaatcattttcactagatttataagcagagttacttgccaattgctaaaactgcccacgctaccaattcagaaataaagacattttaatattgcatatttattatttttgcctagatcttgtaactttattacacagttttaagtaccgcaggtccttcttgtcctttaatgcccctcactccattatacccacacgctaacgtgaacaccttgaaggagcttcatacctccataaaaagacactcattttgcgggtccctccagttcacaccagctctcccagctcattcagtggtgtcaactgcagtgagatgcagtcaatttctttttactcctaaatcagggtgtaatgtttttagaaaattaattattcaatcccaatccatttgctatatttcgcttaccttttccagtcttgaaaatgctttctccacaaagacgtctctcgccctggcacagttgttctttcatatgaactttcaccttctgatagcgttattgtaccactctgggactgacaccgtatgtattttatttagttaatttattgccagacagcctctttataaatgattagttgtcttcccctaatcagcactgacttttttatgacacttgacagacttgtaattttaataggtacagaaatattctatttttagtatttttttattttgtgcatttcttataagtaacaacttatttatagcataaggaaatgcaatatgggtattaaacagaaattagacattctttagcaatgattacaattttttcatgatctacaattagatcatgacttcacatcagtatttagttcataatacttttcaaatttttaaagataattctttttgctatattcatataataaaaagtattattttatcctaatttatgaaaccactggaatgattatatcagcacatgtagctttcatatcaattaatgatagtatatttaaggaaaggagtaaaattaactataacttgaagtcaaatacattttttcttaaaaacttgagttttattttcttactgaaaactcaaattttattttttctacttcttagtgtattacccatactgatccaaaatactttcttggtgcttttagtagtatggttatagt

SEQ ID NO: 316944 - DNA, 4001 bp, Homo sapiens
gattccatgaatagaatctgaatagcctatgttttagaaagaatggggcagaatgttatggcaatggagggggccagccttcaagatggctggcccaaccctgtcgatgttaaaaaaaacacacccaatatttctacagtgctcttctaacgtattttctttatttcaggtcacaagtctagggttttcatgggtcatgtagcaagtggtttataaacaaaatcagagtctataatagtgtcattatattaagaggcagaactgctatatgctttcattatgtaaaatgtttacatcttgggactccatagctggtattattatggcacacccgagatatatcttgctccaattagcattaccatgctactcactataaaaaatcccaaaggcagactagagaagatagaaggatcaccaccttcaggagactgactggtaacccaacccattgacttcattacggctttcttccatgtggcataacgaatttcactttctgtggcctggatctgtggttcaaatcgttccatcctgagaactgacaaagcctggggttcaaggctccaaacgcttactccctctgcagcccctgctgccatggcagctcctagtgcagttgtttcaggcataaagggttttattactggaatatgaagaatatctgcttgtagctgcataagaactttgttgttggtcattcctccatctacctgcaaatgacgaagtggaattccacagtcacggttcatggcttccaaaatctctcgggtttggaaacaaacagcttctaatgcagcaaaagcaatatgacatttattggtaaactgagtgaggccacagagtatccctcttgcactgggctcccaataaggtgcatataaccctgaaaaggctgggacaaagtaacagccataagaagttcctacttctttagcaagtctttcaatgtctcctgaggtctctataattccaagattgtctcttagccaacgaataacagcacctgctatagcaacagaaccttccagtgcataatatgctggcttctctctgcctagtttgtaagctactgtggtcaaaaggccatgttcagaaaacacacatttacgacccgtattacacagtaagaagcaacctgttccataggtgtttttggcttgtccctcctggaagcacatttgtcctactaatgcagcacattggtcccccaaacacccagatattggcacaccttccagggctccagttttaattaggccatagatctcagaagaactgaagacatttggaagaaggtccattggaatttcaaaaaagtcacagagctctttatcccattccaaagaatggatattaaaaagcattgtcctacttgcatttgttacatctgtacaatgcacgcctccattaactcctcctgtcaaactccagataagccatgaatcaatggtaccaaaaagagctctaccttcttcaacagccttttggacgtttctcacattgtcaagcatccaacgaagttttactgcactgaagtaagtgctgagtggaaggcctgtcttagacttgacgaagttactatttcctggaatttttttactaagatcctcaacagtagtctgggttcttagatcaagccacaccacagcattgtagagaggctctcctgttaacttgtcccagattacagtggtttccctctgattgctgacaccaacagcttttatgttggatatatcaatattcagttcgtcaagtttctcacacgttctcgctatacactcgtagacagactgaagaatttctttagggtcttgttccacccatccttcttttgggaactcttgtgttaattccactttgtgatgactaagtagttccgctgtttttgaattgaaaaccagaaagcgagtggagttggtgccctggaccaccgctcccaccaacggccccacagctgctgtctttggggctgccatgacaccagtaggtcggctcagcagctctgggaccgtttcccaggccacggcggtgttgggggcagggagcgcagccagtcaggagcacaaggcgcaggcgcaaggcaacctttgccctttaactggcgcggcgccttctcaccccacccctccagcccaggcttcacctccagccactcagttgtcttctaagatttaatttttttttttaaatcatatatttatccatgtaattacagttaccggcgttcactcttttgtgtggatctatatctctacgttatcattttccttcttaatagtgcaggtctgctggagatgaattcttccaaatttgaacatctgaaatatatttcatagtaatattcaaaggtattttctcggggtatagaattctatttgacatattttttctttttaagtttcaggaccttggagctgttgctctaccatcgtctctcttgctgtttcaggtggaactttgctattatttttaacatgtctatttttctctatctttagggttttgctctttatcagtggttttgcccagttttatcatgaagtgtcttggaatagttttcttattttctttgcttggggtttactgagctacttgaatctgtaggtttacaggtttcatcgactttgaaaagctttgggcccattatttcttcaaatgtgttttattctgtctcttctatcccttagggactccattgatgccctactcattataattaccttttctccttgtccttgatttcagatagtttctgttgctctctcttcaagttcactaatcttttcttctccaatgtctgctctgctattaattcatccagtacatttttcacctcacatattgtagtgttcatccctagaagctcaatttgggttttttaatatctacttaactttctgaacacatggaatacagttagaataacttttaatttcattttctgcaattctaacctctgtgtcagttctggttcggttttgattgattgcttatctcctcattatggcttgtatttcctgtttctttgcatgcctgataagttttaattagatgccaaacattgtgacttttacctgactgggtgcttgatatttttgtatccctataaatggtcttgagttttgttttgggatgcagataaattacttggaaacagttcaattcttttgcgtctgcttttaagatttcttagatggcacaaggatagtactcagtctggggctaattcttcctctttactgtgaagagatctttctatgtactctacccaacacccctgacaaatgaggctgtttggaacagtaattcctcccagccctgagtgaccactggatactgttatctctagtctttccaggtgcatctttcgttagcctcagtagttttctcctatacatgcactgatcaatacccaactgaatactcactgggggaccctctaaagctctctggagttctctctctatgcaactcttttttctccagtgctatgcctggcagagtctagcttctttggtttctctaggctctcagcctaatctccttgccataggtttccactgagtttcaattgggttccctgtctgtgctgttgcttcaaaactctctcaagaaactaagctggggaaatcatagtagtcatgtcacttgtttttaatctcttagaaattactgcctttcattccgtgatatccagcattttgtgaactgttgttttatattttgcacattatgtgaactatttcatctattttttccatttttgattgttttagatgaaaaggtaactccaatcctttttactacatcttggccagagtggaattccactaaatggaaacttaaattttcagattaactatagagtcggtgaataaagacttatttaatcattaattaaaatatattgaatatgcagtcaatgaatggcaattttttgtattagggcataggctacatttctgaattagctcaaggataaggcccatttgtgt

SEQ ID NO: 316945 - DNA, 4001 bp, Homo sapiens
ttaacctcattgaccaaaacattttagtttctgactttagcttcctaaatctaagtatctatcaactaagctaatctgatttctttgaaaaaaatgtattttaccatctaagccattaagaaatatagagaaataatcaatttatattttaacattaagtttgtactcctttacataataatttcagaaatataaaagctccatatacttggctttaattattacaaatcaaatttctgacaataataaagtcacaaaaattactagatcatatcaagatgatttttattgaaaatactttggttaaaaatagttcaacttcttattttgggaaaaaatcaataatttcagaaataataaccatcacagtttctattatatataggcaaatgaaaataatataactttctataaggtagtttgagatacactattggtttttataaggtagcccaaagatgaaaaatcgacatagcaataaagaatatttaaatacttcaagtagaaatcagtatgcatataacttagttactctagttattggacttcaatcctcctttgaaaaccttgcaagccataaaaatggaaatcctatggtaattaattgtaacagtaaaattaaatttatattggtgggtcaaaattctatatgagcagtaccttatttttacacattcattaagaacggggtaaaattatctgatcctttgtctagctctcttatactctttaaattatttttttaagcctaccaaatatgacaggatcatgataagaaaatgacatgtcatagaacaatttcatagtttaatggctttgttataatattactttactcaagaagattattcctgacatagaacatatctaataatctatttatgattttgccttcatgtattacctgagctaggtcattagaaaatagtacttgcaaggcccttattttgattcatttaacttaacctctgaatatagcaacaacatttggagtttctctcatcagtaaatgactatggtctgtatttctgcattaaaaaaagtaatgtctcgtttctaaatactaaatgttttgtaactttcaaaaaaagagtaacacccaaattatataattcacttagaaaacgggaactttaaaagcaatttgagaaggaaaacgtaggcttttaaaataatttttttttctcagctgcaaataacgcaagatgccagttactaaaatgcactaatcaatgaaaaagcaaatgagtaggtctcagtagatagactgctaaataatttagacagaaaacaatacgattaaattgattgtttcaacaagtcaatatagaattgcaaatttcccggtctcatcaataacaagtggttgcaacgtaatgcacaggcttaatgagttctccgactgttaaatccaagcgaactcacctgagtaacagtgctgcttcccagaagtaaaatcccgaaactaatgtccgaaagtgtctcacgtgggccatgatacggagagatattcacgatcctgaaaatagtcttatccaaggcatggggaaccagaaagacagaatgaaaatgtacaatctaaccccgcatggtgttggtgtagactgatgcttgggaagcttcagcaccttagacagctccccgcagtatgcggaccccttctcagcattgagcagaagtggagagtcacagtgttataaatgtgcaggtgatttttacagtgaaattacaaaaatgagtgagatgaaatgtctgaagtgcctaggtgctgggcaacagttctctaaagctccagcagcaaaggaagaatgttcgttcttccctgactgagacccaggattggaggaagaagagcagcaacagccggaaagaggacgcctctccacctgctccaagcgccgcccgccggaatccagctctccaccttgggttaaaacccgagacccggagcgcggcaaagggaagcgggggtggggccggacaacccggtcctgtcgaccaatcacgaccgcacagcgggacggagtgacaggccacttacgacggtaggcggggcttagcgcttcaccctttaacaaaacccaaacaaaccaaacggcgactggagcgaggtgggcggaaaaagccacctgggaaagtcagcggttttgtggattaggtagtgtaaccccgcaggagggaccctttagtattcccttccgggaaaaggcacactttaggtcttctcggatgtgacactgtctgttacactctacaccgaaatacaagagtcagcagtaaacccagaccctggcggagggctggggaagagaagacaatgtggtgcgtgaacgcccgtggaacggaagaaccagctgcttctagaatcctctcaagcctggccagcttctggccaggaagcgttgttgactggatttaagttgggtttccttaagtaatagtaagggttctaaaaagatgaaggtgtgaagtctaaagagatggctgctagagacgcaaggcttcccaccattttttttttttttggtctttcccgttttacatcttcacagtaagtttaagtgagaagaacagctagatcacatggtactataaggtccatcttttctccgtcatgtcagctttctgtccttctctttctctattcttttccccctctccttctctgtccctgttttcctcccctcccacatttatttactttgggttttggatggaagactggaaaagaaaagtgtgtgtgtgtgtgtgtgtgtgtgtgtgtgtgtgttgtgttgtttatgtatttcaaagtaatagaagttttttaaaaattaaaacttctttgatctttatagtggctcttatttactatcagccatgatcaaatgttcattccttgaatcttagattttccccaaaacttcctcagatatttattctgaaatccctactttcatctcttaacttagtctaatgacatgtcaaaaatgattcctcatcttgacacgttggttattcctgaaattctctgtttaactggaaagcataagtcaccaccttccaaccctctcatatgaaaaatctctctctctacactttagtaaaaaagttttatttacattcagtgacaataaagagtttcctggatttatttctagatgtttttattatacttgtctcttttcacatagtggttttctgatttaaatcataaactgccagaagtttcataagggacaccattgattctgcccaggaatatttgtacctggagaagattcataccatttttatcaacttaattattcacgatgaatcttttgaaatctcactaagcacaaaagctttttagttggcgattctttgaatagcagtaataattgtttaaaaacgtacgcattaaaaaacttcaaaactttatttcaagaatacgtggattccttgctctgcttaaccactgactgggtactttgagaaaaggtatcctctttaaaaaatatctttatatatatatatatatttaaagtatatttattgagaaaattagattaaatgatcttgcagatttattctctggcttgatggagacaatgtatgtttaagtcagtaaattaatagataatattaaaactctctttagagtaatctggaaaattaaattacacaatggcttaaaagccaggataattttaactatttcaacttgtagttaacataaaacatagaaatatactttataaaattagtacggatatgaaattagtatggatctaatcctttttaaatataaagttcatatgaaagaatggctggaatcctcgtaatactcatttttcataacaccataattattgtcttcaaattacttgtcactctttgttatcatcctcctcatttatttgtttgactttttcactagagtgaggacaatggccactatttagcacaacacttagcatataatagatactcagtattcgttgggtgcattaattatcacattggaaacacaatatgta

SEQ ID NO: 316946 - DNA, 4001 bp, Homo sapiens
tttttccccttccctttctttgaagacttttccttagaataggcttcttccacccacaaggaaattaaaattaaaaaggcagttgtcaataaaaacttcatcttgaaaacttgaatttcagaagatcgatctacaagagagaacaagaaaatgtttacatttatgaagaaaatgataactatatgactgtccctttaaagagtataagcattactacccaaagggcaagtacatttgtacatcaaatcctcattgctcagtcctatgtggtaatacttcacaacatatttagtattttttatatagtagttgtaaagtcttttttatatagcagtaaaagtcagtttaaataatggcacatagaaaacaagaccgccaacgagatataataggttactgtataaaatttctgattctatagctacacaaaattataaattgatattgaattgcacagtatatcaaaaatatgttcagaaagatatctggaagcatggtttaacacagcgttaaaatgattatcttcggctagtactttggaagtatctttttctttttaaatttttatattgtttgaagttcttatgtatattttttcaaaaataatgtattttaaagaaaaagaaattctaagtattaaaaaagacagataaaagaaaaagttaatatcaaagagttccacattcaaaattcattgctttttttatttaaacacattacattggcaagctacctttttgccccaaaaaggtgcctcttaagttagctttaaagctttcttacttatttgctactaacatttgtcatcaaaaagattacttcagaaattctacaacaagaaataaaacaagtgttgttacatttttttcaaattatcgtcctagccatattttaataacattttcatgctcaaatcagaaccatattcttgccagagattctgataaataaaaaataattaagcctctacctacactagagaagttcaaactcttctgcaaccttcatttccaaaccataaattgtttctctttcattgttttccgcagagtaaaagacctgtcatattcttcaacgctaacttaattcccatctcaccctcagaaatttgcttctccttatgtcatgtttttcatcttccccccccccccccaggattcttccccccatatttatcttttacacacactccaggcaagccagaggggcttctccctgggtactttaaattgaagacaacagagggggctcatcagaccaacagcaacaacacaaggttctcctctggcaacttcacaacattggacgctcccttcccccatccgacagcggcacctgcttccagacaccttgcccacagcagcaggtacttctcccactttcacatccttgcccccgcaaaaaggagggccgagcccccctaacgcttcgaaaaacagagaaattcaccactctgctctgtcctcacccccaatctttcaagggggacagctgcattgactggaggatcctcataaacaaaacaacgcaaggagccctcctggccaaccttgcgtttcctaattaccccggccctctgcatctctccacccggagcgtctccgcgggcgccaccgcagcggggacccggctgccgctgccaggcgccccgcgcccctctcccgcgcagggcagcgcgcgtcctcccgggcacgccgcagtgctcctcgcgctccgccgccccgggcttgacccgctgtttccgcaaaggcgtctattcccgtcctcagaccaccgtcgccgccccaacccgcgtcccctcctcctaagtggagctcctggcacttacccggaggcgcccctgcccacaatcgccgggcgagatcgtggaggctccgggcccaggtggcagtggctgctaagggtgcagcgggcgccgagcgggggcagctgcgtcccagccgcccgcgccaccgccgagctcggctgacgcgcctgctcgggccgcggagcctgcgccgtggcgcgccgcggtcggggccgcagcggggacagcgcgggccgcgggggaacctggcgaccgcgggcgggggagggaagaggtgtcccgacagagcaacgtcacggcatcgtccccttcaggcattggaggggttaccgagcagaaatgtgtacccccctcactccttaggggactaaaggagttggggacgaagggcgggaatgatagtgtcggtacaaaaagaaaaaacctttcaaggagctgggattgcttggggtcagcttttgaccactagcaacaaacaacagagcaacaaatgaccttcttgggtcaaagcgaacaaaacacattttctgtcatttcaccatttgcctggaacccagacatccagcttaatctccgggtcttccaatttctaaaagcctgaactttctgagcaagcttaaattggtcaaaattactgacaatatagtcatacaggtaatactatgtttaacatctgttacataattaacatgtgtacagaacttgacagttgcaaaacacctttcactcgccttatctcatgtggccctcaccacattcctgggcaagttttgtcatccccttctgtagatgaagaatctgaaactcagttatattaagagatttacttagagttacagatcttgaaagaaatttaccagagattcaaaattagtgatttttgcatatctgaaccagacagggtctctgccttataagagcaaaatactgttgtcctcatccttgtgaagaagtagcccttacttggatatgcagcccttagataacagataaggctatcctattacctcttgaatgtatgcctgattgattttttttaattgttattttttaagcaacaggagctcactttgttgcccaggctggagtgcagaggcacagtcatcgctcaccgcagtcttgaacttctgggcaatcaagagatcctcttgtctcggtctccctagtagagtagctggaacaacagacaggccattgcgctccactaattattattattattttttaagagacagcatctctggctttgttgtccaggatggtctccaactctggcctgaagccatccgcctgccttagcctcccaagctggggggcttacaggcttgagccaccccaccccactgcaccaggtcctgatggattttttttattaaaaaagcattgtctcaagtgagcatcacttagcattgtattgtggacccacagatgtatccactaataaatttttccacccgcagcatatggagggaaggaatatttcctgcatataaccgtgttccataagcttcatgagatattctgctgcctaagagtagtgatcattaataagtgatcattaccttatttacattacaaaatgatcattattcaaagagctgtactgtttgaagacccccccgccaaagtggatcaggatataactttggattttaatgctttattagagagaactatattgataatatacgtttcataagatataacttttggtgaataggtcatatgaagaatgataaaggaattagttttcatgcagccaggggagtttagaagttggcgaaaaccttacacttagttttcaattaatcaagaaattattaagagtttagaataataggaattccgattcctgtaataaaatgaacatcttttatttacaaactctaatgtccacatttggaagaactatgctgaaaatacctacaacagacttgctcaccttccctagtattgtttctgtgccatccatggatgttatattggagaattaggttattcagaagaaaagcaagtccagcaggttggatgggtttgtagggttttggcccaaaggttaagaaatatagttgatgccctaaaagcacttcttctagcctgtaaaatggtcaagttcagaattctgaaaatttttttctatgaaagtgatctgcttacctatatttctataacttttatatcatagtgtgaaaag

SEQ ID NO: 316947 - DNA, 4001 bp, Homo sapiens
tgtaaacagtgtataaaaattatataaacccatggcatgatttaaaaaaagaaaactataaaaccaccttgaacattgggaattaattcttacattctaaacctctcctcaccctatcattttctgtctctgtaacagatggatatacattccgatatgaaaagttttgttgatgtgtgtcttcataaaccaccttacttttataaaacacgcaataacatttctccatataagaatataagacatgaagaacatacgatgggcatagatactgcttctttttccccttccctttctttgaagacttttccttagaataggcttcttccacccacaaggaaattaaaattaaaaaggcagttgtcaataaaaacttcatcttgaaaacttgaatttcagaagatcgatctacaagagagaacaagaaaatgtttacatttatgaagaaaatgataactatatgactgtccctttaaagagtataagcattactacccaaagggcaagtacatttgtacatcaaatcctcattgctcagtcctatgtggtaatacttcacaacatatttagtattttttatatagtagttgtaaagtcttttttatatagcagtaaaagtcagtttaaataatggcacatagaaaacaagaccgccaacgagatataataggttactgtataaaatttctgattctatagctacacaaaattataaattgatattgaattgcacagtatatcaaaaatatgttcagaaagatatctggaagcatggtttaacacagcgttaaaatgattatcttcggctagtactttggaagtatctttttctttttaaatttttatattgtttgaagttcttatgtatattttttcaaaaataatgtattttaaagaaaaagaaattctaagtattaaaaaagacagataaaagaaaaagttaatatcaaagagttccacattcaaaattcattgctttttttatttaaacacattacattggcaagctacctttttgccccaaaaaggtgcctcttaagttagctttaaagctttcttacttatttgctactaacatttgtcatcaaaaagattacttcagaaattctacaacaagaaataaaacaagtgttgttacatttttttcaaattatcgtcctagccatattttaataacattttcatgctcaaatcagaaccatattcttgccagagattctgataaataaaaaataattaagcctctacctacactagagaagttcaaactcttctgcaaccttcatttccaaaccataaattgtttctctttcattgttttccgcagagtaaaagacctgtcatattcttcaacgctaacttaattcccatctcaccctcagaaatttgcttctccttatgtcatgtttttcatcttccccccccccccccaggattcttccccccatatttatcttttacacacactccaggcaagccagaggggcttctccctgggtactttaaattgaagacaacagagggggctcatcagaccaacagcaacaacacaaggttctcctctggcaacttcacaacattggacgctcccttcccccatccgacagcggcacctgcttccagacaccttgcccacagcagcaggtacttctcccactttcacatccttgcccccgcaaaaaggagggccgagcccccctaacgcttcgaaaaacagagaaattcaccactctgctctgtcctcacccccaatctttcaagggggacagctgcattgactggaggatcctcataaacaaaacaacgcaaggagccctcctggccaaccttgcgtttcctaattaccccggccctctgcatctctccacccggagcgtctccgcgggcgccaccgcagcggggacccggctgccgctgccaggcgccccgcgcccctctcccgcgcagggcagcgcgcgtcctcccgggcacgccgcagtgctcctcgcgctccgccgccccgggcttgacccgctgtttccgcaaaggcgtctattcccgtcctcagaccaccgtcgccgccccaacccgcgtcccctcctcctaagtggagctcctggcacttacccggaggcgcccctgcccacaatcgccgggcgagatcgtggaggctccgggcccaggtggcagtggctgctaagggtgcagcgggcgccgagcgggggcagctgcgtcccagccgcccgcgccaccgccgagctcggctgacgcgcctgctcgggccgcggagcctgcgccgtggcgcgccgcggtcggggccgcagcggggacagcgcgggccgcgggggaacctggcgaccgcgggcgggggagggaagaggtgtcccgacagagcaacgtcacggcatcgtccccttcaggcattggaggggttaccgagcagaaatgtgtacccccctcactccttaggggactaaaggagttggggacgaagggcgggaatgatagtgtcggtacaaaaagaaaaaacctttcaaggagctgggattgcttggggtcagcttttgaccactagcaacaaacaacagagcaacaaatgaccttcttgggtcaaagcgaacaaaacacattttctgtcatttcaccatttgcctggaacccagacatccagcttaatctccgggtcttccaatttctaaaagcctgaactttctgagcaagcttaaattggtcaaaattactgacaatatagtcatacaggtaatactatgtttaacatctgttacataattaacatgtgtacagaacttgacagttgcaaaacacctttcactcgccttatctcatgtggccctcaccacattcctgggcaagttttgtcatccccttctgtagatgaagaatctgaaactcagttatattaagagatttacttagagttacagatcttgaaagaaatttaccagagattcaaaattagtgatttttgcatatctgaaccagacagggtctctgccttataagagcaaaatactgttgtcctcatccttgtgaagaagtagcccttacttggatatgcagcccttagataacagataaggctatcctattacctcttgaatgtatgcctgattgattttttttaattgttattttttaagcaacaggagctcactttgttgcccaggctggagtgcagaggcacagtcatcgctcaccgcagtcttgaacttctgggcaatcaagagatcctcttgtctcggtctccctagtagagtagctggaacaacagacaggccattgcgctccactaattattattattattttttaagagacagcatctctggctttgttgtccaggatggtctccaactctggcctgaagccatccgcctgccttagcctcccaagctggggggcttacaggcttgagccaccccaccccactgcaccaggtcctgatggattttttttattaaaaaagcattgtctcaagtgagcatcacttagcattgtattgtggacccacagatgtatccactaataaatttttccacccgcagcatatggagggaaggaatatttcctgcatataaccgtgttccataagcttcatgagatattctgctgcctaagagtagtgatcattaataagtgatcattaccttatttacattacaaaatgatcattattcaaagagctgtactgtttgaagacccccccgccaaagtggatcaggatataactttggattttaatgctttattagagagaactatattgataatatacgtttcataagatataacttttggtgaataggtcatatgaagaatgataaaggaattagttttcatgcagccaggggagtttagaagttggcgaaaaccttacacttagttttcaattaatcaagaaattattaagagtttagaataataggaattccgattcctgtaataaaatgaacatcttttatttacaaactctaatgtccacatttggaagaactatgctg

SEQ ID NO: 316948 - DNA, 4001 bp, Homo sapiens
gagttttgtacccacacactttacatagagtaataagtcaaattttctaaattaatgagattaaaaggtcttattaaaataaatgtatggaatctaaatgtctttaagaaggtaacagtttcgaattctgacacaacaacaaaaaatcatggtcaccatgatctagaattctggcccgataacaattatttatttacagaaaataaattacatagtaagtcataaattcagtccaacaactggactcagcctccacttaaatataatccataatctaatgtcaaaaacaattttagagttaaaccaaagaatcagaaagaattattggctgtaatgaacatcaaaagatatatttacttctaacaagaatatatggccagctgattgttaataaaacggaaaaaaaataaggtaaggaggacgagaagcattagagctttccaatgtcttctgcatcctgggcatgttatttttctcagttcaacacacgtttgaagacctattatattctaagcactatgctaggttctgtagacacaaaaatgattaactctattgtcaaagggcttagaatcacttgtctctgaggttgaaagcattattctcactcttcatatacagaaaactgcaactacgagaagtttattgctgacgttaaaaagtggcccggggagctggctttaaaactaagtgtttctgactcaaagagacattagccaaagatgtcttaccggttgagaatcacttacgatgctagttaaaaatacagattctcaggtccctctccctagacacagtgtttcaaaagatctgaaatgaagtccaaggaatctctgcttttgcaaattatcacaggggatattcataatcaggtgaaatttgttaagaacaccacacatctcactgaaacgaagtttaagcaagtctctcagaccaaggtacaggcaactttttgttttcttaaactctctggagggcgcagagtcacctccaaaagtcccaaatgaatcccttcacccagagcaaagaagaatttcttcaccacatttaagtttttaagatttgacttttccagtttttgccaatcctcagagatccaaactattgtcgccttatgcaattctctggcatcacaagacagcatcaaaaaacaacagagcaccaccctttccctcgtcttccttcaggtgctgattcattttggatgtgcatcgctaggaaaaagggctgctgaatataaatcgcaaaacttcaatggtggatgacaacttctacacccgtgaagttacacagctagttaatggcggggccaagaccagaatctacacttgcagaacctctgctctgagcttttccctactcaacctgacctgtcctgaaagcgtaagggtggcctggccgcgcgtgtgggaccgacccgaggagggacgagagacagcaaagaaggctgtggttcctgcccgggaggcgggggctgcagattcccctcagctgcgcgtttgcctggccctcacttggcaaaggacagcgaatgcaaatgaggatgactgttaggaatttttaacgagtgtagagagaggtgtcaagaagaagccgcgagagaggagagggcagggacgccttctcccgtaggcacaaatccggagaggacaaccaggtccgcgagtggcaatacgggagaccccacgcgcccccagcctcgaggttcctgagcacccattccgccccggcccggcgtcccagtctcagcacaaaggccgcacagggcgaagttgccgtcgggtcccccgacccgagtccccttcttggcgcccccgccgcaccccccgctaaacttaccggcagacccaatggttcttcgatgctggaacagcgggaacaagcaacacccaaccacccgagagcgaccccagctgaccagtggagcgcgaatcccacggacccggatgcagataaaggcgcaggaaggaaccgcggcgtggctggcgggcgctgcgcatgcgcaccgcctttaggacgcctgaggtgagacgcgaggagttcggtccgagtgcggtgcggctgggcgctcttcttgcctggaagatcgcagtttctgggtcatcactttacgctactttcccctcccccccatctttcaaagagggatttgcagtagattctttaggcttatgagatttagtatgtaagaccgtagtgctcacacgtactttgttgcttatgttgctgtttggcaacatgaatatatttgccatttatgaatacatttctctctctactccaagctattgaatgcatatttgcaaacgcaatgacagataagcgtcttgtgtcaaaaaactcatcaaagtttgcaaaagggcaaacagtaccatgggaaatcgggagcgtctcagtaagagaaaacactatataatagggtactggcttttgctgaatgagtctaagaaagggataggggaagctggaatcagctttgagctgggtatcacagatgtttatacaggagtgggaaggaattgggctgtggaaattattgtaaagaaagcagctatcattcaaaaggagaaaagtgtgttgtgtcttcaccatgttccatcaggaacactgttccattaataacaccgtttagggttctgttaggaacaatacaatcttgactcctagccaacttaaggttctgtttctgtggaaactacaagttaaaaaaatgtaaaacgctgtgtcctcaaactcgttatatgaagtttttcacctgggttgtaaatccagcctgcttctttgaatgtaatgactcctcttgcatcctttagtgaagagtaggatgttacattctcgttgatttagcttcaaacagcaacattgctcacatactgataatagacaggtttattagtactatcgccttcagtaagtttgcaaaagcgatttttggccagattcggtgactcacgcctgtaatcccagcactttcagaggtcatggtgcatggatggcttgaacccaggagttggagaccagcctgggcaacatagcaagaccctgtctctccaaaaaagattgaggtaaaatgatgaagtagtttgtaggctatgcatagaatttaggctttgtattgtaggcaatagggagtcacttaagctttatgaattgaagataagagactagaacatacgtgttttagaaagaatgctgtagaaaggtggagactgaattacagtcttgaattacagatatgtgccacataaggaagtttaggtaaagaatggactggatatttggcaatggtcccataagattataacagaactgaaaaattcctatcacctagcgacattgtagtaaacgtaaagttgtagagcaacaccactcgtgtttgtggctacataggtgtaaacctactgtgcttccagtctcataaaagtctagcacatacaattatgtacaggatataatacttgataataaatgactatgttactggtatatgtatttgctatattatactctttatcattattttagagtgtattcattctatttctatttttatttttatttatttgtttatttttttgagacagagtctcgcactgtcacccaggctggagtgcaatggcacaatcttggctcactgcaacctctgcctcctgagttcaagcaattctcctgcctcagcctcctgagtagctgggattacaggcagctgccaccacgcccgtctaattttgttttatttttagtagagacggggtttcacttattagccacgctggtctcgaactcctgacctcgtgatctgcctgcctcggcctcccaaagtgctgggattataggcgtgagccaccatgcttggccctatttatatttttaaaagttaactataaaacagcctcaaggaggtctttcaggaggtattccagaagaaggcattgttattatagatgagagctccatgtgcattattgccctgatgaacttccagtgggataagatgtgaa

SEQ ID NO: 316949 - DNA, 4001 bp, Homo sapiens
cagatgttttaagagcagcttcattcttgagagctttttccctttctctttcttctgtgtccacttctgaagtttcaacaagaaagaagcattaaaggtcgcagagagcagaaaaaggaagaaagtaaccgtcactcggatctttccagacaaggtcagagtggggaggttgccctgcatcagtgggatgctgttgttgatggctgaacagtgattttgattctgttcaggagaggcactgtttgccatattttcccaggacagagcttcaagccttgtgtctctggtgcatctgatattttattgtaaccgaatctaaagtcctgttttatttctgccttctttagatggaaacgtcacaggtttagacgtatgtcaaattttgtccctgagatacttaatgtgaaagatcaaggttaacttgttttgtgtattggtaatccaacagagtgctaaaacagagcaggccaaatgcattctgagggccacatgtaactgtagcacctcagcagatggtctggctttcacaacactcttcctaagtgaagaaggatagtcacagcctaattttgaatttaaaagtcagtcatgatattatgatttaaataactttaaaaaatttttctaaaaactatttagtgttagtgttctgtccaacatacagatgtataatgataatgaagaaaaatgaaaacaactagatccaattaaaatccattgtcttaaggaattaacacatttctcaaaaacatttctttgttttccttttcaaacacactgttgagcactcgaacactggacaaatatattcacttaaaattattctacaacaaattaaaactttaaattagaatcaatccaactgactgcattcaaatttattaatcaatcttactgatccaatccatgcttaagttagagtaaaacggttaatcagtttttaaattattgccttggtttttataattatctaaatattgtagttgctgttattacacattaatgcataaggaaactagttattgaagagaatactgtgtaactgctgtaagtgcatttatatgtgtttatgttagtataatatgaatatgttcttttataggttatctgatcatttcaaattgggaccacttaggaactttttctgtgttgtttctttaactttcatggtgagtgctggatagttattcatcaatactggtaagacttacattggaatttattaaatcaccagcttgatttgtctaatgccaacaagtttgcttctgcagcagccaaagcaggtacaatgttaaggataaaagtggctattttgacttagatggtgcattcttattggttcatttattatacttgtttattctgtcttaaatatttatttatttaataaatagttactaaatatttactatatacattatcttagcctttgctggtgataaaaagtgaacacaacatcatccagcccctttaaggagcttgttaccacagaaggttagataaatgttttagatatatcttatgtatctcctcagcttctctgtgtactggctgtctcctgaatcttgagcagcttagaccagtcctgtacctgagctcctttttgactgtcactatatgtccagaattaccagcttctctcactacttccagacttgaaatatttatatcctctatttatatagagtatcaaggaaagagattttctcacacctgagatttgtgaccataaaatttttacctacgtcaaaactaagttctgactcatctaggagaattacaaaaaaaaaattgtgcctactatattagctataataagttccttataagcaatcagtcttgaataagataatttatttttctgaagaactcaaaaggctttgcatatacatcatgtcagttaatctgatcagggccatatgcctgaaatgaacaaaacaggataaccattggaaagacatacaaatatgaaaagtgtttgtaagtggaccagcaaccaaaaaacaaaggaaagaacatttatgtaaaaatccaattttagtgaagtatattttgctctttgtcttctatatctaggggaaaaagattagagcatatcattcattatttgtcccttttcctcccattccttcccttccccttccttcccttcccttcccttccccttcccttccccttcccttccccttccttcccttttcctcctttcattcctctcttcctccctccctccctccctttctttgttaatgatggactgattcattagggaagaggttgcaaccgagctgaatgggactacagcatatagcgtaataagtggctggggaatggggtatgaggacagggagggcatgcttagaagctggagcagcacatgcaaacacgaagacaatgtgagaaagttcaaagggtatgtgaaagcaaaagtgtaaataattaggcagacttcagatctggagagcctatattccaagaaaaggagtttaggctttacctatataaagaatggagtaatatactcctttctttatatatacttagtgtattgtgtagcatacagagaatgccttgaagggatttgggaaatagtgggcaatcaaaattcagggaggttaatctatttggaaaacccttgctatcaacacaacatgaaaggtataaagccctcaagtgcagggtgtggctatgaaagtcggtagaggaagtagagggcgaatgatgtttgacgcatttgaggagctctaagttgttgaatctaagttgttggatgagtcaactatatagattttgaaggtgctgtcaatactgataatattactcatagttaatatttattgggtacttactttgtgtcgagcacttttctaagcatgttacacgtattaacacatttagaccttacaacaaccctagaagtcagtactattattttcgtcttatggttgaggaaggtgaagcagagacatttacatacctgatccatattagagtttgtcatgggggagcggtggctatctaggcccgaggtgcagggacaaaagggtttaccgttgtaggtaaaagaaaggcaaatttgttagagaagggaggaaaatacgttgccagggagacaatgggcaggatcagcggaagggaagctgactgcaaagaaacaaaggcttgctggagattttataggatagtgtttatgctgtatgctgaagagggctttgtgcagtactgataatgccaaggttgcagtgagctaacttgcaggtgtctggtgatagttgggcataggaagattgagagttatttgcacaggagggctatgtgtccttgtagcttatctgctttttctttttgctttcccctgctcccaccagcctgactccttttccctaattaggacaccacagaattgtgttacatctcatgcagtctgccttcagagctcctgtctttaactactatgcaatgctactttctggtagcagttggggtggaaaggtctatgagccaggtgccatagtccttagtgaatgaagggccgtgttaacaggcccttttagttgcaggaaagggagactgttttagataatggagttatctttcatgatacacaagacctagaaagccaacaggagcccaggcagctctaaggatgagcaactcctgctgattcatcacctgagttggttttcaattatagtatcttttttttcttcatagtgtttttcccatcatcttcttgaacctaactagccagtttttttttttttttttttgaattacaagtccaacttctgaagggaaagagtgatgatggtttagaagtgacccaggggagcaagaaatatttttcatacctctttactcatgagaataaaataatagaggaaggcagctctttcaaataagaagaatgtgtatgaaaatgtatttgggaaaaaattttgtttcctgtaaggagagaagatggaagtagcacaatatcagaaaaaaaagaattttttttt

SEQ ID NO: 316950 - DNA, 4001 bp, Homo sapiens
ttttctcctgtgtgagcatagaaacaagagtttataggctcaagtggtcaagtagaacagcaagtgttgggtttaggagaaaaatttaaaatattccggacctgtctttccaatggaacacaacacttaacaaccaaataaaaaaaagagcctgaaatactctctgccacacttgggaaaatgttttatctttcttttttaacctgaaaatactccttccttttcagaaaacatttaaagacagtccttcttaagaccatttccaacactgtttatacaaaggccctaaaaatgggtccttctaagacacttccaggggtcaagcaagaagagactatgaaagtcttgatcacagctaacattcataggcaaaaatgtcctcagctttctcttttttcctttcttccaagttggctactgtctataaactccagaaattagtagtcaaagcatcccctaacccttgagcctgtgggaatacaggaatttcaacccgagcacgtcagtccccaaggcctcctttactcttggagaaatccctcacaacaaaggacaagggagaagcaagggggaggggcgcccagtggacttggctggaagaagtgagcgggctggggttggaagagtaactcgggctgcgggctgaacgcagtcggcaaccgcggaagagcagcatctcccctgcgcctgtggatacgccagtccagggatggcgagtgctttctcctccccagcttctccctcgctcttcgaggtgactcgtgggaccctgcgtcctagtgctgggtgtgaatcggctatttcacacccagttcttcctcccctccgccacacgcagtcacattcctggagctattccaagctgcctccgctaagcaccgaataagcggaccctgcctggaaacttgagcgaagctgaactgcgccgaactccaccgtccagtgacccgagccagtgtggacgcccttttaatcacgctgtttacccaggtggaatttaggaagaatcagccttcagcctcaacctcaaaccttttgtgcaaatgggcacttcgtttggaaagggactagaaattgtccccagtctggccctgcaccagcaccttcctctgctcaaacctgtacaaagtggaagttttaggaagtttccatttctcgtgccccgtttcaacttgctccccaaagagaacatgaaaacgtgggaactcgggaggacagagatctccctgtaatcgcctcgctattcggatcctgggtctcttagtctttctttatttcccaaataccgcccccagcacggtagaccggacccccaggcttgggtcctggggccggcgcagaggatcagcgcccaagcgcagccccccaccctcccgacccactgtaaacagtcgggcaccctccctcgcctccaggtgccaccccatcgccatcgcctctctcccagaaaaaaaagtccggagacaagagggcggggggcgggggacgccaggcgcggggggaacagagctgggaaggacgcagtctgaggccgaggaacattcattttctttctataatgcccattcccgaggccgagcctttgggcgaggtgtacgcgcccgcccgcgcactcacccatggcccgaggtcctgcttctctgcagtccccagaggagagcgagtgaccagacgctgcgcggggccaagttctccaagccgcgctgaggctcctcgcgccctggcaagtgacagcctcgcccctcccagcggagacaactcgcagggcgcctggcgactctgcgggcgcacagacccctccctctttccacctgcctcctctgcgagaagcccgttttcctccccttcactgtgggtctcctccccagaggcccccaccctgccccctttcactttcattagagacacgtgcaaagtctctctcctaaatacattgaatgcacattacagacacacacgttgtctcagcaccccacaaccgactcggtagccaagataatgatctctaagtggagtctggaaatagattattccaaaagacaggtttcatatgataattttatgttcccttgtcttctgtgtaccattttgtttcttaatgataataacattaataaagacaagaggaagagaaaattctccctttaatttatcctttgtcatctcctctttcttctacataaaatatgtttctgtaattggacaaggttataaagttctaaaaaccatacactcaaacacacatgcacacaccctgacatacacacacacacacatcataatatgcagaaatcacctggaaaataaacaattcaatccaagaggcagttgatgaggctgaaagagcacagggcttgacagttgagaggatgagttgtaatcctggctcatttcctaatttgtaaaatgaaggatctggaaaaagtgatctctaaggtctcctcaagctaaaaaaaaaaaaaaaattatataactctatgggttattgacctagttctttcaagagtcatactggagaagttatttcagtaagtcagtccccaaggtgtacacagctttttcatgcaaagcacacccaaaagtatacatatctatgctgtgagcaagtggaagaataaaataaaatggatatgattacttaccttgaggaacattgctatctaatggggaaaaggtgatatgaaaaataaataacaatatttttagcagaatgcatggataaatgcagagcatatcattcaaatgccacataaacatctgcacagctctttctcacgtaatggaagaggtatactcctggcaggggtgtgtaaatgcacttcagttacatgggaatacagttattcttatgggaggggaaaggaagtagtcaacaaaaattaaaagtgttcaacatatcattcagaaatgcatcacccttctagaaattgactaacatgaactgtgactgtagcaaagcataacactaatacatttgttcaataaatataagttgctggctcacacttgtacttctggcacttacagagcctgaggcaggtatatccctgaagctcaggagtttgagatcagcctgggcaacatagtgagacctcgtctctccaaaaaaataaacaaaaaattagcttggtgtggtggtgcacgcctgtagtcccagctacttgggaggctgaggtggaaggatcactttatcctgggaggttaaggctgcagtgagccaagactgcaccactgcacttcagcctggacaacagagtgagaccgtgtctcaaaaaaaaaaaaaaagataagtgatagattttggagattgattcataagctcagttttaggatcaccacaagcaacttacaatctatctcctgaagacttattcaaaataatatttgaattctaaaaattagaactgttttttgtttttttcccatcggattctatgataatcctgaaatacaaaataataattataacataaactgagtacagtgtgctaagtgtcaggcattgtactaagggcttcatattagctaatataattctcactaaaaaaggaaaatactgttatccccactttacagatgagggaattaatccacaaagagattaaacacttgcccaaattctcataataaatgggaatgcaaaattcatacccaggacaaaatactccagagttcatgatcttagtcagttaaccacattgtttctcagtatccaactggtttgccacatgcttgagaaagatggtgatatcttccaacaataaatataattcataattttttttttttttttttgagacagagtctggctcagtcacccaggctagagtgcaatggcgccatctcggctcactgcaagctccacctcccgggttcatgccattctcctgcctcagcctcccgagtagctgggactacaggtgcccaccaccacgcccggctaattttttttttttttgtatttttagtagagatggggtttcactgtgttagccaggatg

SEQ ID NO: 316951 - DNA, 4001 bp, Homo sapiens
cacatagatcattagaataattctactaaaagacatatgccagaaaataatctagggtttgaaaaatagatgcagataaatcagcactgtatataaagacaaataagattactcccctcataactgggattaattcaacagctagttacagaacacgtgccacaagccaatcaccatggctgggcaaggcggattcaatgaggaacaagatggaaatggttctttccttgtgtagtttgcagactcagtccaatcagaaagacagataattacagaagcaattataatagagtgccataaacacttcgatagagaaaaaagaaaaaaaaatatgagagagcatcgcataaacctatagtttccaagctgtgacccaaggcatctcacagagtggcagcaaactcacaggatattgctggatattttaaactttcaacagaaaacacagtgacatccattaacttaaaagtgctaggtgtttcttttgacttggagacaccatgaggagaaattactgggacactacaaacaccatgaattgagaatgtttaaaatctcaggtagagacacttacaaataacaccatcttttttgaaggtcaggaaaggttttttgttttgtttttttttttttgaaaaatgaatagcagtattcagttggcaggtagcatttgatccaaattacccttcttctctcccttttcctgactctcctccctccaattacatcaatttgggcatctacaaagctcccgtgctgaacctttgccctctctacttatttcagtccctcacttctgattgtctattttcatccccatatggtgtcttaatgtcacttcaaactcaaaatgtctaaaataagacattttttcctttacccagcaccttctcctgccattcctgtttctctattctctttatcactcaagcacatgaaagcagcttgagtctagacgttcccttctccctcagaactaatatgatatgtgtgccttatcagttcttcttgtccatgttcccttgagtcagttgcaccctttcattctatggcttttcccttggtctggcctctatcatcatccacctccagtctcactctctaatccattctgcacaaaacctccagactaatttcaccacaattctttctccaacagaagtgtaaaaccgagcacacacaaaatgagacttacccaaactttctttctttgagttcgaggaacaaggctaaactttattctttaaagagaaagaaaaatatctgtggtcttctttgaaagtgtttattaacctttccagccacttgctggacggcattccctcccccaattgacctccctctgtgaattttcctttagcctataatctcggtgtttgtttgttttcctttgtttttctatttctccctctgttcttttttttgttgttgtttttgttttttacccttgatacatatgactgttcaaatccttatgaaagatcaaacaacacaaaaaactagcatccttttcattggatgtgacatgccaattaataaaattcatcttaaagctttaataatgtatttaatgaggcatgcactacagagataaagcagaaatgatttcctcaatagtttcactgataatactcccaccaaagtcacccttgaccttaccttccaggtctgtcataaaagtgtgatgctgccggccgctggctccttgtgaactctattttcccttgattcaagggcataagctctctcctgtgacaatttaacattctgtttcgtgttctgagattttttctaaattgtttttttaagtcactatttttggtcctttttgttccacctttaggttgatttcatcagtatcaacatcaccaatgattacatacttgttgatgatttacaagtacagatttctaattcagcttttttccccaaatcacaacccatgtatctaattgctttactgacataactcttcctagtcagacaaatttaatatatgcaagacataattttctttgaaaaatctgttccttttgctctcacttctgaaacaagaatattcacaagcaatataaagcaccattttaaaatgacagctttaccttacagaatataggctccatgaaggctggttttggcttgttagcttgtttttaattgctatcttcccagcaatttgactacagctggcccacactgggtgcttgttatatatttattaaatgttgaatgaatgaacaaatcaatctcatgaagacgaaaaaagtcatacatatatactttgaagttttaagttatgaaaattacacttttccattgtttcatcttttcttccccattttttccatctacactcttctcatcctttatttcagatttgattttgctagcacctcgcttctccacctcaccctgctcctccagcctctttttgtccctttgtggatattcattaatatgtgttagtctagtcaaggcaaatggaaaggggagagagaggatgtgtctgaatagggaagagcaagacagagaagagaccaaacaacagaaaggaaaaggagaaacgtctgaaaatagatttaaagaataaacaaaggaggatgaaagcaaagatttttaactgatatgtcaagaaaaacaaaaggaacagtaagagatacatgtattttcaatcctgaaatcaaggaaaacagtcagttgtttctcaaagaaatttctttaaattggcaaggtatattcagtctgttttattaatagaaataaaagtagaaatatacagactactgattttttttaaataacagttttgaatcccaatacttgaaaagctttaatcaaagcaatcaaagcatcatacagatgcaaatacaacacagacaaaacccttatccccaaacctagaaaatttaatgtaagagacagttataaactaaactgaaactagattttattactgttaattatttgcatagcagaaaatgaaaattttacagaatcatgcatctatagtgttacaggggaatttcagaagtggattttgtttcggaagtaaattttaaaataccagccaatgatgggcaaatacttaaacctatccaccctttaatagttcttaatgaacaaatcagacatataaatagaatgaagacattaataaggctatctaaaaatttaagcaaacaaaaactggttcataatgtaataaattagagccatagctccatacaaggaattatgataaagaaagaaaatgaggaatatgaaaatgaaacactgctggtttcatttacactaaatgaacatctcctggaagtaggaagttaacgtgttttgaccacagtgtacttggtagtgggattagaagacaccatggtgctgtaaaaagagtctgcatttgaatgaggccagcagggttttaggcccagttctatcactaattagttcctaatcttacaaagttaatttacttttgcagaacaaagatgatatttaatacgtcttctttttaaaagtgctataatgaataatgatttttaaaatttatttcaacaatagacttttggaataaatgtgttctatttaaaatatttatttttatagttgatatccatattcagcttcttgattaatcaaaacatccatgtttgaattttaatatcagcacactaataagaaataataaaattaaaacatgtccccttcattgatctcacatgttgattgtcttggcaactaaactcattgcagaagctgtaaatccattatgttcaatttatcttgtttttattattttattatcctgataaaagcaggctgactttaaaaaataatacttcctagaaagtcaattccttctcctaggctaaatgtcttctgaggtatgagaaatcagggaacatgaataacaaaaaaaacatgaattgtgtcctaggacatgataacttgctttaattttctatctccaaattttgtctttatgttaacagttatctaccggccaa

SEQ ID NO: 316952 - DNA, 4001 bp, Homo sapiens
aagaaacccagcatagctaaatggctaaaaatatggtaactatactgtgcttccaccctatatattttatcacataaaatacagttttttacgataagtgcctttatatacatttgaaattaactttgacagctgaatctttttcaacactactcttgaatattacctttatgtagtattacctgtgttactgcttcagtactaagaaaatgagaccattttctctgacattacataagcccgacagcagacgagagaaacgctgcctatctggggtgaaagctagctccctctgaagctaccatttgacacgttaaaacaattctcgagttgattgaatcattccaaattaccaatatttgaccatttcaaccttcaaaaatggaaatttcactttaactcatacagccagatatacctagacaagctttaaaaacacataaaaaaatttcctttaacattattactcagaagttgattacagtcaactatatagaaaggaaaatcttaacgcttccatacaccctgaaaatttatgaacttttgctccatctgcttaaacctatattgcatcctcgtttttagtttttattttttaaagattgttttaaaaaggtgcaccaatcaaaagataattaatggtcttggtctttgttctatcagatgtccatgcaaagatatggataatggttccatcaccaaatttttaactaactccaaatattgtatttgtggctcacactagggatcccttgacccagctcggcaagtgtgaaatcacgaaataaatgaaggttaacaaagactggtctaaggaatagttcactacaataccgcaatgctcttctcactaatactcgactctgcatttcggtacttatatctgaaagatttgcaaataatgacaacattcgtgccagacattactgcaagtgaggaacagactaaaggagaggaaggaacaaaatgccttccaagagagaaacattcattagccttactggcaagtgtctaaagcaaacaaggaaactgcaaaataattacttagttacaaataaacgcttttagcacagtacctttttgtgtctgtccctcttccatattctcttccatggctacctttcttcagtagaatctggtacacggaattaatcaaaagctcaattagatgttggaaaaactgggggtttttttttttttttttttttttttttttttttttttttcctgggaagctccaacagcagtggcttgggcaagtcctcagagcttagctcaggctccctcgttcctcttgtttgcttggagacaggctgtcaagtgtaatttcattcaaattactcttccgtgaagattatcaatttttcttctcaaagctgcccattgtgtaccactgtaagcaggtattcaaacaaatagcctgagaattttggggggaaatttggtctgaatcccaggagcagagacactatgattcacaagtcttgctttgcatttaaaatggggaaaagaaattgaggtttgtattgaaatctgggctttaaattggaaacaggctgagctgtgaacagatggaggggtgtcctcctaacatgaagccgaccaccaacccgtaattccccccttcattccagagtgggaaagcccagattcccgtcggttctttatgctgcagcagtggcttctcacccagtcagatacgttgcaaaaaaactgtgttttccttttctctcctcactaagtatttagttaatttgatttaaggtgccaagaaaggatgcagttataccatctcagggtttatctgcaaaagtttattactaagacaggacttgtaatcccacacctttgagatttaaaaagaaatagaagcgtggctgtcaaaggagtgagtataaagctctaagcctgagagatacatgttttaagtaattattttacttagtgccatatgactcttaagtaaaagggagaaaaccactggaaggaaaaaccctattgatgtctttgttatttattgttatgattatagcccacgaaagctgctggtttccaatgagaatctcttgaaagggaatttctttaaaggtcagtgttagggaatgagaagagtgatgtaagggaggaacaaattttagataagaaacaagaggatagcaatttataatgggaatctgcaagctgatttggaatgcaaatcacaatgctgcagtctggcgataattagcatttgtacttcagcctactgagtgacagggcacagtccaagagtctcaatacttcacaaaaggtatagcaagaaaataaacagtatctctttcaaggagcataaacctttcctagagtagaaagaaaggatccttgcctctgtcttcatctccaaatcagccagcacacacacacacagggacagaaacacacacagagggacagaaagacacacacaagcacacacacggagaggcacacacacacacaaggacacacacacagacataactgtaactctctgcctttaatgaaaaatagctcacatcctcattatccatagcatacgtttcttgcattatagcttgtatttcacatgcattctttaaagcaggccagtagcatgctgcacatcaccctctaaatattacaaaagcagctatttagaggaaacacaattactgcattccactttatttctcataaatgaatgtttagtcctcttacttgtataatcatttgttattattttctcttttcaaatgaattttgtccaaaaataactggagttcaaataactcaaaacctatctctttggaatatatatcaatgtgtattcaagggtttttgagagagctgcttgctcagtgcacagattgagagagagaaaccataagggaaatcaaaaagccaaattgtagcagcctctctgcttcaactcatccctaggctgacataacctggcatataatcaacacagaacggagcaacgctcctcatttagatccttcattcgttttataccatggaaatcattagtgaaagcaattgtttattgtagtgccagtagatacaataatgtcaccttaaatttttagaacactttacaatctataaaacatgattacatacattaacccgttgtaagtcaaatgggaaaagcataattttccccactttatgatgaaaacaaaaaacaaaaaacacggatgctcagggacacctagagactgggctaataaatcaccaagtaagtcttagaacccatgtctgttgatttcttgcctaatgttctgatcttagaagctaattttccttcctactctgttcctttatgagtatcttcagcatcttcagaaatcagcctcagttcatagctttctttttcaccacacatataaagcaaaagagggaaatgagagggaaaggaaattttaaaaatattcatgatttctttttcttctggaaattttgcagcagaatacactcatataaccattcactttttgtctaaaacaggctttttcatgtgacaattgttaccaacataagtcaacatcaacttgtaccaatttttaaaatatacaaaaaagtcctcagagccagtccaaatggactcgtcaaatgaattaagagagatgcatacacatacatagcctcctcacagcaatcacctgtcagtaggctttcagtatttattggggtaaaatataaaagaaaaatttgccattttgatcatttttaaatctgtagttcagtggcattaggtacattcacatcattctgtaaccatggccaccagctatctccaggactttttcatctccacaaactgaaactctgtgcccattaaaaacgcactcctcctttccccttcctcctgtttgatggcagttgagttgttgatgattttctcttttttttttgagatggagtctcgttcttttgcccaggccagagtgcagtggcatgatctcagctcactgcaacttctgcctccagggtttgagcaa

SEQ ID NO: 316953 - DNA, 4001 bp, Homo sapiens
cttttaggtcagaaaaactggacctaaacatgagtcaacgtaaatgtcactcattgacccaaaacctaaatgtttataacataactgcatgatgactaatttttgcagagtaacaaagaaaatctcctccaacattgggattttctccatttggactgtaattaaagtcccataccgaaaatttccacttcaaagaatctgactaagaaataaataaatataactgctgccaccaccacatggtaacgtgttagtaacggagtcaaataaaacaaaaactctttcatccatcttcatgcctccataaatagacacatagacacaattttcatggttaaacgtttcctaattcaaaaaatggaaatgaaggtaaacaaaagtgttagtaatgaaatgtatacctggcctacctgtgtatactcctgctgaatttgggttacatttaaaaccatactttaagtgttttcatagatcatgctgcggtccttgcattcatgtttgtatagtggctgccttgattctttttttaggaaaccaaccaaaacaacatagaggaaccccgagccaagggactcacatttcagttgaacaaaatacccatgagaaacacttagactcaaaactttccaaaccaattcatccttctgaaaacaaactcgacagtcactggggccaactgttcagctagaattggcaaaactacgtttgcaaaactgaaccgtgaatcccagcacaagtgagttaccaaaatttttccttccaggtggaaactcaatccgaaaatcaaaaatccctcgagttggaaggctcaataaacccacggttttcagttccaatgttcctggcttttaaatataagccctcacagacacgaaaacgggactgcaaggtacataaacagattgatctgaaatgtttccagcccttaataacaactctatcttaaaaggtgctctttaactgtaataaaactaagatagcaaaaggcaaaggaagcgtcttggggtttgggctcgcacacagtccttgtgttttgcaaactctaccacgtaagtgtaacttaatttgcaaagaagcagaaggactggcgcttgcaatcaagcattgtgttttctggaaacccaagcccaggatgaatgagctttaactctgttgactgcgtgtttacttgcatcctcacgtggcaccgcgcagcccaaaagcgctgcgccggggacagcgcggggagcgcctgagaacccgaaaactttactttgcaaactagtggagctgggaggcagctcggacgcagattcccttgcctttccctgaactgcacccatgccaagcacacgaggtctttcctagcaccgccccctgcctacagctccacacaaaggcgcgtgggtgccggctggaccctgctccaaagttgagcggagagataagaaagagccgagcgggagaggacccagcgtcgcgggagatactcacagggtgaccgtgcggttgggcagagtatctgggggcaggacctgcgcgagttccaggctgctgcacaccaccttgccctcggcggcgcccgccgccctgccagcccctcggggccgcccatcgtgcttgcagccggcgggcagcgccgcggcgccgccgccgccgccgcctcccagcagcgcgagcagcgctaacagcgagagcggcagcaacagcggcggctgcgcgcggccccgccggcgtccgggtggctccatgctgcgggccggggcctgcggggcgagcggcggcgcactggcctagcgggccgccccggagcccgggcgggcaggagcgcggcgcgggcccagcggcgaccggagccttatggcggccggaggacgggccttccccggcgcggacatgctcctttgtccgctgcggctgcgctgggcctctagggagccgggggtcacggccgcatgggtcccagcgccgctctaccgcccggcgcgagcaccgcctcctcctcctcctctgccgccgccgccgccgccactgcctcctcccctggccaggacccgcgcgcggcggctcctccccgcccgccgccggcggccgcccccgccccttcccctcctctttcccggctctcctgctctccccgtgtctgcagctgcccgggacctcggggaggaggcgcgcgctcccgggacctgccgagcccgactccgacccggtgcgcgcccgggcctcggcctccgggcaggagttgtggggagcccgcgggaaggcagtaactcgtagagagaacggaggaaagttcgagtccgaacggaggaaagttcgagtccaaactccacccgcggtggccactctcctgctcgtttcccttcgccgccaccgcgctcgcaccgcgggcacaggacaaagcagtcttgtgcgctcctggagactgcccatgtggcccaaggagcctggcccggaggatggagtagggacgagagtagggaatttccctgaccaaccctatgggaaaagtacccaaaaccaagtgtttcggaaggaatcgccttctcacctcattatggtagtcttatttgtcccaaatacactggagccagtaaacaggttcctcttcaatacagtgaacaatctgaagctgtttctggccttcagcaacaacagcgatggtctctaaaggatgcatctggacctcactagaaaggcagccttttgaaagaaattcgacaggcaaagatacttgagatgttcaccagttcgagcaataatgagcaaaccctccaagaaaccccaacagaattgattactctgacttccagcctcgccctaacatttgcaagcccagggcttacctaccctatgtttaaaattttacaaggactatatcatgctaataaaatatattctgtgctcctgccttgagaaattaccttcataacaacctggaaggtttgtaagcaggattctcagacaccttggagtttctccctgaaacatggcaggtgggaaagagtcagatccaaacctttggcctgtacaccttcaccgtctttgcttcctgtgcccagctatcttcaaggacaagaggggattttttgtacctgtgtgtgaacaccgcagcccacaaaaccaagttctgttcacactttctaacagccaccctctgtctgcgtctggatctcaggtgtgcctataccagttgttgggtccttcattgggaggacagttctcagaagaagctagctcagggccaagaagtggctttggtaataccagtcagggaattccagggtcctgggtcttggggacatagtgggtacccaggctttgggtgctggcctggagatttttcaccccataagaagagtcaggttggtgtcctctaaaatggagggcctagaacacggtttttcttgcttgggtctaaggacactactgcctctggcccctacaaaatttatcttagggaccaatttgcaggaatctgtttatctggctagagctttctcaatgggaagtaaataaatggtctccatttatcatttatcagtgttgtattaaatttgaatagcagttcatttgaccaacccaaccatgtccagtgctgtctaataatacattctgtgattgtatagctgttctagttctttgctgtctaatatggtggccaactgtggctacatagtgtgtggaatgtagatagtgtgcaataagaattaaatttttcatttcattttaattaatttacatttgaatttaaatgcccagtggctaccctgttggtgttgaacaacataagcccagacactatgatgggaagaaaaagtgggagattatctgcaccattaagtgacttcggatctataaataaccttagcaggcacactggtgcctctgtgttaaggtgggtgaaatggatcacatttctcttgaatttatctgaagaattattattccctaacaaaataatgatctgttttttgattaagataaaaccttactacagattgagcattgagcatccc

SEQ ID NO: 316954 - DNA, 4001 bp, Homo sapiens
ggggacagaacccaggcccagagcccaggggctgaagtgagggcagacaggagggtttcaggaggatgtttagcctggaacctgaggaggacagagggatgggggagagagaaagaacaaggggtaggcttgcttttttgtaggtgaaataaaggaagtctggaaagaagggccagctcctcctcccttccctctggctcatccttctccacacagaggcaactgaggcaggctgctgatggaggggcaaggctggggccctcaaggagggagaagtcacgtggcctgcccaccccaggagcaggagagcctcttgggtgttctgtggggggccaagggggaaaggggaacacctacaggaggtaatttggaacaatggcgacaccagctagagattcaggagacaaatcctgccaagtagtgagcagaaagcatgggggatggaccctgctcaagacttgaagcccaagtccatgcaagggcactgggtcagcagtgggcagaaacaagcagatgcctcagacccacagccatgcacaggaggggtgtgtctggccgcccacagcagagcccgcggaacccctcccggagaagcacaccccacagctctgcgcaaagctccctgtgcactgagcacatatcccaggaggcagaggcccccgcagtgtctgcaccaatgaaccaacaggaaacccctgtgagcagcgtgcaggggcagtgctgtggctggtgaactctgggcggagtaacggtggtgatgcccacaggctcctcaagccaactgcccagggagcgcccaagtccctggcctgggcctgtcggcatgcactgggccaatacctggggtgcaggtcggcgagcagcgcgagcgccttcatggtgacggtgtccatgcgctggcagtgtctgcgtgccacccggtgcacctggagcgaggtgaggcagagcaccgccagcggcagcacgaagcccacggcatggagcgtggcggtgaaggctgcgaagcgcggacgctcaggctcgggcggcaggcgcagcgaacaggacgcgaaggcgctgctgtagccaagccacgagcagccaagtgcagcgcctgagaaggccagcgactgtccccaggcacagcccagcagcaggccggcatagcgcggtcgcaggcgtccggcgtagcgcagtgggaagcccactgccagccactggtctgcgctcagcgccgccacgctcagcgccgcgttggacgccaggaaggtgtccaggaagccaatgacttggcatgcgccgggcgccgacggtgtccgcccgcgcatcacaccgagcagcgtgaagggcatgtccagcgccgccagcagcaggtggcccagagacagattcaccaggaggacgcctgaggctcgagtgcggagctcagcgctgtaggcgcaacaaagcagcaccagtgcgttggatagcagcgccacggccagtaccatcaccaggagacccgccagcagcgcctcgccggggcccatggcgctagcggctcgccaggcaccctggggttctcatggctctgcttcgggcgcgagcctgggaaagtgaggcgatggagcagctgagcggcgcgcccacggcttctgggaggtgcagagccggctagcaaggtccagagcagcgcgaggaaagcggcggcaagtgcagggtccggggcacccggggggagggcgtagctctgcggagcaggagcagcccggggccgccctggaggcagcgcaaccgcggtgctgtccagggtgctgaatgcgctcaccgtcccggcaggactgtcctgaggctgaagcgaggcgcaggggcgcggggcgtaggggcgagggaggtctctttcctaacactgtatctttccttcttctctcctcgtggcgtggcaggatgggactctgcgcgcttctgttccgggccaggtcagtccctgccctggtcacacctccagccgagcctcccagccctggttcgcgcgcagctgacacgccagcaagagccactcagtggatcctaggcagcacagccctcgccacgcctctccctccaggcgctggcaccaaactggagcgacctggtggcttataggggcggtaggggcgggaatgaattggcaagaagctgtgcaggcggggcagagggagtgacggggcggggaagggggcgggggctgccctcaggacttcctcccatcccccagcctcagcccaggaactgtgactgcatcgacgtttgttgaagcaagaagagcgacaagaagtggaaacaaggttgagaaaggcatgggggaaggaaagagaagaagaagaaaaagtgaagaaaaagtgaagaggaagtggggggaagaagagggaagaggagagaaaagcaacagagggagagacaaagaagggggcaccttgggaggacccacccagaactgggtgccatacagaaatgcctgtccttcacctggctcctggagccccgcggtgcgaggcctctcccacctccgccatcctctgtggtggcttctgagccttctcacccagtgggaatcttctaatccattcgtggccacttggcaggacaaggatatggtgaagcctcctggaagctgcttcttccaggaagctttttggcattttctccccagtgacagccacaacatgacagaaatgaagggcagacgattgcccacccctccccacacccaccctcacctgcaggctctgccagccctttctgagggacaaagggtggctggtggtgtggaggctcaccctgtgggcctctctcgtgccggtgctgcaaagtggccaagggaaaagccacaggtgcacaactggcatgctggggcacccctggttctgtgccttgggcctcacattctcatctgtcacatggggatattcatagccccacttaaaccccttgggcctcacattctcatctgtcacatggggatattaatagccagcaatagcatctgcctctggtggttgctgttagggttaaattggccaacatgcacaaaatgctgaggacatcccagcaggcagtgaaggatcagaacacagtcaacctttattagggggtccgtcttatacctgggcaaaggaagtttcattcaagtgtctctgccaagtccccataactacaaaccaggaatgccgagattcatacctcagtccttctggctctaagtccaatgtccttgtcatccagagaggccatcacaccagctccaagccattgccatccatcaaatacagaggctttctctctccccatttctccctggcactcccacaaacctgctttcaaattttcaccaaattagaccttccctgaagctagagcagccacgtcaaagttttcctgacatgtccaggaagagtgggccactctgcagcttctgcagatcaagcaagtttgcaggtgaatagctgggacaaagtgattgtgatagtgggggcttgagagcaggggcctcccccaacccctccaaggcttctgagcgaccatgtgcagctctggggagcggtggagtcatcacgtggcttcacagggagactttggtctagccactcacagcagcctctgtcacctctcaactactccaaagggagacaattccacttgcaggggagcagagagcatctcttctgagacatgagcatggggaagctccaccagcctgtattatgaaaggcaggccatttgctcatctgcaaggatgtactggacaactgcatgaatgagaaaatgtgtgtggtgagatctctggactctggtgagggcaccttgataggtctagatctgttctgtttgctgctctccccaaagccccagtgcttctggcctcagatcttgccagcctggctgccccccttccctgggttgtagggggtggttttgaaccctgtggtcttatcagtataatatcgtttcatcttcttacactcaaatctcattcctgatgaaaaatttaaatcctctgtagg

SEQ ID NO: 316955 - DNA, 4001 bp, Homo sapiens
aaataaatttcaatcatataacatctaggcctgcaattgcaattgctgttttttttttctcttttgaatcaataacctattccctcgattaaagacacacaaaacttgaaaaactaaacacacacaaaaactcgaaaaagaacattctctaacgcaaactcctgtcttttgcagatagcagcagagattttctgctttgggctgtgactcatgtacctttattcccacaattgttactcagggcaggccaatggtgagcacaatgggaaaagaaagaataggttataactggaaaataagcacattcgggcgaagtacactcaaagcattatcaaagtaaaatatgcagcagcaccaacaagagcaaacaaaagcccacgcaggagatgtgtaaatatttcatgaagcaaagccttaatcaaccctctctcccaaatcttgctggtgttgtaaacacttcagtttcttctagtcccaccatgacccagataccttgcaaaaacaaaataaaaacatagtccaatggatctttaaacaaatgtgttgtgaaaatatttagatggagcatacccaagtaccgctttaaccaagaggaagaagacaccttactcaaaggtgggtgcttcttgagtgactgctcagagctctgtttctcccctccccctccaagcccttgccttttgcccacctcctcggctgctttgtggacattcacatcgtcttaaccttgaactgcctacaccccaagcggtgatttctcccaatggccctccagaaagcccttgaaacctggtctggattcgatgccttcccatcacccaaaattcacttcccagtggcatattaagtacctctccttttttccctctttcactgtccattattgcgtctgaaatgatgcctacatcgtttccatctgcctggagagcatgaagatcttctgtgtgtgttggctgacaggctccttcagacctcttctaaagcccatcttgaaagaaccgtttatcacctctagtctctaccctgatttaatgtggttccaaagttcgcctctattagtgaacatgtctctacaacgatttccctttatcaacccctgcccgcccttcctcttctttctgcctacctcaagaaaacctatttacatatgcatttatgtatgtgtgtgtatatacacacacatacatacatccatatgtaatatatatttctatgttttgaccttaaaggggataagcataggaaaatgagacaaatgtcacacacacacacacacacacacacacacccctcatattcggatattcgcagtgtgcagacccgattgattataaatttccctgcccacgatcagcaggcgtcttctcccatttaccttcaaagccagagccaaagagagcaatgaccttgcagagaaattcatcacctgcgagaaagactgcccctcctagagcgcaggatgggacagagacaagagcaacaggcaaaggatccctgtgcaaaatgtgggaccgaatcccttccgcatccctacagagcacaccaccaggctccggtcccccgcgctggccgccaggcggaggtgcgcagggggcgtctcctacctgctctgcccggctccgcggcgcggcggggccactgcctgcgctgtggcgggggcttcccgtcgcatatcccaagcaccgtctctcggcgccacaccgatggctccggcgggcccgcgagctgaggtccttctcagcccggtcccggagcgagctccgtgcgttcaggaactgaaattactatgccaagagcagaggcggcgcgcagcagtcgggcgtagaccgagggggctgcccccaccgcggggctgcagacgccgccgccgcccccgccgggcgcagagccagtttggaggtgagagttcacttgcccgactgttcatccgtcaggcccggggtgtacccatctgtccagcgctgcccagcctgagcatccgagagaggggcgacagctttgcaggcggcggcggcggcagcagcagcggcggcagcaggaggccgagctccgccccctccaaaccccctcccccgccttcccggtcctgggggaaagtgttgcagcccaggctgctgagcgccgggccgggagctaggaggggtctggtgggttgtggttctgcacccctggagaccagagacagatggaaagttaagaagggattaaggaagagggctggggacccagagcgatttagcaggcattctggcccttgctccctcccacaggtcaccagactccatggctgagtctagactctagcagaaggtttccaataaagccacgtgcagtggagatctgaaagcaagatcatccgataagtaatatgttttgcaaaatgtacagtatcctgcgtattcggagaggcactgctgacagtgttcctgtccccatccccttcccgctaccccatgggcttggagggctttgagggctttggaaatcttccctgttgagcagctccagaatcctgaatggatgtgtagtatggttagcagctgtagatggtgcaaaatgatacgatgaaaagagcttcattattaactgggtatttgttggaaggctctgtgaaaaatgccttacatacagcctcagcctctttaattcttactacaacccattgaggtgccttaccatgtggacgaggaaacaggcttatatgatctaaacactttgcttgaggtcacacagtagtaacctgctcagctgggattcaaaccaatccaaaatatatcctctcatctagtacacaggactcacctagggggtcttgttaaaatgctgattgtgatccaataggtctggggtagggactgaggaaacgcttttttagttttttgttgttgttgttttttgttttttgcttcgtctcctaggctggagtgcagtggcgcgctctcggctcactgcaagctccgcttcccggggtcaagcgattctcctgcctcagcctcccaagtagctgggattacaggcgcccaccaccacgcccggctaatttttgtatttttagtagagacagggtttctccacgttggccaggctggtctggaacacctgacctcaggtgatccgcccgcctcggcctcccaaagtgctggaattacaggcgtgagccatgcctggcccaggataggcatttctaacaagctcccaggtaatgcccatgctactggccaaaagatcaaactttgcggcactattcacaatagcaaagacttgcaaccaacccaaatgtccgtcaatgatagactggattaggaaaatgtggcacatgtataccatggaatactatgcagccacaaaaaaggatgagttcatgtcctttgtagggacatggatgaagctggaaaccatcattcttagcaaactatcacaagaacaaaaaaacaaacaccgcatgttctcactcatagatgggaattgaacaatgagaacacatggacataggaaggggaacatcacacaccggggcctgttgtggggttgggggaggggggagagatagtattagcagatatacctaatgtaaatgagaagttaatgagtgcagcacaccaacatggcacatgtatacatatgtaacaaacctgcacgttgtgcacatgtactctagaacttaaagtattaaaaaaaaaaaaaaaagatcaaactttctaagcccctagatcagggattttaaataagtttcttcttttatgccaggtgtagttaattgatagctgcttcctgaaggtgggttaagaaggattctctggctctgtctgggttctccggctagccatgttcattttggttgaagacgaagggagctgggtcatcttccctacactaggccgcttctaaaaggacatctttatgacaggagtggttgtggcataatatttatgtcatcatagtattcatatcataaatatgctaagcacagatgtctttattccagttctccctctcattaa

SEQ ID NO: 316956 - DNA, 4001 bp, Homo sapiens
agctgaccgcggcgcccctggcggcctcgccccctccaacttaagcggaagcgcaactgagcaggagaaattgacagcgctccccctttccaccgcctccccgccccacccccacgccacccggccggcctgagcctgcgtcagccccgctcctcgcccctcgggtgggcgttatgtaacagccccgatcccaactccggaaccatttcaacaacttgtcccaaagaggagaacatggagctcgcgagggccgcagggtgagcccagccggtgctgcggatctaaactgggggcagcgggcgagagcggcagctgctggggcaggaggccactgggctccggcagtccctcgtgggatttgtccaacagcccgactgcgcgccctggggaacaacgtgttctctgtgggcagggtgccaacaggcgctcgatggggagcgaggtgggagggcttctcctgaagcactcaagatgagcgaaaaccccttgaacccaagaaagccgccctccctggctccaaccctcaccccggctccctaatgcgcacactcttgacgtcctttccctctctcttcagccctctccagccagcgggggtccctgagattacagccaccttctctctacacggtcacacgcacgcgtgtgtgcagtcactcacacccacacactgacacacagaaacgcacacacaccaccccagaaacgcacacacacactcacactcgctggccttccgcgtgcagcacccgaaaggcatgaatattcattacttacaagcattagtgactgcgaagctgtttgccacctccaaattgtcgatgtggggtgtcagtctgaactccgaagtggaaaactgaaccatccctactcgaaatgcactgtattcttgatcggcgcccctaggaaatagcccccctgcaaagaacaaacagcaagcaagagaacagtgtcagtgccccgggagggaaaggaggggcgcgcgctagcgcccaaaaatccaagagtctcttattcacgcgaataggccgaataaacacacctacggactcggacagcgggggtggaatatccaaaagctagccaaggggtcaagacccagatgagagtctgaaggcgaggtaggcggccagaaaccttcacctttccatgtaatcacaagctttgcattcagaccccaagaaaatctgagcaaactggaaaatgtcgctaaggcagaattaataaaatttggggatccgaaatgagaggaccttttcttctattgtatcaaaggcatagtcttttccttttgcttcatcctaagaaaaacatgtatattctaggtagtttaaatctggaatgcagtcaaggtatgacataagtctacatgacatgaattaatttgtacactgtgaacaaagattaccaccaaattatgcacaattcaaaagcatagcacaaagggtacctacctatctgtatgctgttagaagagacaccaaaaatcagtccccataaaacaggagaaaggaggacagaaatatgcataatcttttgcatttccaagaaaagtagagcatccacaatatacccctttttttttccttttcctcctcttccttctttggctgttttcctctgcaaattagatcctctgcattttgagacagcaatttagcaccaagctgctaaaacctgaagtggaggcagaagaatccctatttcccaggtcctgctggtggctgctgatgccctgcgccctgtccccgctccagaagtccggaggactggctgaatgcagttttcagcggagctgccgctgtggtcccagtgtctcggaatattcagcaccctcccatgcactcacacacactcaccctctctcgcgctctcttctccctctctcctctctcactcacgcgcgcgcgcacacacacacacacacacacatacacacacgcacacacacaggcaagtcacagagaggggcaggcagtcccgggcgcgcgtgcgcgactcgcggcaggaggcgggagcgcgcgccccctcccccgcacggcgcccggcaccccgcaccaccgtggacgcgtcgcgtgcgcggcgctgagaaagcacagctcggggcccgtagccgctgtccctccgcgagacctcgggtctccggggctgtcgcgcccaccgcgcgcctcggcctttcagcaccgaggacagcgcctcgctccccgcccggagctaccttcgtgcggctgttgcagctgctgcggagatgctccaacctggaccaaatgcagcaaagctgatctccggctgctgtgtagaagccgaattgctaattgttggcggcgaagcgtcctctcaccaggccctgctgtcttacgttacaaataattttgatttttatcttccatctcctgtgaaaacccatttagcaatacagaagccctgtcatcctcctcacctgacccagccgaaagcaaacaagcaagcaaagcaccgtggaggaaatattccaaaattgtgcacttgggcttcatgggatgtagccaggatccagggagaaccccaagttatatctttaaatgcttaagccgcacaagagatcaagatggaatcttttaaatattttgcatgaaaatcccatctttagagtatattccattgggctgtgatgctgactcgcctagttacagagcgcacgggtctttctcgcagctttcactgcaatccctcccttgtagagtcatgtagacttggtttcctagaagcccttgctttatgcagattgaaagcaagagactctggtttaaggaaaggctattagaggaaagtgattagaagatgaagctagtgtaggaatgccacagagatgcagattctttcccagagacttacttagaaatctgtttccccatcgcgttttggccgggggtttcgaaaaatcactgcctaaagaaagtaagccaccacgctctactgaacacgcgggccacagggaaagaaagatgaggttagatattaaaagtttgaagggagagaattgatggcgagatggatgactggacttcccgtgtgaaatttatgttcttcatggtgctttttccaagctcattcctggaaacctgctctgacaattccctctgcggactcagaaaagccccaccaagttgcatgtctttactggtttaaacaaataaagaaagattgagaacaaggaactgtttccaggaagagggagattggagcttacagtactaaaaagagaactgctagtattccaaaatgccatgagtctatcaggctgccttcttgtgcttgcagcttcattgctgactggattatcttatgcttgcttcttaatcacattggcctcaatttccccattttaaaaatgatgatgagcaaagtggcttctatggctcttggatcctatattgctgtcatttcaaattataacctttccctctttttgatgtagtcctaaaccatgaagtgagaatagctgtaatctattattaagcttataaactatagactaaaatatctcttaattttatgccttagaattttattagtatgttataagtactccacactgtatataaagcaggtcttctaaataaaaatgtatttaacctttaaaaaattgaataataaaaataatatataaaattaattaaaattacaataaatcgataaaaaataaaaaatgagatataacttacatatattcaaaattgcaacataaagaataaataaatcatacatatttaatcattatttgtgatgtaaggtatacaaaatgattggaaattattacctatttaaaatttttaatgtaaaagcactaagaacagagcaaaatttaaaatacctctgtagttatttttttctcgattcacttgtttccacaggaaaactttaatttcatagaaagtaacttagaattaaagagagcgaggacagagagagaggaagcttcaatatgaaaaaaatttgatgtttaaaatgtgagttcaggt

SEQ ID NO: 316957 - DNA, 4001 bp, Homo sapiens
cagatcccacggcttcccagtccttttccccggctgcctctgctggagcccagctacctgagaacaaagcgcgccgggctggcaagctgaccgcggcgcccctggcggcctcgccccctccaacttaagcggaagcgcaactgagcaggagaaattgacagcgctccccctttccaccgcctccccgccccacccccacgccacccggccggcctgagcctgcgtcagccccgctcctcgcccctcgggtgggcgttatgtaacagccccgatcccaactccggaaccatttcaacaacttgtcccaaagaggagaacatggagctcgcgagggccgcagggtgagcccagccggtgctgcggatctaaactgggggcagcgggcgagagcggcagctgctggggcaggaggccactgggctccggcagtccctcgtgggatttgtccaacagcccgactgcgcgccctggggaacaacgtgttctctgtgggcagggtgccaacaggcgctcgatggggagcgaggtgggagggcttctcctgaagcactcaagatgagcgaaaaccccttgaacccaagaaagccgccctccctggctccaaccctcaccccggctccctaatgcgcacactcttgacgtcctttccctctctcttcagccctctccagccagcgggggtccctgagattacagccaccttctctctacacggtcacacgcacgcgtgtgtgcagtcactcacacccacacactgacacacagaaacgcacacacaccaccccagaaacgcacacacacactcacactcgctggccttccgcgtgcagcacccgaaaggcatgaatattcattacttacaagcattagtgactgcgaagctgtttgccacctccaaattgtcgatgtggggtgtcagtctgaactccgaagtggaaaactgaaccatccctactcgaaatgcactgtattcttgatcggcgcccctaggaaatagcccccctgcaaagaacaaacagcaagcaagagaacagtgtcagtgccccgggagggaaaggaggggcgcgcgctagcgcccaaaaatccaagagtctcttattcacgcgaataggccgaataaacacacctacggactcggacagcgggggtggaatatccaaaagctagccaaggggtcaagacccagatgagagtctgaaggcgaggtaggcggccagaaaccttcacctttccatgtaatcacaagctttgcattcagaccccaagaaaatctgagcaaactggaaaatgtcgctaaggcagaattaataaaatttggggatccgaaatgagaggaccttttcttctattgtatcaaaggcatagtcttttccttttgcttcatcctaagaaaaacatgtatattctaggtagtttaaatctggaatgcagtcaaggtatgacataagtctacatgacatgaattaatttgtacactgtgaacaaagattaccaccaaattatgcacaattcaaaagcatagcacaaagggtacctacctatctgtatgctgttagaagagacaccaaaaatcagtccccataaaacaggagaaaggaggacagaaatatgcataatcttttgcatttccaagaaaagtagagcatccacaatatacccctttttttttccttttcctcctcttccttctttggctgttttcctctgcaaattagatcctctgcattttgagacagcaatttagcaccaagctgctaaaacctgaagtggaggcagaagaatccctatttcccaggtcctgctggtggctgctgatgccctgcgccctgtccccgctccagaagtccggaggactggctgaatgcagttttcagcggagctgccgctgtggtcccagtgtctcggaatattcagcaccctcccatgcactcacacacactcaccctctctcgcgctctcttctccctctctcctctctcactcacgcgcgcgcgcacacacacacacacacacacatacacacacgcacacacacaggcaagtcacagagaggggcaggcagtcccgggcgcgcgtgcgcgactcgcggcaggaggcgggagcgcgcgccccctcccccgcacggcgcccggcaccccgcaccaccgtggacgcgtcgcgtgcgcggcgctgagaaagcacagctcggggcccgtagccgctgtccctccgcgagacctcgggtctccggggctgtcgcgcccaccgcgcgcctcggcctttcagcaccgaggacagcgcctcgctccccgcccggagctaccttcgtgcggctgttgcagctgctgcggagatgctccaacctggaccaaatgcagcaaagctgatctccggctgctgtgtagaagccgaattgctaattgttggcggcgaagcgtcctctcaccaggccctgctgtcttacgttacaaataattttgatttttatcttccatctcctgtgaaaacccatttagcaatacagaagccctgtcatcctcctcacctgacccagccgaaagcaaacaagcaagcaaagcaccgtggaggaaatattccaaaattgtgcacttgggcttcatgggatgtagccaggatccagggagaaccccaagttatatctttaaatgcttaagccgcacaagagatcaagatggaatcttttaaatattttgcatgaaaatcccatctttagagtatattccattgggctgtgatgctgactcgcctagttacagagcgcacgggtctttctcgcagctttcactgcaatccctcccttgtagagtcatgtagacttggtttcctagaagcccttgctttatgcagattgaaagcaagagactctggtttaaggaaaggctattagaggaaagtgattagaagatgaagctagtgtaggaatgccacagagatgcagattctttcccagagacttacttagaaatctgtttccccatcgcgttttggccgggggtttcgaaaaatcactgcctaaagaaagtaagccaccacgctctactgaacacgcgggccacagggaaagaaagatgaggttagatattaaaagtttgaagggagagaattgatggcgagatggatgactggacttcccgtgtgaaatttatgttcttcatggtgctttttccaagctcattcctggaaacctgctctgacaattccctctgcggactcagaaaagccccaccaagttgcatgtctttactggtttaaacaaataaagaaagattgagaacaaggaactgtttccaggaagagggagattggagcttacagtactaaaaagagaactgctagtattccaaaatgccatgagtctatcaggctgccttcttgtgcttgcagcttcattgctgactggattatcttatgcttgcttcttaatcacattggcctcaatttccccattttaaaaatgatgatgagcaaagtggcttctatggctcttggatcctatattgctgtcatttcaaattataacctttccctctttttgatgtagtcctaaaccatgaagtgagaatagctgtaatctattattaagcttataaactatagactaaaatatctcttaattttatgccttagaattttattagtatgttataagtactccacactgtatataaagcaggtcttctaaataaaaatgtatttaacctttaaaaaattgaataataaaaataatatataaaattaattaaaattacaataaatcgataaaaaataaaaaatgagatataacttacatatattcaaaattgcaacataaagaataaataaatcatacatatttaatcattatttgtgatgtaaggtatacaaaatgattggaaattattacctatttaaaatttttaatgtaaaagcactaagaacagagcaaaatttaaaatacctctgtagttatttttttctcgattcacttgtttccacaggaaaactttaatttcatagaaagt

SEQ ID NO: 316958 - DNA, 4001 bp, Homo sapiens
actcaatgagaccataatttcttgctgaaaagttctgaatctgtaggcactgttagcccccaggcaaaacgggatccagcaggcaagctattagtgcttgacttacttaatgcacaaacgctaggttttctgaatcctgacctcattaccccttgcacagagacagacagttctactgatataaatgatagagaatggcagacatgtttacaaagacagcctctgagaccaagagagggagccccctggagcggaggggctggccactgtgggcgcgcacgctagacagaaatccctcgcttgggcgggcacaatcgccacctgcagcagattcccctaccaggagtatgtgtacgtgcgtgtgtgtatgtgtatgcgtgttgtgcggtggagaagcaggggtacagaaaggggagaagctgtgacccatctgtcgcctcaatttgcagaacaccaagccatgcgtacagataaaagtcctgtgcccagaaaaattcccccaaagggacctctctgcagcccagcaaagaaaccttgctggctcggtaagcgaatttccgaaaaagaaatcgtcgcattaacgcagaaaaggctgcaagagcctgtctcccgctcagctctcacggattagcaagtgagtagagttggagcctgaagctgcgagcgctgtgcatgataatgacgcgcagccccccgcccgcccctgctcgccgcggccagtcccggcccgtctggttgccaataggtggggccaccagcatctcggagcccgctcggcagtccttctcagagtcgcggcccgcagtagtcccggcgccttcgctgtctgccttgcgcggctactcggagttgactgcgaggcgaggcgaggcgaggcaaggcggatatctgctaagcagacctcgggagcagcctgcgcgcattcgcttccccgcgtttcccaagcgccccggggtcagtttcgccgccgcgccaggccccgggagcgtgtccgaggaggcgaggcacgcgacaatcagtccttggcgacactgccgccagcccctcctgccaccgtctcaaagactacacgcaaggatcataaagccaagaagatgtgagaagagagggtggctgggggcgcatccggcacccccgtcaccatcgcactaagctgcggcgaactcagccggctcacgttgcaaaaccacctgttcgatccgaagggagctccccctaccccccagcccagttcttttcatctcacaggtgacagcttctctgctcccccaaagataaatttttaaatggagcaaatgtacatccgggaaaaaaaatatggaagataagagtcaattaaactccctttccccacacacttagaatccccctgcagttcccagcacacactcacactcaggtcaactcgagacccccacgcatccagccacattccacgaatcactgcaaaacaacagcacaagtcagtcgaggttcgagcatccacatcctttcagaaaactgagcaagtgtgagggaagggtagcgggaaggggcaatgaactgaagccacctccaacaagacacacagagaccggagagggggaaagcgaaggggaaacatttgagaactgaaacggtaaaagtaaccacgagctgcaccaacactttcttaccgatgtgaatgatcgaatccgcattcgccgagtcccaggttcgagaccaccagacggacaaaaccaagagaaaggggaaaacttccatctcctcctatgccgattctcttggaggatggattttcttccaattttttttttttcaaacagtccaaagagtttgaggtcacggtggagtttagcgcagctttttctttttttctaaattcctattgccagagcaaagccttttatcgtcgccgagaaaggcagaagggaatgacagaaagagcccagcctgaggaaacctccttcgcaaagccgtgtcacttggaggggaattttggcatcgccagagttgtttgcagtttggcttttgaaaaatatatccagcctctactgctcttgggcagggggagaggctggggctcagatcagacccatcgctgcgcgggggccgcgggtctccggtcccagctccgctgcaacttccaacacccccctcacgccggatgtgcccccttccccgcaccctctcggaccaaaaaagacccccgcccccgcccctacagcccgcagagaatcactggtcttcgctgccagaatctaagtggaaaggaaagattaggagattccaaacggagcagccagattccaccagggaggggggaaaaaagccctctccaagaggggtagaaaaagtgaacttcaaggtaatgcagatagtaatgcagagaaaattccctttctgcgtgaggcgcggaacgcagcttggcgaggcgggcccggggagccggtttgctggggcgcggtggcgggggggttgcgccgggcgcgagcagcggggccgggccagaggagggaagccgccgcaggctgcaggatgcttttggagcgtttcgcctggcgggatgcaggaagcaaggagcgagcctggcagcttcagcaccagccccacgttgcctagaaatggatcacctaggagaaggagcgagcctgcgagagagcggtgctgtcaggcggagagagggggaaaccaagagaggaagagcttctctctaataaccacctcctccccctatctgcaatacaagggagaaacaaaatagtgctctcatttcccatggaatcttcaaccgggactgagaaaaaggcaggactgtaaaaagacattgaagctttttttttcctttctttattttacgaggttaaatgcaacctaaaaaagccaccccacttatttaaccttgctattctctaacaggtatcagactttttctagtctttgcctggaattagtcacattggttgaaaacaaattagggacacctggtcacttagggaaatacagacctagaaagcttttaatgagatttcaattataaagttataaaaaggagagaacgtgctaattaccttttatacaatgattttttttttctgtctccagtgtattttttaggcaatcaggatagagaaaggttcctgaaatcctttctattgatagaaattcttctctatcaggatagaaaagatcttgaaattaaaataaaaaagcagaataattaaataaaacagaaaaatttttcataaacatttggtcaaaatatttcattgagtagcttaataacctatgtagataaattccgaatgaggaagttgggtactctcttccatggaaaaagctgaggaagtcctgaatgacagcctctcagtctccagtgaaaggattttctgcaagcttattccttaagataaaatcctgatcattgtgacttcttttcttataatgattgacttatgtcaatctggcctcattgcaaactgaagatttgttaacacaatcgagtgactagtcgaggtcaggtattaatgtcataatattgtctcagttataattggaattctttaggaatgttggatgtgtggatgtcaagctcattacacaacctttcaaagccttacctccaagtttggcaaacctcttttcctcccgttccctcacttgagcccttctctctagccttctgaattgggttactatttttccagacacagttgtacattctcacttctggctgttttcattcatcttgtacactttttcctgaacattccagaaaatgttttgctgccatatttttacttatgttaatatttctgcttggaaagcacgtatttgtcctcccaaccactctccttcaccatctcaagggctagttcaaattccttttgcccatgaagtagtgtccagtcctttaatgtggaataaatccatctatcttctatgctgtcgtaacacaccctattttgtattagagttagacagaactactactaagttagatcataaatgccttgagagtg

SEQ ID NO: 316959 - DNA, 4001 bp, Homo sapiens
ccacctcagcttccagagtagctgggactacaagcgtggccgccaccttcggctccagactgtcctttaaatatgcatcgccggctgctgtggcatcttcagtcggcatttacactgtcctggagcacagtccgagcagagctgctccatcacgcaaggaaatagaggaaatcagcaattccgtaagagtgacggggtgtgaagaactaccgtggctagcacagggacttgaggtccgaggctctgtcgccagctctcttgagacgcaggcaagggagacatgaggtccgagacagaggattgcacagaggattgtgggggtctcccgctgaagggctggaccaactgatgcttttgtggcgggatgcagaggactagagagaccagcatgggtgaaaacaggaggatatttatgttaaggtacgcaccagctcagtggattcacatccaaaaagctgagccttgaacaaagactaagcaggatttttataagcaaacttacagaagcaaaacaaaggcagttaatcatataatgacaggtcacataatctatagcataactgatgacttggcataacttgtggccttgcatagctggtggccttgtagctgcgttgaaagaaaaaaccaagaactggctaaacacagatatttgtcctcttttttttttttcttcacccctgctctggaaggggggtgtctggagcctattcctttggattcgacttctcaaacagaacagcgttatcttataactgtccttaaagtgagcttgctaagcaaaagaaaacttgttcttcttttctttttaacccttgccttgccacattctgggccttggctttttcttttcttggagtgaatgaatgcagtacttattactatttttaaatttctgcctcactttaataatgataaaaggctgaatttttgccaacttgtccatctgtgaccacgtcgtgctaaagcacacttgacacaccatagagcctcagatcaaacctcaaaaccaagcagctatgttaaaaataacattgccctacaatcattatcggaaggttctcgcccagagtagttcccaggctgctattctttgtcccccttaagaccataaagacgccgttcttttttggtgggacaggttgtccaacacaagcaggacactgcctgccgcatcctgaagcaacactgtcaccgaggtcacaccgagaggacaggacaaggacacagggcaagactaagaagagcaaagcgcagacttctctcatctgggccaggagatggggactgggacctggcccgggcagcctgaccacactgcacagaccccggctccggctccgtgcagatctgggttcccccagtgggaggtgtcggggctctccagggaaatcggggttctccggggatgtcgggttccttcaggggggccagggttccccgggattcggggttctctggggggggggtcgggggcgcctgccgcgcacccaccttgacgcgctttcagcagcagcgagttggccacgatgttctcgagctccatgtcctggcgccgccgccgccggcggattctgcgagaccgaggagactgaggaggcggaacaggaggagacgccgccgcccccgtgcatagctcgccgggcaccaccctctcctcgagctccggacacgatcccgggaggctgctccgccgccaccactgccaccaagggcgccgccgccgccgcctccgcaggccctcaccagcaggggagcggtcggggcgaggggagggggcagcccgaccgcggcgggtcccagctgtcaccgctgccgcgctatcgccccggttcttcttggccccatcgccctcgcctcgcgcgcgcaactccctcctcagtgccctgcccccgggcagccccgagtcaatgccgtggctcacttcggacaggggctcactggcaggggcgcccgccgcggccggcgacccgctcccgggcgggctcggcgctaacggcttagctgaagagggagcgcccctcgccgccgcggccggggcactacagctcccagaaggccctgcgccaagagtacacggcgggccgcggcgcgtggcctgctgggagttgtagtcgctgagcctatcggcgagtaagccgagcctgcgggcgcggtgtttacttctcgcgagtcggaggtgctgcgctgttctcgcgagacgaggaagcggttccgcggcccggcacgtgtcttagggtagcgcgcgcctgtctctcttcgggtctcgggcccttgggcgcagcggggcgcgcgccatggcgaaggcgaagaaggtcggggcgcgaaggaaggcctccggggcgccggcgggagcgcgagggggcccggcgaaggccaactccaatccgttcgaggtgaaagttaacaggcagaagttccagatcctgggccggaagacgcgccacgacgtgggactgcccggggtgtctcgcgcacgggccctcaggaaggtaagcggggggcgcacggggagccggaaggcaggatctggaccccacgctgctctcggccggctgcgtccttctcggtgcgtcggtttcctcgttgagcggcacaggccgtgacaggcacacggcactgacttgatagtccgaaagcctctgctgttctctgagctggagtgacctggaaactctcgccgtcttggagaccctgcactcgtgttatttcggcgactcctccaaccgggtcaggccgagtcagtcacttcgggcggcgccctggaccaagctgcttgttaacccttccgcgtttactttgagctctgcaggtttggggacggtggataggggctgtgtaggatgctgcgtttgatgtttcatcggctctctcccgaagcgcgtaaccttgttccttgggaagtaactctatggaaactcattgcttcctagtttttttaacttttttttttttaaattttcactgaggaacatacattagcaggttggtgaaaaaattaaggcacagaaaggacaagtgcatttcctaaggtcacgcacctggtaagggctgggcatgcattcacatttcaatatctacaaagccttcttgctaccccgagcgcttctgtttgacctcgcttctaggttcggggagataaaggtaaataagacttgcccttgccttcatgagctcctgatctctgttcatcacagtgtgcaagctggatggtctttgaatcaaaacacatattatccttactgcgcgaagacgacagcctgtataatgaataggcaagatagacttacagctgacttcgataggagtccctcattacacacccccgggccggggtgggagaataaggtagtgtggttccctagaagagacacatttgtcttcaccactgaagcctcagttttctcatttcaaaagtagagatgatagtatacatcctacccctcgtggtggtttgtgagaattaagtaagatagcacatagagcacacagcaagtgttctctaaatactgttattcttaaccttcttggcttgtcgttcgagtcccgcacagtctggctgttgtccttgcttcgcctcttgcaactcagtttgtccaaaaggtctgccttacctccgaaagtctctaaagggccagctcaggttcaccacccaagctatgtaacccaaataggacaggttgctcaaacttctggtattgagcagatccacctccctgccctgtgctgaaggcctgggacggggacgggaattgctgctcctttttggatctccaatgcttggcccttggaagaaacacaaatatttgaagaaatcaaagatggaacctgagtgccttaggagatcccggtcaggaaaaagtgtaatagttaggaaagtccaaaaattcttctagagggagttacagtcaagttttgcaaggggagtgagctgttcatgggcccagggtgggcagaggacacacatgcaaaggcacattgtcccggtatggtgaagtgtg

SEQ ID NO: 316960 - DNA, 4001 bp, Homo sapiens
tctaggatctcctgacctcgtgatccgcccgcacccggccaggacctctttttaaattaggccacagtcctatctgagaataagctacattcaattttcttcccagattaaaactgcttcaacgaataggaaggtgaaggctgccagcacacagaactcagtcaaggctgtttattgcagcactgcgagcgacaagttggaaacaatgtttgtcagcgagcaaatggttgaataaacttgctaacacaatctggaatattatgcagctcctaaaaatgagttaaactgccatttattggatacactttggatgttctgttaagaaatgcaacttacagagaaatacacaaaacaggatcctatttttgtaaagacaaactagaaatcctgtgtacttattaatatcttagatctgtggaaagaagtggagtggaagcctccattacagtcttgccatgggggtggagagcgatgaccattttatatttttactcttgtgaatttaaaaagctaagaatttaaataaaaactgagtgtactgttgtgaagcccaccttcctctccagttgttctgcctgggggtgtgacagccaccagcctttctgcaggtcagctcttcacagacccctttccgaagcacagccaacacaaagtgtggccaggaatgtgcaacaggacccacacccggggccatctcgttctgcagagggaaactgagtctcagaaagcctagttactctgagagctatgactaccagtcagttctcctgcctttccctagttgagcatctttccacaaaactaccattctagagacagaaatgatgctgacttggtggtcactttcctggcaattaattccaatacaaaaccaccaattacttgaccaaagtctttttactcaagtattccacgtgggtcgttgctcttggctcctgtgttgttaagatataatttattaagctagcacttaccccttaatcacctagactgaaagtgatcttcacctcacctgcctgctctccttcaggaaagaactacatctcactgcccagcttttggccaatttggccctcagtggcttctctaatcaataacttggttctaggcacttcctccagcaagtacttgccatactaacttctaaagtagaactttcaaaaagcagaaggggcagatttgaggggaaaaaaaaaaaggggcactgtctcgtggccctcaggcccgaaatgtgcccttgtctaaacaaactcttcgcccagcagcagcacaggttcgactgctcttttgacctcagacgctggagaaggcggagtgaaggaattcgaggtcgagtggaaaaagcccgtgaacgggcaacacgcaccttgcgacacgaagtttcccgagcaccgctgtggccccggcctcgagctgcggcacggaaatgagtaaccacagctcctgcccagggcacacccggcccggctcggcctcgctgcgtgaccttggacaaagctcgagcttctttggtcgcttcttcaaccgcacaagttgcggctgcctctgcgcccgtgagcgccgagaccgtgaatgcgcgcgaggcgtcgccgcaggccctggaccacacgcgcacgtgggccaccgtaccttccgagccaaacgccccccgcgctgcggtcctctcctcctgacacggcgcccgcccgctccacgcttcccaagccctgagctggcagcctggcagcagagcaggccccagcggggcggtccgcgtcccgcggcggggaaccgcgagcccggagatgcccagctccggggccgaggccgggaaggaggccccggggccgggaaaggcccccatcggagcgggaggtcgcgctgccacctccacccagggagaccaagtgccccttacctgagagacaacgccaaagcaggaagactgcgccgcgccaacctcacgcactgagccgccatgactgccactgcccgtcgcagtcgccgcgcacgcaccaagcgtgcgtgcaggcagctatacccacttttctgccctactacttcgcctcagccaatccgtaatcgcttttcctgttatggacaggcaatagtcaccaataattgtgggtcacggaagagcatctttccccaccccccggtgggcggggcctgaggcgtaccggaggccctgaagaggtgaaaggtgaagtgagcattgggaggagcctcctgtgggcgtggcgatgccgggaggagccaatgaggaggcagcgtgagggggcggggccagcgccggggtggggcgcgcgcgtcgcgggccgggagggacttcagagcctggttttgggtaggagtgaggcggcagcttgtcgtttcccggcccgcacccgcccttgcgctgacaccgcgggccttcctttgctctgggaacgagcgtggggagccctgttcaccctcacaccccggctccagagcggcgcggagcactccatgtttgctaaatgaaaatgaagtctcggcgcgagcgccacccaaacggcggcgtagttgcttgagaaccgcggaggcaaccgcttgggagggcgccccgaccccgaagctgcttctccaggcgcccgaggcggagagaaggcactggggtctccgtctccaccagtgatttctggtgaaacaggaaacaaaacccgggaaacaaatgggacgaaatgttggcggttttgatgctggatgatgggaatatgggcgtgtgttttgtacctttctgttatcttcagttttctcaaaacacgaaaaacagactaagaacagcgcatagaaaacattggggcacaactaaagctcataaatgcacacgttttcataacctgaccgaggtccatgctgctgtagcgcatacccccaagaacagagggccgcgtgttcttatggccccggtgccggcccccaagcggggttcccgcaggagatagggcctggctcccgcttcagcaccgcgtggcctggagtgcagttctggcggccaagatctgagggctgtagcccgtgccctcaccaggatcccagacttagagtccctgccctccccgggatcccagggctcgatcctgtgccctccccgggatcccagggctggagcccatgccctccccaggatcccagggcgcgagctggtggcttctcaagcggagttttgcctgcttgttacattagtgaatgtaggaccacttgagtaaaggaccaaacctttattcttttgcttttctgccattgaaaccattcaacccatgctgattaatacctactgtttgccaggtaatatgccccttgcagaaagacgcaaacagctaaaccccaaatgggatgttgtacaggacaaatgaccgtgtcaattaataccaataattaagataatagtataattatgatgataatataattaattcgagcctggaggaaacaaaagaaagtggaactgaactattagagaataaatgagcttaaaagacgtcattgaatggaatgtgtggaacttacttggatcatgatagaataaactagcttaaacggggcatttgagagataggtgggggaaattggaatataaagctgggtattagatgaaaactgggagtatcgatacttttggtagggagcagtaacggctggtgggtaaaatgtcctaacctttagagatgcaaacggaagtatttacagcaaattgcccctatgtctggtattcgctttgtaaattctccatgaaaaaaaattcaaggacaggtgaaacacaagtggcaaatgttagtaacggttgaagctgggtgatgaatgccataggagttatgacgattttcttttgcatatgtttgtagttttctgcgataaaatttattttattttatatatatattttgagacagagtctcattctgttgcccaggctggagtgcagtggcgcgatctcagctcactgcaaactctgcctcccggttcaagcgattctcatgcctcagcctccctagtag

SEQ ID NO: 316961 - DNA, 4001 bp, Homo sapiens
cagtgagctgagatctcggcatttcactccagcatgggcaacagagcaagactccgtctcaaaaaaaaaaaaaaaaaaagacttgcactctaccggactaaggacagagatatctttctactatctgtcattttcttttcttttcttttttcttgagacggagtttcgctcttgtcgcccagactagagtataatggcacaatctcggctcactgcaacctccccgggttcaaaggattctcctgcctcagcctcccgggtagctgggattacaggcgcccgccaccccgcccggctaatttttttgcatttttttagtagacacggagtttcaccatgttggttagcctgctatcgaactcctgacctcaggtgatccacccgccgcagcctcccaaagtgccgcgcccagccctatctataattttcattaaggcttaatgttaggccgggcgcggtggctcacgcctgtaatcccagcactttgggaggcagaggcgggcggatcacgaggtcaggagatcgagaccacggtgaaaccccgtctctactaaaaatacaaaaaattagctgggcgcagtggcgggcgcctgtagtcccagctactcgggaggctgaagcaggagaatggcgtgaacccggaaggcggagcttgcagtgagccgagatcattccactgcactccagcctgggcgacagagcgagactcggtctccaaaaaaaaaaaaaaaaaaaggcttaatgtttagttttaaggaataaatgtaagcagtgtctaacacatagtagatgctctacagatatcaccgcagtcaatttcatagaaaaaaaaagagagaagctagctcacaaaggtttactggagatggttttgttgtggtttttgtagacaactttccccatttttccataattccataagcatcacaagcttttacagaaaaaggcagcgtaaagtattgggccaggattcaaatcaattagctcagccactggcagacagcagccatgctgattagcctcccagtctccctaagttaaaggagaagcacaaattgaattaagataaatatgacctaaggaatcaggggctgggtagttaaaaagtgtgcagacacttcccagatgccacgtaccaagaagagaaaggttcatctacaaagcacaaaatatttgcaatctaactacacaccgacttttctaaaaaaataaagaaaaaatggaaaggaaaacattgcaaattcattcctgggaccccaagttgtgtcctcaaccctcaacgctccctcccattcaccccctccccccaacagctaaatctccaaactgctttcccagacgaggcgacacacagtccttaaagaccttctgtatgagtggagttgcagaggtgaccttcagtaaaccgggacagctcgtctttccctggggacaggagagggaacggcgcgatggggacaggctccttccctacaagccagcccacgcaactgtgtgcgcgcaccttcccagcagcggccgaccgagaggcgccgagggccgcccaggcctagcgctcgggctgcacggaaactcccaaccctccggcgggctcgggcctcgcaacttcacaaccagccggcggaaagcaagaagatgcgaggtgggggcgtcagcagcctcacgaaacctaccatgggccaggcggggaacaaggcctcaacattcaccccagccacacttacactgcccaaccgaccagagactcgaggcgagaacaaaacaagcagaagacccgacgcctgggagagcttcccttgttccagggcccaataggagcacagggtggacgggggcgggtgtgcggcgagtgtcgcggatccccgggcgtgcccgcgaggcgcacacggagggacggaggggcgcgggggcgcgtgcacgcggcccgggagggatctcgcgccaggtccctcacggcgcccacgtacctggctgtagctgcgcgtcgggacggcggccgccgccgccagcgactgcggcagcagagaggcacggagggcagagtaggacgcggcggccgcggccgcggcagaggtggccacagcgggaggccccgccagcctcccgggaggcacaggcccggtctggaggccacgcgtctgggaggcagcggccgcggcggccccgagcagcagcagcaggcggcggcggcccgagacgcccgacgggatagagccagcggcggagtagaagggcaggcaggcggcgccggtgcgccggcagctgctgcagttacagccgcagccccggagcagcgccccgagtacccagcgcgtgccggccatggactccggaggcggcgcagggcctgaaggcagctgctccagcagcgatggtggaacggaagtggaatccagggccggttgggggtggggtgtgcctggcacatgcgccgcgggcactgggtggggggcctccgagagtcggaaggaggtggaggagagcgcgacgctccgcccagtctccgcccttgggcggggctgcccatggtttgggcggggctgcccatggtttgggcggggctgcccatggtttgggcggggctgcccatggtttgggcggggctgcccatggtttgggcggggctgcccatggtttgggcggggctgcccatggtttgggcggggctgcccatggtttgggcggggctgcccatggtttgggcggggctgcccatggtttgggcggggctgcccatggtttgggcggggcccggggaagtgggtgcaatcgaactgctcttttttcaggcggtggaaactgaggcccaaagtaagtgaggctaggggcctggcgcagtgactcattcgtagtgactcattcttgtaatcctagcactttggcaggcagaggcgggtggactgcctgaggtcaggagttcgagaccaacctaggcaacacggtgaaatcccgtctctactaaaatacaaaaaattaggtcggacgcggtggctcccgcctgtaatcccagcactttagtaggccgaggtagggcggatcacctgaggtcagcagttcaagaccagcctggccaacatggtgaaactgtgtctctactaaaaacacaaaaattagccgggtgtggtgacgggtgcccgtaatcccagctactcaggaggctgaggcaggagaatcgcttgaacccaggaggcggaggttgcagtgagccaagatcgtgccaccgcactgcagcctgggcgacagagtgagacgccatctccaaacaaacaaacaaaaaaattaggttagggccatcctgctctgggtagggccgagagctgtagcacaagtctgtgctgccctgcgctgtgccaccgaaacccgtggtgtgagtggctaaagaaccctttctgaaaggaattgtgataccttggttataaaaaaatcgttgggataatatcagagatttggtaccccccgaatttgaggtatgtgaggaaggagaacttcgttgttttaaaatgaaatataggcctggcgtggtggctcatgcctataatcccagcgctttgggaggctgaagtgagaggatcactggagcccaagagttccagaccagcctgggcaacatagggagaccccgtctatacaaaaaataaataaagctgggtgtgatggcgtgggcctgtagtcccagctacttgggaggccgattgcttcagcccagaaggtagaggctgtggtaagctatgattgccaccactgaactccagcctgggtgacagagtgaaaccctgtctctaaaaaaataaaagaaaacatatatatttattatgtactgataatacataacaaaggtgaaccctcccctaatgaaactgtattcacaagtgaacacacagagatttgcacacacatacacaaagactggttgtgcagcttttctcctcctgagccaggacttgtcaaagacaagcaaaaggaagttgttagagtaaaaaataagagaaagctagtatttt

SEQ ID NO: 316962 - DNA, 4001 bp, Homo sapiens
cccagccctatctataattttcattaaggcttaatgttaggccgggcgcggtggctcacgcctgtaatcccagcactttgggaggcagaggcgggcggatcacgaggtcaggagatcgagaccacggtgaaaccccgtctctactaaaaatacaaaaaattagctgggcgcagtggcgggcgcctgtagtcccagctactcgggaggctgaagcaggagaatggcgtgaacccggaaggcggagcttgcagtgagccgagatcattccactgcactccagcctgggcgacagagcgagactcggtctccaaaaaaaaaaaaaaaaaaaggcttaatgtttagttttaaggaataaatgtaagcagtgtctaacacatagtagatgctctacagatatcaccgcagtcaatttcatagaaaaaaaaagagagaagctagctcacaaaggtttactggagatggttttgttgtggtttttgtagacaactttccccatttttccataattccataagcatcacaagcttttacagaaaaaggcagcgtaaagtattgggccaggattcaaatcaattagctcagccactggcagacagcagccatgctgattagcctcccagtctccctaagttaaaggagaagcacaaattgaattaagataaatatgacctaaggaatcaggggctgggtagttaaaaagtgtgcagacacttcccagatgccacgtaccaagaagagaaaggttcatctacaaagcacaaaatatttgcaatctaactacacaccgacttttctaaaaaaataaagaaaaaatggaaaggaaaacattgcaaattcattcctgggaccccaagttgtgtcctcaaccctcaacgctccctcccattcaccccctccccccaacagctaaatctccaaactgctttcccagacgaggcgacacacagtccttaaagaccttctgtatgagtggagttgcagaggtgaccttcagtaaaccgggacagctcgtctttccctggggacaggagagggaacggcgcgatggggacaggctccttccctacaagccagcccacgcaactgtgtgcgcgcaccttcccagcagcggccgaccgagaggcgccgagggccgcccaggcctagcgctcgggctgcacggaaactcccaaccctccggcgggctcgggcctcgcaacttcacaaccagccggcggaaagcaagaagatgcgaggtgggggcgtcagcagcctcacgaaacctaccatgggccaggcggggaacaaggcctcaacattcaccccagccacacttacactgcccaaccgaccagagactcgaggcgagaacaaaacaagcagaagacccgacgcctgggagagcttcccttgttccagggcccaataggagcacagggtggacgggggcgggtgtgcggcgagtgtcgcggatccccgggcgtgcccgcgaggcgcacacggagggacggaggggcgcgggggcgcgtgcacgcggcccgggagggatctcgcgccaggtccctcacggcgcccacgtacctggctgtagctgcgcgtcgggacggcggccgccgccgccagcgactgcggcagcagagaggcacggagggcagagtaggacgcggcggccgcggccgcggcagaggtggccacagcgggaggccccgccagcctcccgggaggcacaggcccggtctggaggccacgcgtctgggaggcagcggccgcggcggccccgagcagcagcagcaggcggcggcggcccgagacgcccgacgggatagagccagcggcggagtagaagggcaggcaggcggcgccggtgcgccggcagctgctgcagttacagccgcagccccggagcagcgccccgagtacccagcgcgtgccggccatggactccggaggcggcgcagggcctgaaggcagctgctccagcagcgatggtggaacggaagtggaatccagggccggttgggggtggggtgtgcctggcacatgcgccgcgggcactgggtggggggcctccgagagtcggaaggaggtggaggagagcgcgacgctccgcccagtctccgcccttgggcggggctgcccatggtttgggcggggctgcccatggtttgggcggggctgcccatggtttgggcggggctgcccatggtttgggcggggctgcccatggtttgggcggggctgcccatggtttgggcggggctgcccatggtttgggcggggctgcccatggtttgggcggggctgcccatggtttgggcggggctgcccatggtttgggcggggctgcccatggtttgggcggggcccggggaagtgggtgcaatcgaactgctcttttttcaggcggtggaaactgaggcccaaagtaagtgaggctaggggcctggcgcagtgactcattcgtagtgactcattcttgtaatcctagcactttggcaggcagaggcgggtggactgcctgaggtcaggagttcgagaccaacctaggcaacacggtgaaatcccgtctctactaaaatacaaaaaattaggtcggacgcggtggctcccgcctgtaatcccagcactttagtaggccgaggtagggcggatcacctgaggtcagcagttcaagaccagcctggccaacatggtgaaactgtgtctctactaaaaacacaaaaattagccgggtgtggtgacgggtgcccgtaatcccagctactcaggaggctgaggcaggagaatcgcttgaacccaggaggcggaggttgcagtgagccaagatcgtgccaccgcactgcagcctgggcgacagagtgagacgccatctccaaacaaacaaacaaaaaaattaggttagggccatcctgctctgggtagggccgagagctgtagcacaagtctgtgctgccctgcgctgtgccaccgaaacccgtggtgtgagtggctaaagaaccctttctgaaaggaattgtgataccttggttataaaaaaatcgttgggataatatcagagatttggtaccccccgaatttgaggtatgtgaggaaggagaacttcgttgttttaaaatgaaatataggcctggcgtggtggctcatgcctataatcccagcgctttgggaggctgaagtgagaggatcactggagcccaagagttccagaccagcctgggcaacatagggagaccccgtctatacaaaaaataaataaagctgggtgtgatggcgtgggcctgtagtcccagctacttgggaggccgattgcttcagcccagaaggtagaggctgtggtaagctatgattgccaccactgaactccagcctgggtgacagagtgaaaccctgtctctaaaaaaataaaagaaaacatatatatttattatgtactgataatacataacaaaggtgaaccctcccctaatgaaactgtattcacaagtgaacacacagagatttgcacacacatacacaaagactggttgtgcagcttttctcctcctgagccaggacttgtcaaagacaagcaaaaggaagttgttagagtaaaaaataagagaaagctagtatttttaaaaactccttactgtggaaaatgtcaaacagaagagcagaatgaatttccagaacttcataaattgtcaacacttttcagtcttgtttcatctatcccctaccaccatcttccagaccttattttctttgctagaatattttaaagcaatgggtattacatttaaagtttgacttgtttaacctggactacttttaggtaaggaaaattcagtatttcttagaaaaccctttccccaaccaaaaaacaaagaacaagaaaaaaattgataggcttggctctatgaacctggagtatcaaagaaaaaggggtttagttttgttttttgggctaaaatacagtccgacggagagtattgtcatttttatacaaaaacagggacaaaagaaaaggcaacagtgcaaat

SEQ ID NO: 316963 - DNA, 4001 bp, Homo sapiens
tttctcaaaatggggctatggaactatgcatagaaaaatatgcaggtaaatattgtaaactaatctagtgttaaaattttgattttggaatttcttctctttcttttttgtgagtttaaagcactgtcagagtaaacacatagggagaagaaagtttttctcttgtaggttttaaaggcttaagatatttactcataaacaataaatttggggggagatttgaataaacagatgcaaatcaaagtactaaaacttttagttttgtaaacaaccctccaaatcataaggcaattcaaataataacaaactaagttaatcataatgaatgtaaacattttaaaacttcattgttgcaaaaaatcttggtctactccttagcaataataatttctgcatttggtgaaacttggtggccactaagattgccataaccaaataatcacatctctagaaactgaaacaagattgttgccaacctagtagaacacaacatcagtttctgattttcagtctccaacctcaccccaatatgtaaaattctttaccggtaattgccatatattaaaaagaacctttgctgtcaactgtttttatcctttaacaaaaactaattttttaaatcctcctgatattttcaaatactttctttgaaataaaaaatatttaagtactttcattgaaatcctctctcttcaccactcacacattctaatataatatagggacattgaatcatcacaagagatcattttatttaaaaattgagaatataaaaaggaattacaatgaaaaatattggctaccttaatgatagcaatcataaattccattcccgacataatgatatctgtttttaacaaaaaaacaaatcactttaccaatgctttcaaaaacttgttaacattagatcattgtcaaaagccccaatacctgaataatatatttctatattactctgcagaatctatcacatttaaagtaataaatgttaaaaattattatacaaaatctagatctcagtctgtacatttatagaggagtaattttttcaagcatcatcctagaatttttatgggcaatttaatagagaaattgatattgaatgaagcctgcaacctcctcaggaatgggaggaagtcgaagttagtctttattgctgcacaaccttccagttgaacccaacctcgctgaattcatgcactcaacattttctggtgtaaatatctacataagtaatgataaatgctacactggtatttcaaggataataaaccagaatttaacttttaatctttgctcaaatgctttgaacagcatagttttatctttttccttagcaaagaagtagacaggttatattagtcatcacacactggaaggaaaaaaagaccacttatgtgttagaaatttggctttgagaactcagtctattttcccaagcacaatgacccagtttttaattgatagctgttaggacagtatcttaggtggaggagcgtctcatgaagcatgtaggagttgcaaataagagaggcttgctttaactggagaactgagaggtgttcagatggtgagttaggaacaaagagcaggagaaggaaacagcaatgacttacctgtaatactttggtcaaattgttaaatagagcctggccagcactcactttgtatttgacgcctctgactgtgccatttttgcttaaaatgttgactcttcttgtaccaaaacccttctcactggcagcccttgctaacaccagcaagctatcctggtcattctcattctcatcaccttctgactctatgtggccattctgctgtccatcggaatcacctagtccatctatcccacagatactggcacattcagaatccagagagcctgacggttgcccatcttcatacacttccttcagaactcgcccactgtgagaggacgcgatccgaaaccggactttccgtggcctgtcactttctggcttcatctcccttttaagcatggtcacctccacccatatgaacagtttacagcattctggacccgttgttactgcactagtccacttgccagatagcaatatcagagccaattctagtgatggcagcactcctgtgaaactaacatcaaaaggaaagaagattcccaaggacttacagtgtgtctctgctattaataataaatgtgtgtgtgtgtgctatggttacctttaaactaaaacccgcaaaatgatctcagcctttaaatattaaatagccatggtggactctttaacaggacaagtgcaagaaagtggcatgcagcgaatctgaaaatatgtatggggcaagaaaatgaaaggcttgaactttgaagccaatggtgggcattgaaaaggacctgagcagtggacatgtctctactattcattgtccaaaccagaggttagaggtaaaatgtggaaccaagtttgtaggataagagcagtcacagttttctcacaggacttatttattctttaaagggcagtgaacacgctgcatgctgcatgcctgcatagagctattactattagttcttattaaatcatcagttagatttcatctacattgcataagatgaatgtccaacttacatctgtctttaccaagctaaagaatagcttggtaacaaaaatgcgattttttagcttttttgaaaaggagaacttttgctttgttgctttcccccttctgctagtagaaaatgttgttctctttgacagagaaaaggtttcagaaagaaaacatatgcaacagtaagggaagaatggaaaaaccctccaggctagccagatcagccaaagcaatccaggtaatcagcattgataaatattatatccaaatcacccatgcatagagaaagttcctcctcatgctgtgctcagtgtattttctatcactttggcaagcacctaaggaacctgttacgatatataaggttatattgaaatgtacactatagtgagttccccaagctgtctgcacctcctgagggaggaaagcagcttgcgtgcataaagtaccacgtttttaatttttatagttttggtctcattatgaacttaatttacatttattttagaaaattcagaaaataatagcaagaagttgaaaataaaatcatgaaaaatctcactagagatgttaataattttgtgtattttcttccagtgtataatggcagagatgctccatggctcacaaaaccagattgcccagactcttgaatttaagggaaaagggaacaagtgcctagcttttgacaataattgtgagcaaaagtgatgcatcatttacgcaccaagtcaattgagacagagcctgccctgtctgtgctatgtttcttcctgcctcaactgctagctgcatggccccagagcaatctggaagcactacactgagcttgtcagagttacagagaaattaacaaccacgaccaccctgcattagatgatgtcatgggaaaaaataagcctttattgtgttaagcaatgaagattgaaatttaagagttgtttgttagagcagatatcattactgaatctgattaatatgctctcatatacaaaaatatattgcatttatttagtatcttggttttttcagtcaaacttataacatgaatcatttcccataccattatttctgaaaaacataaatttaatgtgtgtattaaaaaacctactgatagccatgttgtattttactttattctttctggattgctagatgttcataatttaaaatatttggtaaaataatgccataattaatattcttgcttaaaaatcagtgtacatatatctggttgtttagcataaatttatttgggtaaaattgatgaggtaagaatttttacaaatttaaagctcttgaaaaaaattgtcatttgcttttaacacaaattgtataacttacacttctactagtatatgagtgcctgttttattgcacttttgccagtgccaacactgaatacaggc

SEQ ID NO: 316964 - DNA, 4001 bp, Homo sapiens
gcaacaccaattacccagatgcttaggccaaaaactcaaaagtcccactcaacttctttttttctctctctcataccctgccatctctacctttgaagtatatgctaaatccaactcctcagcacctctaccactaccaccttaatctaagtcatcgccagtgcttacaaggactactgcaaaagcctattaactattttcctccactttccataaaacagtccattctccaacaacagggtgatccttaaaaacataaatcagatgtctcgtgctcaaaaccatccaatggctcttcagcacactcaaaataaaatccaaatttcctattatggcctataggcctactgtgaccctagctatccctttctgacctcatctcttatccttcttcactcccttccagccatagctgtccttgctgtttttggaaggtgccacttgagaatatttgtacttgctattgctttgcctagaatgcttttctccaagagattcacagggcttgctccctcatttcattgatttttctgcataaatattaactcagaacagcctctcctgactgcctgaattgaaaaagcacaccctagcctcttacctagcttccctttttcttcatagctcttatcacctaacactataacatctccagtgcttaatgaactgaaactttagttcaaggaatgaatgtacatatatgaatgtcagaaatcactgtctgagagtattattaataactttagtcttggtacaatgtgtatctcattcttcatgacaccattctttcttttccaaattaataactctattttaaggaccaactaagtataaattaaaatgaagaaataagatcacctttgtgaggtgaatcgggaaaagtataaatggaatctaaccaaactcataaataaagcaagcacagaagtttttatgtatacttatatccagggcaaaggaactaagaatcttaactagattccatacatgtgcctagcaagaatatttataaaacaagaattataaagtaatagattagagccgagactgttgagccagaccacctgggtgcaaatatactggttctgattcttagtagctataaaaaacttttctgcatatctgtttcctcacttatataataaaatggagacaataataactgtacctaccatgtagtgtgccatacagaaaaaagcttgtcacatattaagtccttaaataaatactagctactattatttctttataatttataaccaaattccttatcaactggcactattaaaatatgcaaaccttgatgggcaaaacccaaattatggtttatattttcaagcttctttccatgaaaggtaaaggatttatattgattgaaaagtttttcccaaccaaatactgaaaaaaaacatatttgttactgaggctgaaagccagggaatcatgaaatggtaaaatataaacgtgaaacccttaatccatgtgcatatcaacctattgtacaaaataagaagttcaacacagtttataagtatgaaaaatcacaaacacttacttttcttaaagattaaaatttaaacctgcctaaattctctcctacatcatatgttcaacattttgaattttataacttatcttgtgttttatgcttttcataaaacaacagtatttggctgaaaattgtaccctattttattacaataatatagatttaaccaaaacaaaacaaaacaaaaaaacatgcccctcaacagatagatagcagccaattaccttaaatatttagggtcaaaaacgataagaaaaacactgagattttttcaagctcattaaatacgtaatatgggatgcagttaagtcctagagaacaaaagccagtgattaaaattagctgttttcttatctggtaaagaagtaggaaaagtttttaagtgaaaagcttacagtaaccttagccacaaacgaagtgtgtaatctctctggagaatcagggaatcatctgttgccatggagtcataatgccttcagctaaacccgacctcataattaacagtgatcgacagcgcaaatggctaacatgttaccaagtatgaaataaaattactgaattttcacagcaaacaatacctgtgcttgttttaatctaaatggtttcaatatctgcattccaagtatttattctttgttagaaaagctaattggatactcagtatttatttttatttaaaaatcacagatgatgaaacaaaagctacaagtaaaacaagtttaaaaaaacaaaaacaggccgggcgcggtggctcacgcctgtaatcccaccactttgggaagccgaggcgggcggatcatttgaggtcaggagtttgagaccagcctggccaacatggtgaaacccctcctcgactgaaaaaaaaaaaaaaaaaaaaggagccgagtgtgattgtgggcgcctgtaatcccaactactcgggaggctgaggcaggagaattgcttgagcccgggaggcggatgttgccattgcaatccatccccaggcgacagagcaggactccagctcaaaaaaaaaaaaaaaaaaaaaaattgatgggcccactactacagaagctcaagtttgagctgtgtttaaattaaagcaaaaacacgtagaagtgcaaagtatataaaataaaaagaaatgatgattctcaaatctcattgaccttttcagtcttatttttgaagtgagacctcacaaaacgatactttcaggtgtaatacaaacacaatttttagtaatgagtgtgcttaaagcaatcctctcagtggtgtatgctccccatcaggcagttaaaaaaaaagaaaaaaaaacccgcatagcttaatgtttattaaatatgacagcgaatcacttagttgtgttataacagtttattatcatggatttaaatgactatgtttacatgtttaaaattatcacatcactagttcttgctagcttttgcattttctcctgtaaacattgtttttacagataagcttaggtaaaatagaaatacaccaccttctttatcaataatgtagcacacaatatattactaaagctggcattttcttgatattcaagaatttatgacaaggaatgggatcctggcattaagaataaaggggaaaaaaacaagtcatctcatcccaaaaccaggtagaaagttgggatgggaagtacgtgtattagcaaacgtttttgaaaccaaagcaactttcatgcaaattaaactttctatagaagttaaaaacccaagagatactgctgtgatgacaaaacataagcaaatggccccaaatgaagcaagtcctttggagtaaatgttaagtagtattcacatagaactgctttctgcaatcaggaagggctggaatggaaaactcaatgccaaagagagaagagaagttagtgtgacccaagaggtcttgaagtaacacttaacagcaaatatcaaaccaccccaaccaacgcctccaactggaagctgccccatttctccatcagcagaggaagacatgagggactggctagggggaaactgggaaacgcgtactaccgagaagcccagagccctcaacccgcaccttcagcaggagtggccaaaaaggagtttgaggcggccccagggcgggagaaaaatcaggacgatgataccacgcccttgtccttcccacccttcccccgcatcctcagccctgcagacccccgaagaaaagaccagttcttagggggtcgcggaggctgagaagccggcggcccgagcgccctctttacctggtcgcagaggcgcggccaggcagggagggtgcgtgagcgtgtcggcgacctgggccgcctgcgccttcccgcccagtccgagctggaattccaaggctgcctctgggagctgctgcccgcagaccactcgcctccacagacgccaggagaaaaacgacagccaccttatgtggaaaatactcgcgccggccgtcattcata

SEQ ID NO: 316965 - DNA, 4001 bp, Homo sapiens
taaacccgacctcataattaacagtgatcgacagcgcaaatggctaacatgttaccaagtatgaaataaaattactgaattttcacagcaaacaatacctgtgcttgttttaatctaaatggtttcaatatctgcattccaagtatttattctttgttagaaaagctaattggatactcagtatttatttttatttaaaaatcacagatgatgaaacaaaagctacaagtaaaacaagtttaaaaaaacaaaaacaggccgggcgcggtggctcacgcctgtaatcccaccactttgggaagccgaggcgggcggatcatttgaggtcaggagtttgagaccagcctggccaacatggtgaaacccctcctcgactgaaaaaaaaaaaaaaaaaaaaggagccgagtgtgattgtgggcgcctgtaatcccaactactcgggaggctgaggcaggagaattgcttgagcccgggaggcggatgttgccattgcaatccatccccaggcgacagagcaggactccagctcaaaaaaaaaaaaaaaaaaaaaaattgatgggcccactactacagaagctcaagtttgagctgtgtttaaattaaagcaaaaacacgtagaagtgcaaagtatataaaataaaaagaaatgatgattctcaaatctcattgaccttttcagtcttatttttgaagtgagacctcacaaaacgatactttcaggtgtaatacaaacacaatttttagtaatgagtgtgcttaaagcaatcctctcagtggtgtatgctccccatcaggcagttaaaaaaaaagaaaaaaaaacccgcatagcttaatgtttattaaatatgacagcgaatcacttagttgtgttataacagtttattatcatggatttaaatgactatgtttacatgtttaaaattatcacatcactagttcttgctagcttttgcattttctcctgtaaacattgtttttacagataagcttaggtaaaatagaaatacaccaccttctttatcaataatgtagcacacaatatattactaaagctggcattttcttgatattcaagaatttatgacaaggaatgggatcctggcattaagaataaaggggaaaaaaacaagtcatctcatcccaaaaccaggtagaaagttgggatgggaagtacgtgtattagcaaacgtttttgaaaccaaagcaactttcatgcaaattaaactttctatagaagttaaaaacccaagagatactgctgtgatgacaaaacataagcaaatggccccaaatgaagcaagtcctttggagtaaatgttaagtagtattcacatagaactgctttctgcaatcaggaagggctggaatggaaaactcaatgccaaagagagaagagaagttagtgtgacccaagaggtcttgaagtaacacttaacagcaaatatcaaaccaccccaaccaacgcctccaactggaagctgccccatttctccatcagcagaggaagacatgagggactggctagggggaaactgggaaacgcgtactaccgagaagcccagagccctcaacccgcaccttcagcaggagtggccaaaaaggagtttgaggcggccccagggcgggagaaaaatcaggacgatgataccacgcccttgtccttcccacccttcccccgcatcctcagccctgcagacccccgaagaaaagaccagttcttagggggtcgcggaggctgagaagccggcggcccgagcgccctctttacctggtcgcagaggcgcggccaggcagggagggtgcgtgagcgtgtcggcgacctgggccgcctgcgccttcccgcccagtccgagctggaattccaaggctgcctctgggagctgctgcccgcagaccactcgcctccacagacgccaggagaaaaacgacagccaccttatgtggaaaatactcgcgccggccgtcattcataatccggcggaccggaaaaagggaagtaacgtcacttcctactgtcgcactgccaaacgtttcccccgcccctactgtgggaacctttgttttcctgctttcggagccggccagtgcgggaaccgtttccgaagggaccaccgggaacagacggatcggcagggcggggcggaacggtgagttatgctgagcgactctgctcctggcctcctggaggctcgagacccccgcgccaggagcgaggtgggagagtagctacgtggggtattagtttcctcgctcctcaaggggaatcataatttacgggcggttgcgtgccctagactgactgctctcccctttcagtgaggactgtgcttcctccgagggagttgcgggccgggacatgcggaccgagcatatttctaggtctagggacaagggacttggaatcctgcctcggactttgtcggagggttttagtgacttctctacgtagctccctcattgtctctcatcttttggctcccctgtcaaggaccatcccccattctaggacttcgatgtgtgatgctttgatcaaaggattgacattccttttctaagtgtttgctgtcagctttcagccacttgattggtttggaatcggagccttttctcctgcgattccaggtgtccctaaggtatcagtgttatccagaaccaagaactcagtggaggaatgaaaaaggcagcatctttaaaataatgtttattggaaggggttgcaagagcttgcgaagtcatgaagaacaaagttttttagagccattatgaaatggcaacgataatactgcactctatgtgaacagtttctgtttccttcatctggggcacgtgcatatgatcaactttggacttcttttgagattgccaggtagggtgaaaaatggatctaggagaaagcacatacttatatttatatatgaatgcccaatttagactggagagatcacagaagccttataaggtgacatttacgcaaaaaacctagttcgttcattcgataaatatttttgagcccttattaagtttcaagcactagggaaataacagtgaacaaaacaagttcctgctgtcatcaagtttacagaccagtgggattaatgaattaagcaagacaggcgaaagattgtgagaattttacagataggaacattgtactacaagtccccagtcgtgaaagaggtgattgctttgcttttgcttttttgatgtttggagttttttttgtgggggcaggggtgagttacttttgtgatttttgctgaagggaccttggaaatggctacaattgtgtagaaggagagataagaccactatactttgatcacttaattccagtaattctatagccattattttgttgtactttgcaaagtggcaaagagataggcaaaaagataaatatagactctgcccttaaagtactcagagttttgtaggggacataacacttgtgccaaaaaaaaaaaaaaatgcttcaagggagaaagttgcaataccatgaaaaagcactatgagatatccttgaatggagagactattaatagggtttggaatggagaggggcacagcagctgtcagtcaaatcttcatgagaagtatttgaatagggtcttgataggatgtagatatataaaaataggtaaagagcttcctggacaaaaaaaataagagtggcagggtcagctagctataaggcagatctggggatgatgaatgataatttttgtgccagttactgaatcttcttaaatgctaggccaagaaatttggtctttatttcgaaggtggtagaaagccctaacttctcagcaagaatttttttttttattttaatgaaaaagaagaaaactgggtttcaggaaaattcatatggcaacaatgttgaagtcaaggaaaataacgaggttattgccatagttcaagtaagctaataaaacctgaatttcagtagtagcagtggaagtgaaaagtaggacaagtgtgaaaaatattgccgtcagaat

SEQ ID NO: 316966 - DNA, 4001 bp, Homo sapiens
aagggtcaggtcccggcttgtccattccagaacttccaggttcgtttcttctccagatgggaccactgcaatgagcaaggattctggcccctgggtgccccacgccttggcgttgcctggtctgccaggagcgggggatgtgagggaggaggccctccctcataagggggaaatctccttgtcatcgttggctgaggccggcgacagggagtcctcatcctcggagcgcgcgtagtgcacctggctcccgacgcacttgcagcccgcgtgactgttcctctgcgtgcccttcccctccttcttgtgcttcactcggcggttctgaaaccagattttcacctgcttctccgacaggttcaggtaagtggcgatttcaatcctccggagtcgagacaggtacatgttggaagagaattctctctccagctccaggagttgcgtgctagtgaacgccgtcctcatcctcttgccattgggtacctggctggcgtcagagcctcctgcggaccggcgaagagagggtagagaggtaaggctcgggcaaggtgctcccaccccatgtgctaaccaggacgcatttcagggacccacccggggaagcccagccgaacatctgtatccctttcccatttcaaggcacgtggttgcttagcggggaagaaaagagacgtgcaaagcaaataaaggtcttcgatgcgcaggatgcgaagtcacaggattaaagagggatgggggcttgcactatctgatcgcctccctttgagccaagcggagaagcgcgcaggcttagccaaaaacgtcaagacgctttagccgccccgacgcggggatgccacacaggttcaaacacacccaccccaaatcccaagcagttaacctctggtttatccgccgtgacgttcgaggtccctaaggccccagtattaataaggcaatactcgagcacctactactaggagtaaaacgcaccaggctgagtggagaagctggcaaactaacttccactttcgtggaacttctgtggctgactctacggttacactaaaagcccgtcctctctcttcaccctgtccccgggctcccacttcctccactggaggtggaaagtttgctccaggagcgcgaaaggcgcggagcgcaggtgccccaagaccccgccctacccatggtgaggcagtggaatctccgcgggtccgccacgttgtaggtggtggcggtgcagacaggtgcgtggtgctgcgggtgccccaaggccgccgcggccgccgccgccgctgctgctgctgccgccgccgcggccgagccaggctgctggggctgatgatggtgatggtggtgctgcggcgggtggtggtgatgatgcgcatggttcacccgcgggcaaaactgcgcgtccccaggagccgaagagaactggcccttaagcagaggcagtgcccctgcggcccctgccaccccactgcctccggccccggtaaccccggcccctgcgcccccgctgccggcgcccacagacccccgagaggagtgcaggtgcgaagtgacgcagagagggcacacgcagaacgcgccgctcttgcgggacgggcagccggggccggacacggacatcaccaatgggggcggcatgccaagcgggatgaagaaatccggcccggggtgcggttcaggcagcgagggcgcaggccgtgaggtgtccttgatgatgagcgagtcgacatagaaggagcgcgacatgtcgagaggggtgggtggctggaagccccggcagttcgcggcgacccctctcctctagtgttctaagctctgccctgggagccgcgcagacacgggcagtcaagcccttggggacgcagaggtgttggcgtctgggctgggaacaaaggggtccccggagagggctggtcctcacgtcccccgcccggcgccccggctcgggtattttatagccccccaccctggcacgtgatgctgcggagtaccgctcggctcaggctcctcggcagctccgcaccctcgggataggctgcccgagtcacaacagaagccgcgaggaggggcgggcgcgcggcggggaagaactcgggggagggggatgggggagactttgcaaagtgtaggttttgttaatttcccggggaggccggcctcctccccctctttctccacgctttactgagaaatcacagcgctgcatcctccatcccaccccctctcgctaccctggccgcagcccaactcttccccacgccccaccgcaaagcgtaccaggtggggacttggaggcttatttaataggaatgctcagtgtttccagctcctctgtggtaggggtggctgcggcgcggtgaagtgtgaggcctgcggtttggagcaggattgtgcgggcgacggactggcagtcgtccagtccctgagcgcagctctggccacggttacacctacccctgtccacagcttttggacttggcagaggtcattcaggtggttagttcaggactgtccggcgcagaactgtgaggcctcccagctaagaaaccgtcaagcttttcatgctgatgttcgacaaggtctgaagtgtctttgtacttggggccctcctggggccactcagaccaacgacccttccttgtttccctttctgatcggcacctcccacttccgcagagagagagagatgttgaagagtcacccttttctttctccaagtagtaacaccatggcattccagggcaatcctacaaactccatcctgaagattttggagggaggacctcaaacaccaagccctcctaaagacgcagcagggattagatagaccttcgctctgggtctgaggatttcctgtccctcatttttaccaatcatgggcagcttagcaaggctaaccaggaagcactctttcctctgcatcttaagaacctaaaaaggatgaagaggattcagccatccagggaatcttgcctctgattggcagaagtggctttgtaagggaactctctctggtccatggaagtcttgcacaccccttactgcccgagagagggtggctgccaaactattgggactatttatcttcggagaaggcaaggcagcagaggtggccattttctctcttcatttccccctgcagaaaagcgggctggggccatgtggttgggcaatagttagaagtctgatcctttttccagagcagctaacttcaatcctgagttcatgatggtgctaagaaacttagagacaggactccctccacctgagagaacaaggtgcccaaatccaggagagcactagctagaggcacggctctatctttccatcctctgtcttcccctctccatctctgtgacagtctctcttgcctgctagagaagtgtaattgggttgtagggatgcccggctctggggagcccaggatttatggatggcaattaaagttttatgaattgcagctgaggctggttattgagctatttgaatgtgattagaattcaattagaaagcggttagtggacggtgggtctctggagtgtaaacagacagctattccagaaatgtgctaatccaacatcttgtgacaacaattaaggagtctcagggcttaacatggggcagctcagctgtaactacttttgtaccacaaggtctgcagacgctcaggctcaccccagcccgcccttgttcatgactggaggatctaggcaatccccgaaatcatttcagccccaagaagaaggcttggagccactgatggagaatggcaataaaaaacataccctgctgaatggcaggatattttttacagtcctaaactgtccaaatagatgactcgattccccccattcactttgcaactatacaagcatatatagatatagatacagatactctttaagaataatagctttctctcttttcctcctctgggttaggtcccaggttatccacagtctgttttgggctgatggtttgagtcacaatgttcccagcagtttgggatg

SEQ ID NO: 316967 - DNA, 4001 bp, Homo sapiens
gtacctgaaatgatcactcttaaagaaaaaatatgtatagcaattttaggaaaagcaacagaccacttctacactctgaaccaagataaaaaaaaattatatcaagtgcttctatgcttacccatatgtaacaggaaagtttgacgtttgtacaaagacagttctagtaagtggtagagatgtatgaaatcaaatcaattcattaaataggcatttagtgaaattaccataggagaactgatcctaaaacatcactattgatatgttataaatgaagttcaaatgaaagaaaaaaaaatctgtcctatttaaaactcagcactgtttccataggttccaaatcaagatgccttcaaccagtcatcgttaagtgagccatacaatcttctggcttacttcagaagatgtaaactgtttatcgagtgcaaaatgaaagaataaccatgtgaaaatcagtgagcagagaaagacgcacgaaatccatagcctgaaatcacatgaccacattgcaacgcagcccctcacaccattgtcactgtcaggcagctcaggcgacagggtgcagacaggcgcggagaccgcggtggccccctgctcacgctttctccaagagccgcagtcctaacgaaaacagaaatgggactgctaagcagtaaatcatttgtctctctcgcacacacgcgcacacctcgtggagccgctgggcagttagccggctgccttctctgggcagcccagcgatcgcagcttttgctgtggaggaggacgcgcctcttacccacgccgcagccggccgggtgaagttgccctgaagcccgccaccgcctccagccctgctgcctccggggtccaggcatcccccagctgcgcccgctcgcttgcctgccggcgcgccggaggccgcagcgctgcacgcggctgatgggctctggggcccaggcgccctggccgtgggagaccagcggccccggcgcgccccgcgcgttctcacggcccggccccgcgagctcagcagccggcgcggcgctgctcggcgcccacccccgtctgtgctcctccctcgggcgccgcgggtcccccgggccctgggccggcccctcgggcgtcctctcctttcctctcgctcctccccagcgtgggaacccgatgctggcttcccagggctgggcaactgggagcgtaccgaaggtttctcaggagaggaaggagacccagcccaagcgggggtcccggaagagggaccgcctgtctgaagaaccccgacccgcgtggggatgcagcgaccacttacttggtggcttcgcacacctcggggctgtgcttccggatctctagcagctccagggcgcgcctcgcaaatccgcactgcgaatggagaaagagagcaggcgtcaggggtggcaggcagtgagcgggagaggggaccctgcagtggcacctgtcggtccccgcgcgagtgcaccctgggcactcgcggcagcggcacttacgcttgggtcgctcatgtctacctgttcaacaggctaggcgggacgcggcgtgcctcggaaactgtatcgcccgcgtggctcccagacagtcctccttgcctttgtctctctgtgtctgtgtctccctctttgatcaccccaaaggaacccttgcagttcctttccataaggcattcgattttttcagacctctgcccgcctcctccccttctccgcaccgaaagactgaaaaagaaagtagcagccaaaacgcaccatggtgagatcacgcccggctggggtctctaagctcctccaggcgctccctcccccacaggtgtcctccgcctgggtctgttccaggctgctcgctgctctagcgcaggaaaagtgtaggaaaactctgcactgaaacctgcttctggaaaactgactctgagctgagtcccacccactaggctcagactagggcaggggaactgagtcctggtctctgcagccgcccaatcgccataacagaaatcactgtgtggagacagagacctaggggcaggggacaaaaaaaaaaaaagagagagagagagagaaagaaaaaaattggaggggactccaggaaaatttggcacacttaaaaagaaaaacaaaaacatgtcttctccactatgcactggtgtggaaaaactgtagttttccacagttaaaaactccaacatttctgctggggaagttgacatctgcgctgatgactctcttgtcctggttttcagatttgaagccaatctactcatttgcagatgcagttttatggttacagagattttacatcttttcagtaaggtctggcttctgcctggttcagtgcatttagttatatttgttaccgttgtgtgtgttgtgatattatgcttttagtcacctttctgacttaaaaaaatcccatcatgctgttccattgtgaattaacaattaatcatgatctttatgtgatccattttcaattcagttcaattcatggttatcttcctcttttatatctcccccaagtacaccatctaatctggtcccatttgtaagctcatcacatttgcaaactttctcccagtcttgcctactgtgcttgcctcatagtgaacattaatcagaatcaggaaaaaaatacatttaaataagtcaggaacagttaagaaagtcagcaatataagcacaggtagtcacagaaacttttgccttcctgccatctcagaaacttctcttcctctacatttaacccatgatactctcttagatcagtaggacatttgtactaagaatatttagaacttcagatgtagaaggaaacttaaaaaatacacagtaattcattagtaaaaagaagagggaagtcatactatttttaagtaaatgctatgaacattcagaagaaaatgagatattgtctgacagggttcataaaggaacagtactagagataggacttgaaggattggttatgtttggaaaaagataaaatagaggacttttttgttgtttttgcttttctctgacagagggaaacttgtgagcaaacatacagaggttggaaaggcatgacactgttattcaagaaacaaggagtaataccatctggtagaaataaaaagtacataaagaaaagtgtaggaagatacggtggaaagataggccgggttcagatgcctgatccgcagttgtcacgtgttgcaggcttgtataaagactttgttgttgctgttgtcctcgtctgttgataccattaccaatattcctttcattctggaaaatgacttgtttaacccattaatttctacttttaccattctcaagttttatggcacaccaaactccttgattagtattgcatttgaccccagtacattctgccaggagctaccgagttttactaagagtagactctcaactggatagtgtcttgtcttcttcctcctctatcctttctgactgtcagacaatgggtaagaagaggaagcaaccaatctaaacataagggtggctagaaccaccaaaaggtgactgcaaaagacattctgtaatctggatgtttgatatgctctaaaaaagtaacaagagttccttgttgttagggaaatactaatcttcacagcctaatttcctagtaatgaaaatggttcataacgggattcactaaaatgcctgctgagtggataaatgaatacctgaatatttcatcatcttccaggtccaatcttctttcttatagttgacttatgggttaaaacctactttcctccactttatggagaataagaaagttgtcatgacaacttaataaaaatgttaacaaggaaaattactcagtgtaaagcaatctccttagccatgttgatgctggcagaaaagctcaagaaatttttatttcctctcaagatgctttgtttttcttgtacctacaacccacaattgacaacagcatgaaagcatttaaatgtacattactttcacacttgcaaatgaaaggacaatggcaactagaga

SEQ ID NO: 316968 - DNA, 4001 bp, Homo sapiens
ctattaggacacaggtccattttggatatttgactatgtactatctcccttaaaatgcagccactctaatgtttaaatacaattttagggacttcacggccccttgaagaagatcacggacccagttgtttaatggctgaacaaagcacagaatgcatagacaacttccactgaagcaataataaagcttatatgtataactttcagaccaattaagtgttgcttattttggttacatcgtcgttgctatcataacgagtttactttttaccactgtacataatagggtacctgaaatgatcactcttaaagaaaaaatatgtatagcaattttaggaaaagcaacagaccacttctacactctgaaccaagataaaaaaaaattatatcaagtgcttctatgcttacccatatgtaacaggaaagtttgacgtttgtacaaagacagttctagtaagtggtagagatgtatgaaatcaaatcaattcattaaataggcatttagtgaaattaccataggagaactgatcctaaaacatcactattgatatgttataaatgaagttcaaatgaaagaaaaaaaaatctgtcctatttaaaactcagcactgtttccataggttccaaatcaagatgccttcaaccagtcatcgttaagtgagccatacaatcttctggcttacttcagaagatgtaaactgtttatcgagtgcaaaatgaaagaataaccatgtgaaaatcagtgagcagagaaagacgcacgaaatccatagcctgaaatcacatgaccacattgcaacgcagcccctcacaccattgtcactgtcaggcagctcaggcgacagggtgcagacaggcgcggagaccgcggtggccccctgctcacgctttctccaagagccgcagtcctaacgaaaacagaaatgggactgctaagcagtaaatcatttgtctctctcgcacacacgcgcacacctcgtggagccgctgggcagttagccggctgccttctctgggcagcccagcgatcgcagcttttgctgtggaggaggacgcgcctcttacccacgccgcagccggccgggtgaagttgccctgaagcccgccaccgcctccagccctgctgcctccggggtccaggcatcccccagctgcgcccgctcgcttgcctgccggcgcgccggaggccgcagcgctgcacgcggctgatgggctctggggcccaggcgccctggccgtgggagaccagcggccccggcgcgccccgcgcgttctcacggcccggccccgcgagctcagcagccggcgcggcgctgctcggcgcccacccccgtctgtgctcctccctcgggcgccgcgggtcccccgggccctgggccggcccctcgggcgtcctctcctttcctctcgctcctccccagcgtgggaacccgatgctggcttcccagggctgggcaactgggagcgtaccgaaggtttctcaggagaggaaggagacccagcccaagcgggggtcccggaagagggaccgcctgtctgaagaaccccgacccgcgtggggatgcagcgaccacttacttggtggcttcgcacacctcggggctgtgcttccggatctctagcagctccagggcgcgcctcgcaaatccgcactgcgaatggagaaagagagcaggcgtcaggggtggcaggcagtgagcgggagaggggaccctgcagtggcacctgtcggtccccgcgcgagtgcaccctgggcactcgcggcagcggcacttacgcttgggtcgctcatgtctacctgttcaacaggctaggcgggacgcggcgtgcctcggaaactgtatcgcccgcgtggctcccagacagtcctccttgcctttgtctctctgtgtctgtgtctccctctttgatcaccccaaaggaacccttgcagttcctttccataaggcattcgattttttcagacctctgcccgcctcctccccttctccgcaccgaaagactgaaaaagaaagtagcagccaaaacgcaccatggtgagatcacgcccggctggggtctctaagctcctccaggcgctccctcccccacaggtgtcctccgcctgggtctgttccaggctgctcgctgctctagcgcaggaaaagtgtaggaaaactctgcactgaaacctgcttctggaaaactgactctgagctgagtcccacccactaggctcagactagggcaggggaactgagtcctggtctctgcagccgcccaatcgccataacagaaatcactgtgtggagacagagacctaggggcaggggacaaaaaaaaaaaaagagagagagagagagaaagaaaaaaattggaggggactccaggaaaatttggcacacttaaaaagaaaaacaaaaacatgtcttctccactatgcactggtgtggaaaaactgtagttttccacagttaaaaactccaacatttctgctggggaagttgacatctgcgctgatgactctcttgtcctggttttcagatttgaagccaatctactcatttgcagatgcagttttatggttacagagattttacatcttttcagtaaggtctggcttctgcctggttcagtgcatttagttatatttgttaccgttgtgtgtgttgtgatattatgcttttagtcacctttctgacttaaaaaaatcccatcatgctgttccattgtgaattaacaattaatcatgatctttatgtgatccattttcaattcagttcaattcatggttatcttcctcttttatatctcccccaagtacaccatctaatctggtcccatttgtaagctcatcacatttgcaaactttctcccagtcttgcctactgtgcttgcctcatagtgaacattaatcagaatcaggaaaaaaatacatttaaataagtcaggaacagttaagaaagtcagcaatataagcacaggtagtcacagaaacttttgccttcctgccatctcagaaacttctcttcctctacatttaacccatgatactctcttagatcagtaggacatttgtactaagaatatttagaacttcagatgtagaaggaaacttaaaaaatacacagtaattcattagtaaaaagaagagggaagtcatactatttttaagtaaatgctatgaacattcagaagaaaatgagatattgtctgacagggttcataaaggaacagtactagagataggacttgaaggattggttatgtttggaaaaagataaaatagaggacttttttgttgtttttgcttttctctgacagagggaaacttgtgagcaaacatacagaggttggaaaggcatgacactgttattcaagaaacaaggagtaataccatctggtagaaataaaaagtacataaagaaaagtgtaggaagatacggtggaaagataggccgggttcagatgcctgatccgcagttgtcacgtgttgcaggcttgtataaagactttgttgttgctgttgtcctcgtctgttgataccattaccaatattcctttcattctggaaaatgacttgtttaacccattaatttctacttttaccattctcaagttttatggcacaccaaactccttgattagtattgcatttgaccccagtacattctgccaggagctaccgagttttactaagagtagactctcaactggatagtgtcttgtcttcttcctcctctatcctttctgactgtcagacaatgggtaagaagaggaagcaaccaatctaaacataagggtggctagaaccaccaaaaggtgactgcaaaagacattctgtaatctggatgtttgatatgctctaaaaaagtaacaagagttccttgttgttagggaaatactaatcttcacagcctaatttcctagtaatgaaaatggttcataacgggattcactaaaatgcctgctgagtggataaatgaatacctgaatatttcatcatcttccaggtccaatct

SEQ ID NO: 316969 - DNA, 4001 bp, Homo sapiens
atagatatactttaattttaatattatcacttgtttgtagtgaaatattaaaatagcttttcaaaatgtcttaagaaagatcccttaataagacataattataagagttataagtactaagcattgtgaagtttttcacacttttgtttttggtattgccataaataaataaaataattttatatttccttcctcattctccgaatgacagaaaacgattttaatcatgttatttaatacctgaatatctagaagcaagacctttaaggggctatttatatttcatacactatgagacactataccaagcataagtactttatattttgattggatttcaaagacaaaaatataatttttattttctgtcgtataatagaaagagatcttacaatataaagtataaatataccttataaatataaatataaggtacccatctattaattacaaatttctactaaatacgttcacagacctgtttcctaatacattaaaatacatacatctggtctattttatgtgaaatatttaactacggtaacaccatttaattgttctagaattttccttctagcctatgtctgcaggctgtatgtagacagcctgttgttttgataagaaaaagtatggcttacgtgtttttaccccgtggttcttaattttctattaggacacaggtccattttggatatttgactatgtactatctcccttaaaatgcagccactctaatgtttaaatacaattttagggacttcacggccccttgaagaagatcacggacccagttgtttaatggctgaacaaagcacagaatgcatagacaacttccactgaagcaataataaagcttatatgtataactttcagaccaattaagtgttgcttattttggttacatcgtcgttgctatcataacgagtttactttttaccactgtacataatagggtacctgaaatgatcactcttaaagaaaaaatatgtatagcaattttaggaaaagcaacagaccacttctacactctgaaccaagataaaaaaaaattatatcaagtgcttctatgcttacccatatgtaacaggaaagtttgacgtttgtacaaagacagttctagtaagtggtagagatgtatgaaatcaaatcaattcattaaataggcatttagtgaaattaccataggagaactgatcctaaaacatcactattgatatgttataaatgaagttcaaatgaaagaaaaaaaaatctgtcctatttaaaactcagcactgtttccataggttccaaatcaagatgccttcaaccagtcatcgttaagtgagccatacaatcttctggcttacttcagaagatgtaaactgtttatcgagtgcaaaatgaaagaataaccatgtgaaaatcagtgagcagagaaagacgcacgaaatccatagcctgaaatcacatgaccacattgcaacgcagcccctcacaccattgtcactgtcaggcagctcaggcgacagggtgcagacaggcgcggagaccgcggtggccccctgctcacgctttctccaagagccgcagtcctaacgaaaacagaaatgggactgctaagcagtaaatcatttgtctctctcgcacacacgcgcacacctcgtggagccgctgggcagttagccggctgccttctctgggcagcccagcgatcgcagcttttgctgtggaggaggacgcgcctcttacccacgccgcagccggccgggtgaagttgccctgaagcccgccaccgcctccagccctgctgcctccggggtccaggcatcccccagctgcgcccgctcgcttgcctgccggcgcgccggaggccgcagcgctgcacgcggctgatgggctctggggcccaggcgccctggccgtgggagaccagcggccccggcgcgccccgcgcgttctcacggcccggccccgcgagctcagcagccggcgcggcgctgctcggcgcccacccccgtctgtgctcctccctcgggcgccgcgggtcccccgggccctgggccggcccctcgggcgtcctctcctttcctctcgctcctccccagcgtgggaacccgatgctggcttcccagggctgggcaactgggagcgtaccgaaggtttctcaggagaggaaggagacccagcccaagcgggggtcccggaagagggaccgcctgtctgaagaaccccgacccgcgtggggatgcagcgaccacttacttggtggcttcgcacacctcggggctgtgcttccggatctctagcagctccagggcgcgcctcgcaaatccgcactgcgaatggagaaagagagcaggcgtcaggggtggcaggcagtgagcgggagaggggaccctgcagtggcacctgtcggtccccgcgcgagtgcaccctgggcactcgcggcagcggcacttacgcttgggtcgctcatgtctacctgttcaacaggctaggcgggacgcggcgtgcctcggaaactgtatcgcccgcgtggctcccagacagtcctccttgcctttgtctctctgtgtctgtgtctccctctttgatcaccccaaaggaacccttgcagttcctttccataaggcattcgattttttcagacctctgcccgcctcctccccttctccgcaccgaaagactgaaaaagaaagtagcagccaaaacgcaccatggtgagatcacgcccggctggggtctctaagctcctccaggcgctccctcccccacaggtgtcctccgcctgggtctgttccaggctgctcgctgctctagcgcaggaaaagtgtaggaaaactctgcactgaaacctgcttctggaaaactgactctgagctgagtcccacccactaggctcagactagggcaggggaactgagtcctggtctctgcagccgcccaatcgccataacagaaatcactgtgtggagacagagacctaggggcaggggacaaaaaaaaaaaaagagagagagagagagaaagaaaaaaattggaggggactccaggaaaatttggcacacttaaaaagaaaaacaaaaacatgtcttctccactatgcactggtgtggaaaaactgtagttttccacagttaaaaactccaacatttctgctggggaagttgacatctgcgctgatgactctcttgtcctggttttcagatttgaagccaatctactcatttgcagatgcagttttatggttacagagattttacatcttttcagtaaggtctggcttctgcctggttcagtgcatttagttatatttgttaccgttgtgtgtgttgtgatattatgcttttagtcacctttctgacttaaaaaaatcccatcatgctgttccattgtgaattaacaattaatcatgatctttatgtgatccattttcaattcagttcaattcatggttatcttcctcttttatatctcccccaagtacaccatctaatctggtcccatttgtaagctcatcacatttgcaaactttctcccagtcttgcctactgtgcttgcctcatagtgaacattaatcagaatcaggaaaaaaatacatttaaataagtcaggaacagttaagaaagtcagcaatataagcacaggtagtcacagaaacttttgccttcctgccatctcagaaacttctcttcctctacatttaacccatgatactctcttagatcagtaggacatttgtactaagaatatttagaacttcagatgtagaaggaaacttaaaaaatacacagtaattcattagtaaaaagaagagggaagtcatactatttttaagtaaatgctatgaacattcagaagaaaatgagatattgtctgacagggttcataaaggaacagtactagagataggacttgaaggattggttatgtttggaaaaagataaaatagaggacttttttgttgtttttgcttttctctgacagagggaaacttgtgagcaaacatacagaggttg

SEQ ID NO: 316970 - DNA, 4001 bp, Homo sapiens
tatgtactatctcccttaaaatgcagccactctaatgtttaaatacaattttagggacttcacggccccttgaagaagatcacggacccagttgtttaatggctgaacaaagcacagaatgcatagacaacttccactgaagcaataataaagcttatatgtataactttcagaccaattaagtgttgcttattttggttacatcgtcgttgctatcataacgagtttactttttaccactgtacataatagggtacctgaaatgatcactcttaaagaaaaaatatgtatagcaattttaggaaaagcaacagaccacttctacactctgaaccaagataaaaaaaaattatatcaagtgcttctatgcttacccatatgtaacaggaaagtttgacgtttgtacaaagacagttctagtaagtggtagagatgtatgaaatcaaatcaattcattaaataggcatttagtgaaattaccataggagaactgatcctaaaacatcactattgatatgttataaatgaagttcaaatgaaagaaaaaaaaatctgtcctatttaaaactcagcactgtttccataggttccaaatcaagatgccttcaaccagtcatcgttaagtgagccatacaatcttctggcttacttcagaagatgtaaactgtttatcgagtgcaaaatgaaagaataaccatgtgaaaatcagtgagcagagaaagacgcacgaaatccatagcctgaaatcacatgaccacattgcaacgcagcccctcacaccattgtcactgtcaggcagctcaggcgacagggtgcagacaggcgcggagaccgcggtggccccctgctcacgctttctccaagagccgcagtcctaacgaaaacagaaatgggactgctaagcagtaaatcatttgtctctctcgcacacacgcgcacacctcgtggagccgctgggcagttagccggctgccttctctgggcagcccagcgatcgcagcttttgctgtggaggaggacgcgcctcttacccacgccgcagccggccgggtgaagttgccctgaagcccgccaccgcctccagccctgctgcctccggggtccaggcatcccccagctgcgcccgctcgcttgcctgccggcgcgccggaggccgcagcgctgcacgcggctgatgggctctggggcccaggcgccctggccgtgggagaccagcggccccggcgcgccccgcgcgttctcacggcccggccccgcgagctcagcagccggcgcggcgctgctcggcgcccacccccgtctgtgctcctccctcgggcgccgcgggtcccccgggccctgggccggcccctcgggcgtcctctcctttcctctcgctcctccccagcgtgggaacccgatgctggcttcccagggctgggcaactgggagcgtaccgaaggtttctcaggagaggaaggagacccagcccaagcgggggtcccggaagagggaccgcctgtctgaagaaccccgacccgcgtggggatgcagcgaccacttacttggtggcttcgcacacctcggggctgtgcttccggatctctagcagctccagggcgcgcctcgcaaatccgcactgcgaatggagaaagagagcaggcgtcaggggtggcaggcagtgagcgggagaggggaccctgcagtggcacctgtcggtccccgcgcgagtgcaccctgggcactcgcggcagcggcacttacgcttgggtcgctcatgtctacctgttcaacaggctaggcgggacgcggcgtgcctcggaaactgtatcgcccgcgtggctcccagacagtcctccttgcctttgtctctctgtgtctgtgtctccctctttgatcaccccaaaggaacccttgcagttcctttccataaggcattcgattttttcagacctctgcccgcctcctccccttctccgcaccgaaagactgaaaaagaaagtagcagccaaaacgcaccatggtgagatcacgcccggctggggtctctaagctcctccaggcgctccctcccccacaggtgtcctccgcctgggtctgttccaggctgctcgctgctctagcgcaggaaaagtgtaggaaaactctgcactgaaacctgcttctggaaaactgactctgagctgagtcccacccactaggctcagactagggcaggggaactgagtcctggtctctgcagccgcccaatcgccataacagaaatcactgtgtggagacagagacctaggggcaggggacaaaaaaaaaaaaagagagagagagagagaaagaaaaaaattggaggggactccaggaaaatttggcacacttaaaaagaaaaacaaaaacatgtcttctccactatgcactggtgtggaaaaactgtagttttccacagttaaaaactccaacatttctgctggggaagttgacatctgcgctgatgactctcttgtcctggttttcagatttgaagccaatctactcatttgcagatgcagttttatggttacagagattttacatcttttcagtaaggtctggcttctgcctggttcagtgcatttagttatatttgttaccgttgtgtgtgttgtgatattatgcttttagtcacctttctgacttaaaaaaatcccatcatgctgttccattgtgaattaacaattaatcatgatctttatgtgatccattttcaattcagttcaattcatggttatcttcctcttttatatctcccccaagtacaccatctaatctggtcccatttgtaagctcatcacatttgcaaactttctcccagtcttgcctactgtgcttgcctcatagtgaacattaatcagaatcaggaaaaaaatacatttaaataagtcaggaacagttaagaaagtcagcaatataagcacaggtagtcacagaaacttttgccttcctgccatctcagaaacttctcttcctctacatttaacccatgatactctcttagatcagtaggacatttgtactaagaatatttagaacttcagatgtagaaggaaacttaaaaaatacacagtaattcattagtaaaaagaagagggaagtcatactatttttaagtaaatgctatgaacattcagaagaaaatgagatattgtctgacagggttcataaaggaacagtactagagataggacttgaaggattggttatgtttggaaaaagataaaatagaggacttttttgttgtttttgcttttctctgacagagggaaacttgtgagcaaacatacagaggttggaaaggcatgacactgttattcaagaaacaaggagtaataccatctggtagaaataaaaagtacataaagaaaagtgtaggaagatacggtggaaagataggccgggttcagatgcctgatccgcagttgtcacgtgttgcaggcttgtataaagactttgttgttgctgttgtcctcgtctgttgataccattaccaatattcctttcattctggaaaatgacttgtttaacccattaatttctacttttaccattctcaagttttatggcacaccaaactccttgattagtattgcatttgaccccagtacattctgccaggagctaccgagttttactaagagtagactctcaactggatagtgtcttgtcttcttcctcctctatcctttctgactgtcagacaatgggtaagaagaggaagcaaccaatctaaacataagggtggctagaaccaccaaaaggtgactgcaaaagacattctgtaatctggatgtttgatatgctctaaaaaagtaacaagagttccttgttgttagggaaatactaatcttcacagcctaatttcctagtaatgaaaatggttcataacgggattcactaaaatgcctgctgagtggataaatgaatacctgaatatttcatcatcttccaggtccaatcttctttcttatagttgacttatgggttaaaaccta

SEQ ID NO: 316971 - DNA, 4001 bp, Homo sapiens
gagaaatcaccatcatgtaactgcataataaggcctgttagaattgattgctaataattgtaatgtgcttagggaaaaacagcatggaagcctcacctacctgagacaacaaaatgaaatcactaagtacaggaaatcagagtgaataataacagtgtattcccatctgcccacccaggaaacccttccttccacctttgttacaatgtgatagtctgactgttgctctaatatgaaaatccataaatagggttttggagtagctagttggtggtggtcagctgtaccataagttaaatgcaaattttttgagagtgagaggaaaaaggagagacaactttattagagtgaaatagtcaacctgcctgcagacatgctgacccatcagtcattccaacaggtttaaactctcaggtgggtgtggtatttccgttcacatccccagtactgggctcaaagctccaggactgaaagtagaatgcctcctagaactgttaagtcttcaacacagtagaaaaaaacgggggataggggttggggcggggggggtgggcagtgggatttggggaaaacaaaaaacttccaattttcactttatttaaaaatgaataaatgcgcttaattcactgttgctcaagaaataatctcccgcgtgtttcagcataccaaaaaggcctaacttacgccaggtgtgtaaatcataaaggagccaaagtcttccgtttgtttctaaggcctccgggcgcaggaacctcgcggaggcccgtgtggtccctcggggctctgcacgcgtgggagctgcccggcctgctgagcctgggagcgccggcagcgcgttcccacgctcaggccgggtcgggaagccgtggtgacccctaggggctcctttccgcggttctcgccctcgcagccccgccccagccgcccctcccctcctggttccagtcccggagcgtgggagcgcagctgcagcgagccgggagcgaggcgcggaggcacctccaaggatgcgcgcccgcgacccggccagcaggctgaggaccaggcgaggcgcggggggcctcccacactgggcgccgacctgggccacagccagggtagccggccacttacttgatgtcttcccacacctcggggccgtaattgcggatcaccagcaactccagggcgtgattcacaaatccgtactgcggggacagggagagacttgagcgtcagggacccgctgtacctgagaagcggcttgggggcgaggctgctgcctctgctcccatggcgctggcttaacctttcaccccgcccctgactcctctcccttaggggtactatgcactaaaggagtcggatcgtgggggcgcaaccccccaatccctggtggattctccccgtcaccatccgccccacccccacgctatcttcccaccctcctcacctgtcaccgctccgggagaggctgggcatcgggggcagcgcggggacgcgaacccggagccttcccttccgctggcgctcagcctcccacactggtggggccggccagagccgggaagaccccacgcctccgccgcacctccccttcccgagctcaggaagctgcggtgtggagcggcaaacccgcctgggaagcaaaggcaccgatcgcccccgccacgactcgcggcgttcccacctcccctgactgggcgcgggcaaggagtgaggctgctcccgtggccggcagtgagcgcccagggcccccgagccaagctccggctgcgcggccagttccctcgctgccaggccggccgaggaggggtgaggttcgggccgcacccggctgagagcacttaccatggtgtctgcaccgggagccggggaggcagcccccacgcagaggtacggccgaagggacccaggcagaggcggcagcggctacagcgcaaccgggccggggaggcagcatcgagctggagcgagaacagccgccttggcccgccctgattgccacctcttcccagccaatggcgagtcgagccgcagggggctggtcggtgctccccagttcttcaaccaatcagggacagaggagggaattcggatgctctcaatgctgctgcgctccagtgccttcccgcccccgcctggtgacaaggccttcatttgaggccataacaatgacagtggagaagccccagccgtgctccttgcatgaattctggagcagaggaaatgcagctcttgtggacccactaaatgtattattattcagagatctgccctcagtggttaacacaagcaaaagggaacagggcgtgtttgttgtgtgagcgtgtacgtgtgtactttgcaatggacagaccttaaaaggaatatcctctgttgctggcatcctcatgcttatctttgtctagcggaaaaacatttcctctgtggcttggtcccacaacagtttatggcaaatttaaagctggtaatattgagaaaaacatattttcacttctagtcaatgagactagttgagtgaagcaccaaaaattttcagtaatgtagtttggtggacgttatgttaaatccagtcctgccctttactaaactgtacaagatccagcgatattctaggcttgatccctgtgggacacctttccctacaccatgtccgggagccataattccagggagtttgtaaccctctagagcgggcctctgttgctgtttcttagcaacagacgaactggaaaatgaccagtacaaaatgcacagactttaactactctacctccagcttacattctaccaggcccttaggttagttaatgctctgagtcctgccatagagagaagatgagaggaacaggaagtggcagcttattaaagctgtttgtacctgaggtatatggactccagttgacttttagggcaaggtcaaaagtgaggtcaccagtctcaagtggacctgagaagccagatggtattttaagatgtgcatattttgttgtgagaacagtctcaatatggttagagaaaaatgtcaaaacaataagattgtgctgacatcagcaccgagagagctatgatgaaggaaactgatacagaaatagtggcatgtagcaaacaaacaaaacaacaaattactttaaaaatttccattattggtggaatgagtaaatagattacagcctttcatacaatctaacaccttgttttaaacaactattaaaacattaatcattatttaacaacaattaaccactaattttgaaccattaaaatggcacattaaacaaccatgaaaaagcaggagggtgactagaaaatgatgatgcagaaaagtattgtcaggtttacaaaacaccacaagaatgtaatcattttccattttttagagttagtatacagtaaggtgctatgtgggtaataacacaggcacatacatgttgctgtaagaataatggtttgggaggaaacacaggaagtgttgatatggctatcgtctgtaattagaaccagtggctggaatggccatgactcttactttttataactttctgtatcttttgattatttttctacacagatgaattttctttactgttacataactgaattttttttaacttttattttagtttcaggggcacatatgcaggtttgttatataggccaattacatgtcttgggggtttggtgtacagattactttgtcacccaagcactaagcatggtacccaacaaatagttttttgatcctcaccctcttcccaccttccatcctcaagtaggccccagtggtcattgtccccttctttgtgttcatgtgtactccgtgtttagctcccacttgcaagtgagaacatgtggtatttggttttctgtttctgttaatttacataggataatagtctccagctccgtccatgttgatgcaaaggacatgatctcattctttttgatgtctgcatagtattccatggtatatatgtaccacattctctatccagtctaccactgatggacatctagat

SEQ ID NO: 316972 - DNA, 4001 bp, Homo sapiens
aggagtataaatttggcatactatcaaacaagtataccaattcaaagaatattcttttaatcgttgaacaatatcatttctagcatttatattgtttatattattattctaagaaaaagacatgtatggctaagttcatattacaaggaacatcagtttaatagccaaaggtaactatacagctaaatcataatcccttaacatttctacacaatttttagggccaatcaggaactgaatttattatcgtgaatggagaacatgagacacctagaacttctaaaggcctgagaataccttgtctagtaaaacttttgaggcaatggagctacagaaaagctgaaagaagataaattttctgctcctatcacacatttaatcaggaatcagatttatttaaaaatctgtgtctctaatggagcctcaaaattttattttaaatacaattttgctactttgcagcttctctggtgagaaagaaaaaaagatgacatccaacaaaagacttatcacttaaaacttaaaaatattttaaaatggaactcctggtttttcgtgtacacatcttctttaacgttttactgaaacacatcacaaattgctagaaattgttatcaagcaaaatataccagttttttgtactctatttttttccaatcaactgcatatttcacaatcagcaaaaccatgaaattacaatgaaatataaaattcacgtgagctttgttttttaatagccccataaagacagataataaaagcacaattatagctgaaagtctgccgaaaaaaaactaattctgatgtttgccctgtagattttctttcccttcagttcaaaaggtatagagaattgcaccatctttatacttcgaattgcaatataaatccatttttaaaaacacaggcatattagggccaaagttgattaatttaaggttttgtctttctgcctacttatagcttgccttcagtcacttcacttttctgactaaaatgtatccattcacaattatcagagttgttgaacctcccaccctctcccaccagagtcaaaattacacaggtttgctctggctgaggtagaatgaaataaaactacaaagacagaccgagaacttcctgcattctaggtattagtctaaaaaagtccacttctcacatcacacaaatctcacaaattagccactggatgtttgatcagttctgcattcaacaaatgaagtaggagagtgacaatgtagtaacttgcccaggccacatagctacttaatttgcaggaaaatggacgttatattaatatttactagcaacttgcttagtaggctttttagaattaaatagatgaataaacgcaaagcacttcgaccagtggctcgcgtaaacaaatcaacatttgacattgaaaatgagaaaacctacaaagttagtgacttgcccaaggtcacactagtgaggagtggagggtcgggaacctgagcagtgctcacactctccgctctgcctccctgtaccaagttgcaagcagggttcagagctagtcccagaaagccctatacatgtccaagatcgcatggggcactccaacgtttgaaaacttggctaaatcagattccagggggcagtcaccttgaattctgcggagctgtagagcctgtcggtagcccaggactctggagcagccccaagggtcggcgcggaccggggccccggggccaccagaagcgcggccccagtggctcgtggcgcgagagcgcgtgcgcacccccagccccgacccacgagggtccacatgacccgggcggcggaggcgtcaggagagggtacccacacgcaacagcagcatagcccgttttttttcgaaggtaccccccgtaggatccggtggacaggactcaaacagatcctgtgaagcgaagacaatgaaccccggggagctctgcccaagtaccagatccggaagcaacccgaagcggcggcgcagcttgccgacgtctgcacgccgcacgctgtcgtgacatcagcgcgtcttggcgccgggtagtggagtggtcacgtgagtggaggctttcgattgactccctaaaacgcagggtgtagacagagtacatattagcttatattgtctgctgagtgctgtgccaattcctttgcattgtctctttcttactactgccctgtggtgtgtgtactgtcagttcccccaaactacctctggaaatccggaccgagtgacttgcccaggagctcacaggtggggagctgtggagcctggagtgccgcccaggcagtctgattcccgaaccaggagccgaggtcttagtccagggacttaaagatgctattattagcacaacgttgagacttagccttctacctaatggcaaaataataatggcacttttaaaatctggaggtcgaaatgtattccccatgttgtcagtgacagagctaatcttgaagtgcatctgaaaggaaacgggccataacattgattgcaatactgaatccaggaaggttttggcaagaagtaaaggtgggaaaaagttccatgctggacccccaatgtttccatcgtcatcaagttaccacttcatggaatgagctctgacgaagtaagaatgggggataaaacaggtgataggaggattgcatccagtgtttgtctcccactatttctcttgcgcttttctggaatatccagaatttggtgcgaaggagggagatgacagctgtgttcagttcatcattgtgactgaagacagaatcattcgtattgtttccagagcctttgaaagtttcttcatttggaggatttcttaggatcaagaattctgtaccagactcagttctttcttggatttttttttcccccctgagatggtgtctcgctctgtcgcccaggctggagtacagtagcgctatctcggctcactgcaacctccgcctcctgggctcaagcgattctcctgcctcagtctcctgagtagctgggattacaggcgcgcgccagcaatcatggctaatttttgtatttttagtagagacggggtttcaccatgttggtcacgctgatctcgaactcctgacctcgtgatctgcccacctcggcctcccaaagtgttgcgattacaggcgtgagccaccgcgcctggccctttcttggaacttttatgaattaaaacagtacttgatagacgactaattctgtcacacttgtaagagaatgaatttaacaactatcttgaagtaaacacaataatttatattcaatgttgcccagacttccataatttgcacaattaccctcattaattttcaccatatcctgtcaaagataaaggcagacaccagttaaagtggtgaagacagatttttattatagtgatatactaatgcaatcgggaataagatccagaatgaactaaactacaatttgtccagaggcgactgtattttaaaaggagaatgcgggagtagggaaagagaacaactgggcttgatcaaagtcagggaaacggaaatttacaaaaaacaatggcggaagaatggtccatttgaaatccatctgggttgtaaactgttgcttatggaaataaggctcctacccttcccgcagacactaggaaatgagtgctactttcacatgttggctggaacaaataaattattttgtcagtcttgagctttctcagacagaaatttaagggggcttcatcttagagatgcagccttgagctgttataaactatatgagtttgttcaagtcttttaatgtgtgggcaaaccggtaggggaaggatgtggatgaaatcatttgtgctgagggtctgtagtttttataggcaagtttgaggctttgctgataagagggcttagaagagtcaggctagagtttggtcaagaatctttgtcaatcctcataccgatattatgtactttatatttttctttaacttacctttatatgtaaatgaattctttttaaaagaaaacgtaga

SEQ ID NO: 316973 - DNA, 4001 bp, Homo sapiens
atgggggaaaaacttgatcttacacctttctgttatactataaagtagccacatcaagagagtttccttggagggtttctgaagctacaaagatgataacagcttgggtactggagaccattgtagctttcagggtcatcttgccccagtgaccaagtgccatttaaggctttaatacactatctgcttgtgtagttgtagaaatttaaaaaaaaaatcatttctttgccaggaaccctttccaaatttggggcacttgtaagtcacacagagttttcccaaatgctgggcacacccccagtagagtatgcagtgtctaattttgcttgagttacatccagtttggtttgccccatggagcaacacaaagaatacatctttttttctgtgtaatagcacttcaaatatatgaatatatatacaaatattacactacatccctttcatttgttttcttttcttcaaactaaatgttttcatacttttctgcttaaaaaattagagtagctatgtttgttttctgttttctttctgtaattttcttttctctctgacttttcagaaatcaccaatcacatacgtaggtttgttccctagtctgtaactattgatagctactgcttattttaataatatattattaatactttttaatcatgatagttaattctaatcacagaaaatgcatagtaatcttaacattttactttgtttcaggcatcagtaagtgtattccattaaatattttgtttaatctttatgcaattattatgaggtaagtaccaacactgcctgcattttaaagacgaggacacataaaaatgtgggcacataatttgccttaatgttccccagccttgagaagtaaaagtagatttgaacccagttctgtctgttcctcatgcctgtgctcttaactattgcactattttatcctcccctagggtatcttagaaaatgctgatctctcctccctgtgtgctacagagtgctcagtagctccttgatacttgctctcacttgggatacagcaatgtctaatagactcagaatgtttcaagcaactgcctgcccgctgtgtgctgggcactagtattgctaacacataagcactgcacttgagaggatgtttaactataatattctcagaaagaggccaaaatcatgttaatttaagacactaaattaataattaaatttaaactaagttaaattcaaattattgaattaatacaatttaataataaccctatgatatttctttattttaatggatttaaatttctcctaaaattcacaggatacctaagccagtaagagttgtttttgttttttttcttcctatgtgacactttagtaatggacccacagagaagcgaacaactccccacggtttcagtgttcatgcttttggcttctcgccatttggcagaaataggaaattataccttttgaaaactaaaagccatatagctaccaacatcttcgttaataactctttagtttggaaatgaatctccttataactcaaacaaagcaatacatttattcacagagaggtatttctcatagcatttgataaaattattttaattctagctagacttagaattgaagtaagcttctcatactagaaaactggatttggccataaatactgggctcccttgtgccatttcccccacattggtagctgagttccagtaaaatccatccaccagactggaagaggaaatactactcatttattgatttaaataagatagaactaaaatagggtagttcatattttattctatgatctcatacccaatataacagaaccaagatgaaataaaatcacttacctgacaatagtaatacaaagattatttttccatacatcctgagatcatgagctggttcctgaagttagtgcaaaaaaactaccaaagacaactgcaagtgtcagtgtctgaccttagcctgctagctgttatcttccaggcccaccttcctgcggccatcatcagctgataggcaggggaggcattttaaatgatgcaagttgttaagcgcctgttaataaagatacatggatatcttggggctatgaaagtggtaagtaaaattttcactgcaaggaacaggttgctacttgtgatattaactttgcatcagttaagtgggcatggtaaggtggtagacaggagccacccaactggacaaagaactggactgtgaatctctgaggccagggcacgtgccaggctgaggtagctgttgtggagccatggaccttctcatttctaatgtcaagacccagtggtccaaatgaaagtgacttcctatatgtgaaatgaatgtatttgagaaatttaaatcatttgagtgttctgaggttctgaaagactcccaaactcatggtgagccacacagcaatgtaagagacatgagatgcaacagatctttcagtgaaaagagagtttgaactgaagagctagtactgcgcagctatgaaaccagtgagctgtttctgtctgaaatataccttgctaagtaagcataaatgaataccaagacaataaatgcaaacagtcagaaacaaaacccaacaaaccaaaaaccttatgagtaaagtaggttaaaatgaaaggtatgaaaatgcgaggaagctcaattttaaaggcagacagaacaaaaaatataaattaggtctgaaatggttcaacagaaggtgactggatactccatctaaatcatcttacttcctgtaagatttttgtgaaagtctttcctgcctgacccagaaaatcaatttgctatgtgagcaatttgccacatataacatacatacatatttacccaaagtgtggtttaaaaaaatcatttatgaagctaatgtttgcagcttcaggaaactgggcgacagagaaaaaaaattatttactggagaaagatggagataagtatcagcagagcatcccagagagggaggagcctgagaatgagggactagtggatggaggcagcggagatgcagacttggggaggatggaagaatgaatgacacagagggggtaatctgagcagcaggacaagaatccagaatgcctcttaaggccctgccaattcatgtaaaacaactgcagcaaattttattaaaaagttaaaattaaacaatacataataaattaataccttctataaattcagtgtttgttatggctggatatcaggttgagttgcaggaattgtgctcaagagtcagccaagtaaaggaaatgttgttgatattcatataagcagtaagaattatttcacacaattttatattgacaaagggagagcgattagcatgagtcttaaaaatgctatttctgaaaatgggtaaataaatgtcactattcttacgatggactattagagcaactattaaaatcatgttttcaaaaataaagatatggagactcaggataaaatggataagtggaaaacagcaagatctgaaaattgtatatacacaaataaaatcctattggattctttttttcctgggttgtgctatcttcacctggaatacacctactcttttaagtggcctccaattctgcttggggtctcaattgaatagtacttcctccacaaagccttccctgacttcctgtctttgtcaggtgcccctgctctatacttgtgtggtttcatcttcttctcttatcataggacttattacactacattgcaatcattgtgtctctactggactacagtttttaagtgggcacaccctatgactattttatttaccaatgagtgcttggggcacacttgacaataaatatttctcaaatcaataaatgacaaataaatattgcagtgcagaggaaagcaacttctcacaggcagtcctgggtgtataggctgatcattttttatatatcctgcgggtaacctatgtcatgtcctagcttcaggttccctccagtatggaggtccattgctaaggcaggaaggggaaa

SEQ ID NO: 316974 - DNA, 4001 bp, Homo sapiens
aaaaaagaaaaagaaaaaaaaagaaaaagacttcaccatgtttagtcttcggctaatcagtatgggggaaaaacttgatcttccacctttctgttatactataaagtggccacatccagagagtttccttggagggtttctgctacgaagatgataacagcttgggtactggagaccattgtagctttcagggtcatcttgccccagtgacctctttatcaagtgccatttaaggctttaattcactatctgcttgtgtagttgtagaaatttaaaaaaaaaatcatttctttgccaggaaccctttccaaatttggggcacttgtaagtcacacagagttttcccaaatgctgggcacacccccagtagagtacgcagtgtctaattttgtttgagctacatccagtttggtttgccccatggagcaacacaaagaatacatctttttttctgtgtaatagcacttcaaatatatgaatacatatacaaatattacactacatccctttcatttgttttcttcaaactaaatgttttcatacttttctgcttaaaaaattagagtagctatgtttgttttctgttttctttctgtaattttcttgtctctctgactctcagaaatcaccaatcacatacgtaggtttgttccctagtctataattattgatagctactaattattttaatattacttatattattaatacttattaatcatgatagttaattctaatcatagaaaatgcgtagtacgcttaacattttactttgtttctggcatcgctaagtgtattccattaaatattttgtttaatctttatgcaattattatgaggtaagtaccaacattgcctgcattttaaagacgaggacacataaaaatgtgggcccttaatttgccttaatgttccccagccttgagaagtaaaactagatttgaacccagttctgtctgttcctcatgcctgtgctcttaactattgcactattttatcctcccctagggtatcttagaaaatgctgatctctcttccctgtatgctacagagtgctcagtagatccttgatacttgcgctcacttgggttacagcaatgtctaatagactcagaatgtttcaagcaactgcctgccccctgtgtgctgggcactagtattgctaacacataagcactgcacttgagaggatgtttaactataatattctcagaaagaggccaaaatcatgttaatttaagacactaaattaataattaaatttaaactaagttaaattcaaattattgaattaatacaatttaataatgaccctatgatatttattttaatggatttaaatttctcctaaaattcacacgacacctaagccagtaagagttgtttttgttttttttcttcctatgtgacactttagtaatggacccacagagaagcaaacaactccccacggtttcagtgttcatccttttggcttctcaccatttggcagaaataggaaattacaccttttgaaaactaaaagccatatagctaccaacacctttgttaataactctttagtttggaaatgaatctccttataactcaaacaaagcaatacatttattcacagagagctatttctcatagcatttgataaaattattttaattctagctagacttagaattgaagtaagcttctcatactagaaaactggattcggccataaatactgggctcccttgtgtcatttcccccacattggtagctgagttccagtaaaatccatccaccagactggaagaggaaatactactcatttattgatttaaataagatagaactgaaatagggtagttcatattttattctatgatctcatacccaatataacagaaccaagatgaaataaaatcacttacctgacaatagtaatacaaagattatttttccatacatcctgagatcatgagctggttcctgaagttagtgcaaaaaaactaccaaagacaactgcaagtgtcagtgtctggccttagcctactagctgttatcttccaggcccaccttcctgcggccatcatcagctgataggcaggggaggcattttaaatgatgcaagttgttaagcgcctgttaataaagatacatggatatcttggggctgtgaaagtggtaagtacaattttcactgcaaggaacaggtggctacttgtgatattaactttgcataagttaaatgggcatggtaaggtggtagacaggagccacccaactggacaaagaactggactgtgaatctctgaggccagggcacgtgccaggctgaggtagctgttgtggagccatagaccttctcatttctaatgtcaagacccggtggtccaaatgaaagtgacttcctatatgtgaaatgaacatatttgagaaatttaaatcatttgagtgttctgaggttctgcaagactcccaaactcatggtgagtcacacagcaatgtaagagacatgagatgcaacaaatctttcagtgaaaatagagtttgaactgaagagctagtgctgtgcagctatgaaaccagtgagctgtttctgtctgaaatataccttgctaagtaagcataaatgaataccaagacaataaatgcaaacagtcagaaacaaaacccaacaaaccaaaaaccttatcattaaagtaggttaaaatgaaaggtatggaaatgtgaggacattaaagggagacagaacaaaaaatataaattagatctgaaatggttcaacagaaggtgactggatactccatctaaatcatcttacttcctgtaagatttttgtgaaagtctttcctgcctgacccagaaaatcaatttgctatgtaagcaatttgccacatatatcatacttacatatttacccaaagtgtggtttaaaaaaatcatttatgaagttaatgtttgcagcttcaggaaactggaccacagagaaaaaaaagtatttactggataaaagatggagataagtatcagcagagcatcccagagagggaggagcctgagattgaggctcctctaatggatggagggagtggagatgcagacttgggagagacggaagaatgaatgacacagacggggtaatctgagcagcaagaaaagaatccagagtgcctcttaaggccctgccaattcatgtaaaacaactgcagcaaattttactaaaaagttaaaattaaacaatacataataatttaacaccttccataaagtcagtgtttgttatggctggatatcaggttgagttgcaggaattgtgctcaagagtcaaccaagtaaaggaaatgttgttgatattcatataagcagtaagaattaattcacatgattttatattgacaaagggagagcgattagcatgagtcttaaaaatgctatttctgaaaatggataaataactgtcactattcttacaatggactattagagcaactattaaaatcatgttttcaaaaataaagatatagagactcaggataaaatggatacgtggaaaacagcaagatctcaaaattgtatatacacaaataaaatcctatttgattcttttttcctctgggttgtgctgtcttcacctggaatacacctactcctttttaggtggcctccaattctgcttaggctcttaattgaatagtacttcctccacaaagccttccctgacttcctgtctttctcaggtgcccctgctctatacttgtgtggttccatcttcttcccttatcataggacttattacactacattgcaatcattgtgtctccactggactacaatttttaagtggacacaccctgactatgtctatcttatttaccaatgagtgcttagggcacacttgacaataaatatttctcaaatcaataaatgacaaatgaatattgcagtgcaaaggaaagcaacttctcacgggcagtcctgggtgtataggctgatcattttttatatatcctacgggtaaccta

SEQ ID NO: 316975 - DNA, 4001 bp, Homo sapiens
caccatgtttagtcttcagctaatcagtatgggggaaaaacttgatcttacacctttctgttatactattaagtagccacatcaagagagtttccttggagggtttctgaagctacgaagatgataacagcttgggtactggagaccattgtagctttcagggtcatcttgccccagtgacctctttattaagtgccatttaaggctttaattcactatctgcttgtgtagttgtagaaattaaaaaaaaaaatcatttctttgccaggaaccctttccaaatttggggcacttgtaagtcacacagagttttcccaaatgctgggcacaccccccagtagagtatgcagtgtctaattttgtttgagttacatccagtttggtttgccccatggagcaacacaaagaatacatcttttttttctgtgtaatagcacttcaaatatatgaatacatatacaaatattacactacatccctttcatttgttttttcttcaaactaaatgttttcatacttttctgcttaaaaaattagagtagctatgtttgttttctgttttctttctgtaattttcttttctctctgacttttcagaaatcaccaatcacatacgtaggtttgttccctagtctgtaactactgatagctactgcttattttaataatatattattaatacttattaatcatgatagttaattctaatcatagaaaatgcatagtaagcttaacattttactttgtttcaggcatcagtaagtgtattccattaaacattttgtttaatctttacgcaattattataaggcaagtgccaacattgcctgcattttaaagacaaggacacataaaaatgtgggcacataatttgccttaatgttccccagccttgagaagtaaaactagatttgaacccagttctgtgtgttcctcatgcctgtgctcttaactattgcactattttatcctcccctagggtatcttagaaaatgctgatctctcttccctgtatgctacagagtatgctcagtagatcctctcttccctgtatgctactgtatgctcagtagatccttgatacttgctctcacttggattacagcaatgtctaatagactcagaatgtttcaagcaactgcctgccccctgtgtgctgggcactagtattgctaacacataagcactgcacttgagaggatgtttaactataatattctcagaaagaggccaaaatcatgtttatttaatacactaaattaataattaaatttaaactaagttaaattcaaattattgaatacaatttaataatgaccctatgatatttattttaatggatttaaatttctcctaaaattcacatgacatctaagccagtaagagttgtttttgtttttgtttcttcctatgtgacactttagtaatggacccacagagaagcgaacaactccccacggtttcagtgttcatgcttttggcttctcaccatttggcagaaataggaaattatacctttttaaaactaaaagccatataacacctttgttaataactctttagtttggaaatgaatctccttataactcaaacaaagcaatacatttattcacagagagctatttctcatagcatttgataaaattagtttaattctagctagacttagaattgaagtaagcttctcatactagaaaactggattcggccataaatactgggctcccttgtgccatttcccccacattggtagctgagttccagtaaaatccatccaccagactggaagaggaaatactactcatttatgcatttaaataagatagaactaaaatagggtagtttacattttattctatgatctcatacccaatataacagaaccaagatgaaataaaatcacttacctgacaatagtaatacaaagattatttttccatacatcctgagatcacgagctggctcctgaagttagtgcaaaaaaactaccaaagacaactgcaagtgtcagtgtctggccttagcctgctagctgttatcttccaggcccaccttcctgtggccatcatcagctgataggcaggggaggcattttaaatgatgcaagttgttaagcgcctgttaataaagatacatggatatcttggggctatgaaagtggtaagtacaattttcactgcaaggaacaggtggctacttgtgatattaactttgcatcagttaagtgggcatggtaaggtggtagacaggagccacccaactggacaaagaactggactgtgaatctctgaggccagggcacgtgccaggctgaggtagctgttgtggagccatagaccttctcatttctaatgtcaagacccggtggtccagatgaaagtgacttcctatatgtgaaatgaacatatttgagaaatttaaatcatttgagtgttctgaggttctgaaagactcccaaactcatggtgagtcacacagcaatgtaagagacatgagatgcaacaaatctttcagtgaaaatagagtttgaactgaagagctagtgctgtgcagctatgaaaccagtgagctgtttctgtctgaaatataccttgctaagtaagcataaatgaataccaagacaataaatgaaaacagtcagaaacaaaacccaacaaaccaaaaaccttatcattaaagtaggttaaaatgaaaggtatggaaatgtgaggaagctcaattttaaagggagacagaacaaaaaatataaattaggtctgaaatggttcaacagaaggtgactggatactccatctaaatcatcttacttcctgtaagatttttgtgaaagtctttcctgcctgacccagaaaatcaatttgctatgtaagcaatttgccacatatatcatacttacatatttacccaaagtgtggtttaaaaaaatcatttatgaagctaatgtttgcagattcaggaaactggaccacagagaaaaaaaagtatttactggataaaagatggagataagtatcagcagagcatcccagagagggaggagcctgagattgagggactaatggatggagggagtggagatgcagacttgggagagacggaagaatgaatgacacagacggggtaatctgagcagcaggaaaagaatccagagtgcctcttaaggccctgccaattcatgtaaaacaactgcagcaaattttattaaaaacttaaaattaaacaatacataataatttaataccttccataaattcagtgtttgttatggctggatatcagtttgggttgcaggaattgtgctcaagagtcaaccaagtaaaggaaatgttgttgatattcatataagcagtaagaattaattcacatgattttatattgacaaagggagagcgattagcatgagtcttaaaaatgctatttctgaaaatgggtaaataaatgtcactattcttacgatggactattagagcaactattaaaatcatgttttcaaaaataaagatatggagactcaggataaaatggataagtggaaaacagcaagatctgaaaattgtatatacacaaataaaatcctattggattctttttttcctgggttgtgctatcttcacctggaatacacctactcctttttaggtggcctccaattctgcttagggtcttcattgaatagtacttcctccacgaagccttccctgacttcctgtctttgtcaggtgcccctgctctatacttgtgtggttccatcttcttcccttatcacaggacttattacactacgttgcaatcattgtgtctccactggactacagtttttaagtggacacaccctgactatggctatcttatttaccaatgagtgcttggggcacacttgacaataaatatttctcaaatcaataaatgacaaatgaatattgcagtgcagaggaaagcaacttctcacgggcagtcctgggtgtataggctgatcattttttatatatcctgcgggtaac

SEQ ID NO: 316976 - DNA, 4001 bp, Homo sapiens
aggcaaaattgtgtttttcacagagatacagtccactggaatcaccaacactggacagctgttagagtatttagagtcctgagataacaaggaatccaggcatcctttagacagtcttctgttgtcctttcttcccaatcagagatttgtggatgtgtggaatgacacctaggagagtgacaggaattaattctacttaagattttttaaaaaatcacagtatttgaaaccaagaaagtgtatactgttcaacttgaaaggtatctttaaaaacatgcagctcaagtatgaagtaaaaattcattgagttatacatataaatcaaatttcatgatacaaccatacttccatcattgaaaatatacttaaatttcctctcctggaaaaactaattaaaagcagcaaaaaattccttcctctgaagaaattttttaaaatgttagaagttaacataccaccaccagcaattgtagccttgatgagagaatccaattcttcatctccacgaatagcaagttgcaagtgacgaggggtaatacgctttacctttaagtcttttgatgcatttcctgccagttcaagtacctaaaaggcagaatctgtcagttgccttccaactttcctttggccaagattcagagaacagaataaaaccctcacaaacgcagatctaccaactggaatcgttcctcactatctgactggcaagatatacagggggcacgcaattttaattccaagagcagagaactcaagctcagtaggatccttgttgaacaccagctccctctagcgttctcttaggcctctcgccgcgttcagggcctgggagttttcttgcatcactttcctccttccctcttgccgcctccccgccccccaaaccttctccggattataggcgttcacccatttacctctgcggtgaggtactccaggatggctgcgctgtacacagcggcagtcgcgcccacacgtccatgactggtcgtcctagattttaggtgtcgatgaatacggcccactgggaacttaaattttaagcatacacaaacataaatgcacaaaaatgagaactagagatggggaaattatatgcgcgccaaagcaaggggcacgggcgcagcaacgcgtcccgacatcgaaacacgtgattcctcccccccatatttatcgtatgggcagcccaagtcgcgacaccgcatcacccacgcatacacaaaacgcccatcgagagcgatgaataacaaaaaaggaaatgcaaagaaaaacatcatgactcccagactgcacgaacaactactgacctgcaagccggctctctgcgagcgggaaaccgcctttgtcttggcctttccggagtcctttccagccttaccgccagcctgcggcgcgcacacgcccgcgagcggaggaggaacggagaatatagaattaccaaggcggcgcgcccatcccccaccgcggcgcgtcccgccgcgagcgcgtccccgcaccctgccggggtctccggcccgcggcgcgccgcaggggcgaccccgcccgttcgccccccgccgcgcgctcgccacggccgcgcgcctccgcccgccggcccccagcggcgctgcgcgcgccacccaaccgtcgccgcccgccgcgagatccgaggctgctccgctagcagccgacaaaacacctccccccactcttctaaatcctgtctccgcgcgttcccaaccgtcgccacttcacccccatccctctgtgtaacgggtttttctctcgccggcaaaaacccgcggagtcatcgagcgtctctgcgaagtttaccatttcgaattccgctgaagctcaagcaagcaaggcagagaaaaggctaatcggacccacggtgagatcccaccacctactccttcgtcgcaccgcgattcaaactgcgctgtctcccgccttccctgctccctttatactgcagaatgttccctcatccgggaactcggattgctcatcccaccaatggctgccacccgccctcgggacgcgtccttgagacttcagccaatgagcaagcgaagaaaagggtggaggggcgggcgcttctaatctcaagccgcgattggggcgtggggggagaggcgggggaaggcggagggatgggaacgggggagaagaagggcaccgcggcgggagggaagaaacagagcgagctacgctgcaggagcgcagttaccagccggctgcgatcacgtgcctgggaggaggagctgagacctcaggggaggggcgcgcggtagcgtcccgggtcccctagcagggctctagagaccacgtgaagtctcctcggtatgtagcacgccgcccccaccactcccagccccattcccagcgcctctcgggcggagacctgcgacccgcagccgctttccggggccccggacaccccttccctaccctctcaatccctggcggctcctcccgtctgacaggtggcgcgaacgcgtccagtgagaggagtctgaggtttgccctgacgccttccacagccttagtagagattccgtgtttcttccgtctaggcgagtccccagccaccaacagatcacgacccgctgctcccactttattttcagccgggtcttccacctctccctcactacttatgaaatcctccacggaatagttctgtgacagcaaacggtgaagccaagtcacctcactggtcacgaaaccctttttgtctatacttagggagcttctggcgaggcagtattctttaatcaaatcataaaccatattttttggagactacacatcaatgggttgtacctgtagcctggtgtgtaaagctcatttagtgaaacctcagagctattatgtgtcaacttttctacagtaagtattttgccacatgacaaatgttcggcaaatgtcgatggagtaactctgacatgattttcaggcagttagagggtccatgcaatgcaatcagttgcaaatgatgaggttaaagtaatggtactgtacacacagtactatccttccaactagtaggttattaacacctatgtacatctccagctgcttggggacagtagtgtctcaatctcatttgcagtgttttagtgtattacattttttaacataattgaatagtttcaatgtgacgaacattttgaaacatatactctatgctgggcatggtggctcacacctgtaatcccagcactttgggaggccgaagcgggcagattacgaggtcaggagttcaagaccagcctggccaacatggtgacaccccatctctactaaaaatacaaaaattagccaggcatggtggcgcccgcctgtaatcccagctactctggaggctgaggcaggagaattgcttgaacccgggaggcggcggttgtggtgagtcaagattgcgccactgcactcagcctggggaacagagcgagactttctcaacaacaacaacaacaaacatatactctgaagtactttagattgggtttcaatttgaaagattttatcgaattagaggacctcccaatttctgtgagataaattctagagaagagcttcccaacaattttgacattgaggtttattatttcttggaaccaaggaactcttatgatgtcgtcgatagcaagacttcagccgttttcctactgataatataataatgatatattaagctatgaaacctgatagttaacgatggctccagggaagctttgtgatatataaaaaaccaacattaatgccatctctagtttagataatactctgccagctctttgctatgaagccccataaagggaatttactgttgcctcgctgaatagtggttaggaggatgaactcagaagcaagtacagatggattctgttctgcctcctcctcactgtgtcatcttagttactaatctttctgagcttcgagttcctattctgtgaaaagatagtatcatctattttcacatggttgaaagattaaggaaaaaggtatgcaat

SEQ ID NO: 316977 - DNA, 4001 bp, Homo sapiens
caaactaaactttctcttgagtataacctgtggaacttttaggttaaagggagttactcctcccagtccacatacaacatagattatggggatactataacctagcagccaggggatccacacaataaaaagggcaatgtatgtccaaaattatggtctcagaggaaatgggagactgtaagaagtcatataaataaaacattacagggatatagcttttagaagaaaatgcaatcaaataaaaacgttgtaaaaaacttgccaaggagaagaaaattgagatatataatacctaatagtaaaaggtttttttgtttttgtttttaaaaagcaagcatgaaagcgtggacttggttggaaacaagacattgaaaaagtaaactctctcatgactgtagccacagtagtactgtccccaagaaaaattagatgactataaccgccttccccaacaaaccaagttgcaaaggactgaaatgctaagaatataatcagctaggatacgaaaaccatggttctccaatgtgagctgaaatggaataatttttaaaaaaaaaaagtacaagcattacagtagccaggtaatcaatcactcgcacaactgagcctgaaccacagctcagcagaacaatggaaaagccctgaagatgtacaatggataaaagacttgttccggctgggtgcagtggctaacgcctgtaatcccagcacttcgggaggccaggcgggcggatcacctttggtcaggagttcgagatcagcctgacccacaaggtgaaaccctgtctctactaaaaatataaaattagccgggcggggcgcctgtaatcccagctactcgggaggctgaggcaggagaatcgcttgaacccgggaggcggaggttgcagtgaaccgagatcgcgccattgcactccactccagcctgggtcaaagagactccgactcaaaaaaaaaaaaaaaaaaaaaaagagagagacttattccgctgcagcgccaaaatcgcaagctcagaactctgcacagacggcactatttcaaaggtcaaaaccaggacctcagcaatcttccattaggtgactttacaaagtgctacaaaagtcatgactactactattctttacaacctagcaagcgaaggaaagaccggggagagccgggaggccgtttaggagagaaaactactttgacaaagactgcacaattacagaataaaaatcaaaaataactgatagaattaaaactgatcgcagttcatgtctttggcagcaaactcccgtttgagccgagcaggaacaaacgcgttatgcctgaaccttgtgcacatacaattctttcttctcttgcacggcccgcttccaaaatgcattcaccgccactctccatggaaccttcagcgggccctgggggcagccagaattttccaaacgaggaagctgaggatcggcccagaaccctgaattttgaggggagtgagacttgggccctcacaggcccagacgcgagatatttcaactacacccgggaggcgcggggtgaaaactccctggtgtcgggcgggtgcaggcccctcgcggccggtcgcgccagagcttccacctcagggtgggcggccaagcgcgtgggcacgctgcagggagggccgctcacctgggcaatgccggcgcccatcagcccgccgccgatgaccgtcacgtgcttgacgattatcttcttggccgaggccgaggcggtggacgaggaggacacggaacgcatgaactgcctggtgacgaaggccatggtgtggcagcggcggcgacagcgaggagacccgggcagggaagacgcgcgaggcgggcagccgcggaaagccagactctgggggcggggacctacgcggccctgcagcccgcgcgcccccggcgtccccgtgacgccacaaggcgggggcggggcctcgagtcccgctctgcccattggccctggctgtaacgtcccagcgttgagcgggtatacacgcgcgggctcgcagctgtcagcagccggagcccgagtgagcgcgggcttgagacctgctgagcagcgggacctggcggctggcgttctggtgtggggccgagaacagacccttcttctgaaaagccactggccccttgttctatgaagtgagtggtgttgactctgtaaaatgctatcctttgatgacatgtgcatatctaggctctgaagaaatatgtgctgcttggctgtgttggtaatggacccaaaatgtgcaccgttggttgatgtcaccaaataatcaactcgggattattttaatcccgtggacagtgattgtttcccctaaaagggaaataaatgtagactgcgaacacccaaaacaaatgtctagtgaccatgagttacaatgcaaaaatcaggctcagggaaggtaaagagagagttgacctttagttacccatcttgacgttggacgtctatcagtgcagtgaacatgtggacggtttaaggtcatagagcaacctttctggaataacgaatactattagaaagcataggaaagaaatgtcttgtcaaataatggaagactggatagcagcttggccaatcttctcactcaggtgaatactttctaattactgtaacttagtgatataggattcttattaatttatttgctttatgtttaaatattgttaacaaaaaaacttcaaacaagtttagcagagtttatctgagcaaagaaagcatgaatcatgtagtatcctgagccagtaaaggttcagagagctccagcccctaacagtgggcaagccgcgtttatagacaatattttttgcagcctgtaatgggctaaaagctccgctgcggtgattggccaagacttggccacttgttagaagaacgtactctcaaattacattgcagtttatttacatattaggtttgattatgctttgctaggtagggaggcaactttaggccagatttaatttaataacagtttcctcctttgggtcagcctctcagttttacgagattgaccagaaccttgttttgtctcagtatggaagtcacaatgtcaaattagttgagtgattatactttcttcatgttgttattctaactgtaataacaccatttggtgtacaaaggatggctgcatagagacattgaagactctcgaggggacaacaacacatcagggagactattatggccacgagaaggagtatagcaataaactgaggtacacaccttaacaggagtctccacaaactgaactgatcaaaattaaacaattcaaagttcaggcaataaagatagttcaaagtatttgagtccaattggtcatggtctaatttagggcattatggcggttaaggactgctagaaatgcttatttcttggtgccgtaaagaaatagcacttgaacataaaattaatttctttagcaaggccatttttactttctgcggaaagagtacactcgccagcagttttgccacaagagtacaccgaacaaaggaggcagggtcatttataacctgacccgtccaccttactgttgtgactggtttccattggctagaacgggacttcacattctgtatttgtcttgattggctagcaacttagaaattcttaaaagaggcaaaggcagaggagaacaaaggaaggaggaagtaacttgtggaatgctgagaagggaaaaacacctctaaataaggaagaggaacaggctatgacctaatgcccacttggaccagtataagcatgccagggcaaatatttaggctaaattgtgggagctaagaacataaagtacattgatttctttattacagctagcagatatttaagaatgttaacaggtctttgaataaattttgcttctaagagaggttactatttattcctaatcagatgaggaggaaagtctttgaaaaggaacctctactttactttttacaaggaccatagttcactgaatgacctgattcagccttatggcctga

SEQ ID NO: 316978 - DNA, 4001 bp, Homo sapiens
tagtatgagaacaaccacaaaactcagggctcagtctctggcagcctccttctgggagtggggtagggggtgcgatcaatagtgaaataattggaatcaagggcttcttcgagacttattctggaaacatctgaaagcaagattggattggaggccaaaagaagggtctaacagagacggggtgaggcatccagaccagtgcgatcgcgatcgatcgcgacccagagttttcaaggtccgtcctaagtactaggggagcagcgataacccggaggtaagatcaccagcgcaaagcatccctaaccttctcctcctcctgctgacaccctcccctcaactctctgcttatgccggaagccatccttacacaacctggtgcaaacaaccttgaagcgggacgcagccaaagaacacgagatgccatttctcagcccaattggaaagaggccgggagcaccagttccctgaccccctcagccccaccgcctgccgccccctggtactgaccagctccttcttcctcttctcctctttcacgtcggtcttcttgatctctgccttgaaggcctccgcctcgccattctggtcgtccttggccagcaggtccatgaggtaggcgatgtagctggtggccaggcgcagggtcttgattttggagagtttggtgtcggcgggtacgttggggatgcactcgcgcagttcggcgaaggcgctgttgatgctctgagtcctgcgccgctccttgcggttggcggtgcctcggcgcttcaccgggcgcggcccccccaggcccgggggcccggcgcccggcggcacccccccgtaatgggagtggtccaggccggcggcgccgctggcatactcggggctgtaggacagggccatgctgtagtcggggggcgacatctcggggtggccgatgagccagccatggaagtaggggttctcctcatggctgcagcggctggcggcggcggcggcagctgcggcggcggcggcggcaaacgggtagccctcgtggtgcaccaccgggtggtggggaaaaccacctaccagactcatttcgccctccgcgcccctccacgcgccccagcgtgcgcgcagccccgccgcgccctcggcccgggcccctgcctcagcgctcggcgtcctcccccaccccccaccccccagcccccgggcgcccgggcccgcccggcagccgcagagggggctgctgcagcccgggccccgtccccccgcctggccagccgggcccgcctcagcagcgctgcggccgccggctccccatggggcgcggcgagctggtcctggcaccgtgcgcccctggccgccgccgccgccgcctccggttcccgccttgctccacggcccgcgcttcggctcctgcttcccgggctgctgcgcggaggcagaatcctctcgtgctcatacaaaggtgccggggctcccgcgaggctggtacgcggagtctcgggaatccaagcccgggccgcggtcctggcaccgaagctaacccggaatccaggggcgagtctgagccgcggctggaggagccggtccagctgtgccggggggcggcggggtcgactgctcactgcaaagctacctccgtgcgaccctccccttcccgcctcttcccctccccccaccagcccgatctgggttcttgggcgcttattgttttaatgaaatttttggttgttgttgttttggtccttaaatgtgattttagctgcgagtaacgtgtcctcgctcctctcgcgctctctcggagggttttcagagaggtctcagtgcatccattttctcagatcctctcctttcggggcaaggatctggggccctgaatgagccttggagctcgaagaccgcggctcgggctctcggagggctctgcgcggtggccgaggaagctccggggtgacggcggtggttctcctgggctggacgacgtgaggggagcaagcggattttcccagcaagatctccatgtacagctacatctttagggccgctcgggttaatatatgtcgtcagaggctcctcacgccaatcccggggcggcaggggcggcgcctcgagctctcggcaataaaactttttgatgttcacgttgctaattgccgaggtcctcttccaggattggctacctcctcataaccataagataattaaaacttggcggggggggggggcagggttaaaaaaactttttttatcagtcagaggataatgcaagtgtttaacagatgcttcactattaaaatattttccccccaagtctcaaatattgaagaatctctaaccaggtacagtatcactctgctctcttttctggttgaaaagaaagaaagaaagaaaacgcaggtattgcttttcgaagtgctttgtaggtaatcgaggtaagaaaatatacgcaggcagcctcttacaattttatgcaggggcgccgggagcctcgtgacgggcggtgggggcccccacaaaggcgcggctgggagctggcgctctttgccccagcagggacgaggagcggctggagaagggtgtttctttgacccgtttacaggctcgaaacgccggtctcagtggctattgagttacccaccaagttaccccggttagagctgtttggggtggctcacgttattgcggcaaactttggagatgacggctgagtcctccgggcgaacatgtcaagccgattgtaaatgctgttatttccacatccttcagggacaccagtccctacgaagaccttgggcgattttgaagtgcgggcacctcgattccccgaatctgtagtgtggctggtatcggtgttcccctggtttaactagcctgtttggtaagtaactgaatattttttacggcgtgttcagagcttattttccagtttttatgaacaaacatataaatatatctctgcattcctgcctccctcataaaagcgggcatctgtggaaagcaggtttagttatcggaggggaaccattaaacgccagtttaagaggcaggccgggaggacggctcgtggatgttgagactgctggccttggtgatcttgaacgcattataacggaaaatggatctccacttgtaagtcaccgggccgcggggcacccgggccgcagcgcccgtgtggcatgagcttcttgagaaggctcacgtgcggcgagggcgggtggtaaatggcaggagctgaaatcaccccaggcttggccccaagccgagaggggaggctgatgtgtatatgcagattccacccgaaggagttcggtgtggaaaacggtgtcaacaggagcccgcgggctgtaaattagagggaggcgagggcctgcggcgccagcgcgggacagggcggcctggggctcgccgctggtcaggccaggttagcccaagggagaccaaagactccaccttgagcatcgccctttggaggcgggcagagtccggccgcaggccacaaagcgatccccacccgaaggactccacaaggacagtcctttccttgctcaccgccgacaaagtggttggggcaggaaggcgaggtcagtgcgaatggagggcgcccaacttcggtgttgcagttgactctgtgctcgggctctgccctccactagccctagagtcttgggcagcaggattgagaaatatatatatttcaggtttgccgcggctgggcggtaggagacagggacttaaaagcccaggattagagtcggtgcagggcccattctttttctaggaaaggggttaacatccttgaacgtccccagacaagcgtcttaaagcattgaacctagaatagggattaactgaaactaggctcgttggtaagcgccaggggcttgcagttgagctcggaacaaaatagtgacctactgctctaaacccccaacttgcgtgggtctgcaattttttagcacaaggagagccttttaaagacctggttcttcaaggaaagaatgcaggtagtgtggttgggggttctgttt

SEQ ID NO: 316979 - DNA, 4001 bp, Homo sapiens
acaaatgtatgcgagctgcagtctagccatctctagtcgtctctcctcaaggatttcttgattatcacaaatagatggtgtctgtatatctaaaagttgaaaattgtcttcatttgaactttcaactacttcatgtataccctgaaagaactgttttttggtatacaaagttaatgctgctgtgctttgctcttcctgacttaggtatttttccaaggaaaattgcgataaaaataccagtggatttgtcccttgacctaaattagaatgtctgaagaacatcatcaattgtgtaacttcatcagtaagagcctgaagttcattactgatcttagtgatcattgcatttagaattccttgactctgcttcagctttttagtggcttcttcttctttagcatttaacctcagagatttgtggctagttactgaagccatcaattgacatttattacgtcgctgaatttttaggttctttaatttcagtagagtttgaacctcatcctctaatttctccagctctttatcatccagtctaggtgtcttcaaatcagaagttttacacgttttaagagcttcatccaatgccgccccttctagaataggcttgcctgatttctgaagaatgctaaaagcttccaattctctttcagacaacacgttctgttcattcacattcccacaaaaccacttcagaaacgattcatcttcaacgccctcaaacaaccagtcaaagtcttctccattaagattatcagctttgggataaccaattttttttaatgtttccacaaactcatttccacaactcatggttttaactaccccaattttgttgtatctgatatgggtttacggtgttgatttttagaaaataaatccaagcagaaaaaaagctacgttttataccaagtccacagagaagggaaaatatatttttagaatctataatgattcctcctaggggggaagaaaacaagtattagaccacaaatatgacgacagtgtttttaaaaagaagacacagacaaatatcacatgatatccgagagcgggataaatgacaggtagtcgtagctgcaatgtttgatgatgataaagagaaacagaaacaattaggctagttctcagaaaaccgcaacagtaacgaaaagtaattaacaagaaagtggatctatttggatccattttatctttttttccaaagataaaatggtttaaaatgcattacactttatagagcagcatttgtttttaattcaaaataaatggatccaaacaaacccaagccaccaggaggctaggcagcctctcttccctgccctccgtacgtaagaagacgcaaataagcatggcacatcttctgaagatcaactaaatatttacctcaacgtctcgccgggcaaggctccacctccagagtccaccaccgcgacgcggagaacagcaggagcagcagggaagcgcgcggccacaattaagggtgcttcgggccggccttcagccagcgctgaggcagccccgacgccagggccgcgcgaaccccagaggcagcggcaagccccagggatccgcggccccaaggccgcgatacaccagacgcgccagcggcaaaaccttccttcggagggtcacccagctgtgacacctaagcacgctgacaaaacaaacgcacaagcccaccgaatcgccgtcgacaccgagctgcagaagacgggggtgacaggccccgcacagcccccgccccagctcctcgcccagcggaccgggccctgatccccgggcagctgctggagcacctggaaggagcccccaggagcgcaggaaaaaaaagaggcacctgggtgcagacggggatcgcggccactcctccagccccacacccctgcgcccagaaccgaggcccgcgtcagtcacctcaggaagttccgcttgcttctcgcaggagcccgccgccaccgccctccgtgccccgcgcgcctcgcactgcctcacgggagcgcctggacgcgcgcaagcgcacaaggcgacggcgtggtcgtgggggatgactgtttgcgcaggcgtagtgtcaaaagaggcggagtcggcgaggctggactatggggtggagctgagcaggcggcgctcggcccccggccgctgcgggcatcctgcctcctgggcggggcgcagggcagagagaggcggggtctgggccgggaagggcggggacagggcctggacaggggcggggcctgggcagggggcggagcctgggcaatgaatggggtgcagaggggtgcagaggggtgcggtggggcgccctctggggagctgaagctgcgggcctgctctcaacggagccgtcagttgtgcttcaggcctgccctgccccgtacttcaatctagaccctctgaaggcacttttgaatggtacaaagagcagcgcaggttggtggttgggagacaggctggagcccggcggtgatagcgctcgcccccgagagagacgagttcccggaacattcacagcagcccgaccaatgcctggtacattttaagggttagggattgttcgcttagagtcttttacaatgaactttattttgcaaaaacacttaatttctaatccctcaccagaacactatgtaaaagctgacttctggccgggcgcggtggctcatgcctgtaatcccagcactttgggaggccgggggggggggggggggggatcatgaggtcaggagttcgagaccagcctggccaagatggtgaaaccccatctctactaaaaaatacaaaaattagccgggcgcggtggtgggcgcctgtaatcccagcgactcgggaggctgaggcaggagaatcgtttgaacccaggaggtggaggttgcagtgagccgagatcacgccactgcactctagcctgggcgacagagcaagactccgtctcaaaaaaaaaaaaaaaaaaaaagctgacttcctccacaattcccttttcaaaatgttagaaataaacggaatggcctgagttaaatacatcgatatatttaactcaaggaggatggtacaccatttccaaagaggatggcagtcagtgaaagatgactgaaacgggattgctaaatttcatgtgaatctggctgatgccctacagcccagtgaaaccagacctctctattggacagaattcgtttgcatctctaccaaacaaaaatcctttgccactcctcagtcttccacaggttagcaggggctttggtcatgggtaaatataatagtactccctcccttcagcgtcaaatgaccctaaaggtggcttgttagacaatgtcctagtccagggtgactaggtagaagtcgtttggatagtttttcttaatatttttaaggagagaaataagaatgttctaaggcaaatattgtaatctgatcgagtcaaagatatttcctattcattcttcacttgtttcacgtttttttcctcctcttttaaaagtcaataaggcctaaaatgatctgaaaaacaaacatgatgggaaaaaattcaaagagtggtgcccaatctgcaggcaaggaaaccagggatgctggaacggggaggcctggtgggaggacccttgcagcccagggttggaggttgggggtgtgcatcagggggcagagttgagccagtttggacaggaggaagtgggagctgtgcaggcaatgccttccagaaatgttgctgatgaggcaaagactgggtgggaggagtgtgacacagagagagagatacagagagacagagagagacagaaacagagagacagagacagagagacagagacagagacagagagacacagagagacagagacagagagacagagacacagagacagagacagagagacagagacacagagagacagatagagacagagacagacagagagacagagacagacagagacacagagagagagagagaggagaaagacagagagcgagcatgcaaaacaacacaagctgagggg

SEQ ID NO: 316980 - DNA, 4001 bp, Homo sapiens
ataaaggagttttcagtaaagctatcatagtcaccaaacatgtccacttcactgtcattaggctgcaaagagaacaaaaacgcttatggtcaattccagtttcattaagaataaaagcttcaccagcctggccaacatggtcaaaccccgtgtctacagaaaatacaaaaattagccgggcatagtggcatgctcctgtaatcccagctactcggaggctcaggcaggagaattgcttgaacctgggaagcgcaggttgcggtaagcccagatcgcgccattgcactccaacctgggcaacagagtgggactctgtctcaaaaaaaccaaaacaaacaaacaaacaaaacccccaaaaaacacttcagcctagggctgtaccaagtatataattatatggtcacatatggatcacagacctatatgtaaatagatatcttacagctgaagaaatggaggcccaaagaggttaaattacttgcctaaacagcaggttcaggagtgttacgatgatactgagattctaatttttgagacagggtctggctctgtcacccaggctggagcacagtggctccagccactgcacgatcacagctcactgcagtcttgacatcctgggctcaagcgatcctcctgcctcagcctcccaagtagctaggactacaggtgcaggccaccacacccggctaattaagaaaaaaaaatttttttttttttttgtagagactgggtctctgttgcctaggctggttttgaacgcgaacttctgggcttaagtgatcctcccatctctgcctcctaaagcactgggattataggcatgagccactgcacacggccagattgtaattcttaaagctgtactaaaacagcaggaagactggtagacgtctactgaaatgtcagcgcattcgaagtttctgataactgcagcgcttccctcccagactacaatctacagtgactggcctctaacagaaacatggttgtaccactagacactccaaggagttcctaggaatttggaattgagactgagaaactgaatactgacttggagtggtctgctacacagaagacacacaaacctggaggcagcaatatagtaaagtgattaagacaacaggatttggagcaagaactgtactatctcaacttttcagggcctgattactgtcgtaaaatctagataatataactagcttaacataacgggtcttcaataaacagcagattttatttgtacagtaggagctgcagttatctggaagcctagatttgtgtctcagtcatgccacttaactgctgcgtgcacaacttttatgtctcggggtttacatttcatatttatatagaaatgtaaataacaaggcaatcaatacctcctaagtgccgattaacagtggtaacgaagacgagagaagtaaacgaaggcgataaaactggtcaactctttgcatctgggaaggatgccaaaagtttgcagtttcaagttccaagtcctccgtacctggtctcccacccctctgtcagtgggcatgtgacgtaggaggtccgggtttgtatcaccacctccaaggacgagacattccggggaatctgagagtagaaggggctgtacctcaaccggcagtacgcccgcggttttccgcctcctgttctcagccaccatttcctcctcctctttcccctcatctccgggcacgagctcggccgcggtgggagcgccaaaaatacaccccaagcttggacggttccttttggggagagacacccgccggcggatgcgggaaccacattcatccatggcaaggacccagggccctattcagacgtcgttctcagtgacccagacgctaagcccatatggaagggagagtgggacgccggagcccgcttctacatccaccttgggaaaagaccccaagttagctctcagggctcgcggaccggaagcacgcataaacttctaccctgtccaatcataagcctcacgtgacctgccgcgtagggagggcacgaacagaaaggtgctgcgcatgcgtattgaaaaacctcacctactctcgcgggtcctcagcgttctcctgcggaacctttgaacggggtactcgagcccacaggggaagagcagcggaaggggcctttcggaacgatttggaacgaaaggaagtggaagaaacgcggaaccatggccgctgtggttgctgtttgcggtggtctagggaggaagaagttgacacacttggtaacggctgctgtcagccttacacatcccgggactcacacgggtaaagtctccatatcctatgctccattgtagcgctgcaggcattaaccttagtcctaatggttagagtcgtccctgttagcaaaacgactctggtttctaggcgattaagtttctccaagatgggtgggaatctgtaattgcctttgactgttttagtgtcgtctaatccactcctttaaagtatttaaacgtatgaggaagttggagtggttcttaaaaagcagagactttcctaagatctctggataatcttagtgaggaagggacatttccagagtcgcccagcagcaaattccagatgtctaaggtccccaaacagaacaaaattgcataatttttgcaattttatcttctctgtgcttctctataaattctttctgggacgggtctgttactttctttttggtatgacagtgcctttctgttgcttctcctataagaatttgcattaagaattttctctaaccatggaatgaagggaaaataaatgtcagaaagagcaggtatgggcgggaaaatatgttcttttccccctaagccctggaaagcacacccatgttgagtcttactctgtcccaaatataaaagtttttaaccattctgaatataatacaaaacctttctttaatatcgtgtcccttaattcatcctgtctccataaaaacaaaaatctttagctattcagctaagaaaaagaaatggttaattgctgtttctgtttaatcgcagtgctttggagaagaggttgttcacaacaggtatccagcaatgaggacctggtaagaatttttttttctattagtaaggcctttgcaaatatgaccaaaatgtttttctttttaaaacgagatctggtattagactctaacatcttttattttagctacttgaatagagttctgccgtaggacaaaacaatttgataattactctgagttcagaaatgatgatgaattgattgtagtcatgtagtcagctgagttttgaagtaggggaattcctagattagaagcaaagctgctataataccatatttttcttcctagatcttaaatttaaggatatgtgatttgggaattgttttttttttttttacatagccctttgtaagcaaatgatatgggaattttaaaaggtagtttgggtgagcagaattttagataactgaaaagagactgtacaaagcttagctataggttggctatagtattaacatggactttctgaaagcacaggttcttgctacatgcaaaggtattttgacactaattagaccatacaaagcacttggcacagagctgaagagtagttacgtgagctgaatgtaaattggaaagtttgaggaattggaaaaaacaaaagaacttgtctagtttctctgagcatctgtcttggtaatctaatccatgcaccatactttaagaaagtaaagggacattatttcttttttagttcataaatcccactttgtctctaatcaaagttatggaccctctccacagaaaaaggcacacagtcccattcatttgaagttttgcatacgattacagggagtcatgggcttcaaagccatttctagattaagaacctctatcctggagacagccatactgactgtaggaaggaggcactgtgacaaaagcattagaggcagtggtggtaacagaaaagccaaaaagactgatacaaacttatatagtagcct

SEQ ID NO: 316981 - DNA, 4001 bp, Homo sapiens
tgtacaatatatacagcatttctcctaaaagcgcccaaagcgaggagaaatctggcgggcgagtgggcgtcagagcaccggggggtgctggggcgtgtgcaggttaagggcgttggggtgcgcgtggccgatcaggttgaggtaatgccggtccaggccctgcaccggtgtcaggaaggggctgtgctgctgcgctgggctagcgagcggcactggcgcgctgggcaggtagggcagcgcggggctgcgggccgcgccaggcggccaggggaaaggcccggcaccagagccctgcgggaacacagcggcctcgcccgggctgtgaccagcgaattcgggccccgcagggtgcagctgataggagaaatccggctccgggagcgaacccagcggcggaaaggcgggctccgcgcccaggcgggccttggactgcaagaaggcgaggatgcgcgcgtacttcgtgtccttggtctccatccgctccaccgtggtgaggtaatgcaccaggttcttcatgcactcgtggtagccatagtggaagtagttggcaaactccgctagaagttctgctggaggaacgagaaagcccgtaggacggacacaccctgagtgccccttccccacgcgagcccaaagcgggtgcagggcacctcccaccacattttctggccaaagttcccatttgaggcccgccctctcctctgcgcagtcttagagactggcgaggcacgcgcaaacgccctctttccctgagagcctgaccccacccaccccacccgggagaaggaggtggaaccagcctccctgggaaccagttctccctcgccgccttgctgtcgccgagcagggagaggcgccttcgcaggacccctgccctcctggagagtggagctctagtagagctctcgggaacactcagtcactcccctcccagccccagggtctctgggtggcgcaggcgcctggcccaggcgtcccattccctaacctgtgcccacctttttcccttccccggggaaaatcagcggagtgcagtgctctcaggtactgaacggtcatctcgaggatctccgccttctccagcttcccggaactctgcaaaaggaggaagggcccctcgcagcggcccagcgcctgctggtcgggcactgtggcgctggagaggaccagcgagcggacgcggctgcggatctgcgccagagcctcctgaggttcgccctgcgctcaggccccccgcctgggaggggcccgcaagtgaggtcctctgtgtccgcgggctcgggcgtctccgcagagtggccgcagaggcctcccaacgcctggcacccggctccgggtcgccaacgttacctgcttcgccaaggccatgggcactgtcttgcccagctcgttcaagcagcggttgatcctgtccctcctccgcttttctatcactttatgagaaacgggggttctctgcgaagagagggttgtatgtttaggatggctttgcccgggaagtcgtcaaaggcgcggctctagcagctgggtgcaagccgcctctccagccgcgcacactgctcagattcgctctaggaagggactcctggcccgccacgctcgggccaggtgagctctgccttctgacgcccgcgctggcgcgctccccttccagccaccctacccaggcctttggggaggtggccgccagcctccaggcaggacttctacctggttgagcaccctcctctctctaccccacccccttcccaaaccactcgagattcctccacactcaaagtcccgtgcgggcacttccctgccatcggtccacccaagtggcgggtcggtgagtcagatgcctccaccaccagggcgcaagtgccatttgggctcagccgactcactttgcgttccttgagcttgtctgacatcctggtcagtacgcgccctcgggagaggcggtggcgcggggcacccgtccacttttccgcctcgtgtgcctcctcgagtgtcccaggtagactgcagcctcccaactccgagggctgccttataaagcggtcatctagggctccagatgcattcacgagttgaattattccataggattaggggagctgcgtttggaggatgtatgcattcaagatcagttttaaagaagttaagaaaaaaaaaaaattagcagccgaggggggcgagctgggggcagatcagctttgttaatccacgtggcccttcaaaggacacgtgatcggcccaggaataacatttgcatggcaacagctcgggcgggaaaaggaggcggtaaactggggccggcgggcgagcaagcgcctgcagcagtcgcgggcgcggagcgcaggggcgcagcggccgcgggcaccggggggcgaggaccctcacaaaacagtgtcgcctcttttagtcccaccgctgagtctcacatgatcgcctgtttacaaatcccagcaagcccgccgtcccagcgccgagtgcgttttaaagcctgtccagagtcattaaagtaattaagtaagcctttaataggctgttccgccgggttcaagggagagctcttggagacggaggcgccccgtttgttcccaggcttttctcacacgacttggtgacacgtccttctcccccctttttgtttacaccgctttatttgtccggacatcccggcaggtgtggggctgcggctggcacacgaggctcccgcctcgcctcgcctcgcccctcccgccgctgtttggcacgcgacgctcccccctactccctgaccacgtcgctggctttcttttctccccacccctcctgctccctcttcgcggggggaagaggctcaatttgtagcctattatcctatacgaaaatgtccattgaaaagtatgaatagtttcattgggctaaattttaataatgccagagggtgggggaggagagactggcgggcgtgtgtgtgtgtttgtgtgtgaaggggcgggtgggaggattggggggcaacacggagaagagtgggccgagaagaaaagggggaatgcagctggcccaggcaagcattatgcaacgtcacctgcgagagggggcgcctacagacccctattcatttgcctaattttggtcaatttaacaaacttcaggagaaattattgtggctttgtcagggagggtgaagccttctgatcgaattaacagcatgttttgatccggtaaatgtcattagaaagggagaaacaatcgcgcttagagggctctgagtaatgcgcccaagtggagacgccaaagcgcacggctcacaaagggagcaagtagctgccacagggaacttttgtacccgcccatcgcccaagttttgacacaaaaaggcattatttcatacttgaatacgtttaatccaacgattgtctattttctgcaaacatattttcacagcattgttaactttttatgtctccctttcgctggcgtcttttcttaacgtttgggggcgggagagcgcagacactttgggcatcaatatttgtcactgaaaagggccctgtgaagtttgggaagttgatctcttttttatggttttagaaagcgaaaatatcggggggaggaggagggagggaaggcacgaacagaaacgagggaggaaatttgctggacgggcccaaggggaaggaggggggcggcggcggctgggaactctcttggccgcctgcgcctctgagggcaacctggccccgcggccagaggccacctcccccaggacgggcctcgctcacacttgctgcctcggatcctatactctgggggctctgagcttgtggggtgtgggtggggggtgagctttcttgcagattgaaacgataaaaatgatttttgttttatggccctttctagagccaccgaactctcacctctctaatcttttccatctgggaacagctgagaccgcttctcagatttttcttcttttctgcctgcccctaaccctgcctaaattctctctgttctgcagggagatggca

SEQ ID NO: 316982 - DNA, 4001 bp, Homo sapiens
tctcgaaagaaaagatattgtcataactttatttctacctctctatgcagaaaatcccattcgatctggagaatagtacttttacttataaaactgaagcataactatcttgtgtctccagtaggggtactactactctcattaagtataaaaaaagtttttaattggtcatacaaatcttaagaaatttaaatttggtcttcagaatgaaatgctataacgaatggcttcaagcacacaacatggaacattctgaaatccctgtttctttttcaaaaagtaaactccagctacttactgaacaagaactggatgctagtgctaatgtgctaattttgtttttcatgccaaaggagttctgccaaagaggtttctaacctgtcctccttgttccctgcattatactttttacagaaagttcctagcctcgaaggcggtacgaccatgatgtaaaatatgtaattcaattattttgctttaggatatgcaatccatgtactttgcttttctgatttataatgctactccctcctcccccagggtaaaggaaagtacaaaaggagagagcttcacagtaatctgccgactaaaacatgatacccgatcaccgcatttaaaactttttattttttcatttctctcaagtctagagttgaaaaatcagctcacttgatcttatctaatcatcaaataaaaggttctagaaatagcttcttatttgtggaaagagccagaagacacatacaaatggaagagagctcttgaatcgtctttcccaaagcattctatgcgtgatgaatgcaagcaaaatcctggaaggcttttctctgaattaggtacttcctaattgagctcatttgaaagctgatgtaaaatgcaatcagaaagcagccagaaacagtgacagaccaacagcaaagttcaaatacttattccctggagctcatgctgcatacacatattccgtgcacagtcgcattaggtactgtctccataggctcacctgtttcaggttacacatgctcctctcggtctggttgccctggtttgcccactccacacattcacaaatgactcaagtctcacctgcccccggccgtcccagctcctgacacccccgcgtcggtccgcaccgacgtgtcggcgtacacacacacacacacccgtacacacgtgtccgcacacaccctcgcccccggccccgcccaggaggcggacccgggagaggcgagccggcccggcctccgcgaagtgggtggtgccgggccccgcagccctgccggcgctgtcatcgcggacgccgtgcaccgcgtcctcggcgcaaactcctcgcggccgctgaggttccccaaaatgccagggcctcgccagctcccatttcaattgaaagcgtccgcgcccctcactgcacggaggtccctggaaccccagaatttaaataggggcagggggcgagcatagggactatcctccttttgactttctgcgtcgcaattcctcccgggcggcagggcgggagggcggccgagcgcgggcgggaggcgctcccattttgaaggcttgtctcgcctttcccggcgcggggctctctgaccggagggcgagcccacgagaacgccagggaggcgtacgcagggtactaagggcgccgcgccccaacctccccgcgccccagacccaggtcgtctctggaggtgcctgcagcccccgccgccggagccacgggaggagccgcagccgcccctccgggagccgcgcgctgactgcagtgccaggcggaacgcggcccagcgcggctgcagctccgccgtacccccctccctggaaccccggcccccgccctgcgcacctcggcagcagccgaaccgcagcttgggactccgactgtcacagcccctctcgccggacccggggtttctccgttttcggcgtcacaataataaggaagtttccccgcaagcctgcgggcggcggaatgcgctgggtgaatggcttcgcaccgggccaatgggcgccgttctgggatgggcccgcgccaatggcggccgccgtggcacgggctggaggcggggcggcaaggtccgcgggcaggaggaggggagaggcccaggccccagagccaggcgcaggctgcccgaggtgacaggactcgagggcccggcgcggggacagcggcacgggtgtgtcagccgaaatcggactgcaagacatagagcgttgacgctgaaataagattgcttttcactggcggggaagcgagctggaccgatcagcggttgcctattcaggttctggactctggtttttattatttatgaagaggtgaccgaaagccttgggcacgggggaaaaagctggagggtgacaattgagggagagtgcgctagtcttctgctttactccccttcgtaggactgtaggaagcgcggcgccggcccgcggcgctgcgcggtgggagaggcggggaaggaggtacgcggcagccgccggcgctcttctggagaggtggggatcgaagaccggcacggggctgcggaagaaaggcgggcctgggggaggctggagggtggacccggggggagcatagcaagaagagtctgagcaccagatcttaaaatcttgtaatctgaaagacactctgtggcctatacccagtaacggattttttaaaagtttgtcctcttccacttttccctagcgccgaatcccagagcttcctccccctccccaaggtcactagtgctttcatacttgccctagacctgatctgatccacagctaatcttttgcagaaaacctcagaaaggtgacttcatgtgtctgccccccttaaatgtaaaatgcagaacactggcacggtactgctttaatccaaaggaataactctcccagtggaagaatttctataacctggcatttgaagcaggaaggccctttgaggatagattcttaccaaggacattcaaatcacctcaggtctgcaatcgctcgtcctgagaacctaacagactgaccaagtagaaaagaaagtttcaaggagtggtgtatcctggggatgagacgttgttggctgactgacagtgttgagccctccgtgaaataatgcaaattgtccagtacactgagacaagaaagctaaaaaagcagaatctaagttatcaggtcatctaagaaaaaatccaaacctttgaaatttggatcacacttgacacgtttagaaacactggggatggccaggcgcggtggcccatgcctgtaatctcggcactttgggaggccgaagccggtggatcacttgaggtcagcagttcgagaccagcctggccaacatggtgaaaccttgtctctacaaaaaaaaataccaaaattagccgagtagggtggtgtgcgcctgtagtcccagctactcaggaggctgaggcaggagaatcactggaacctggaaggcggaggttgcagtaagctgaaatcaagccactgtacttactccagcctgggcaacagaatgaaacgttgtctcaaaaaaaaaaaaaaaagaaagaaaaaggaaaaaagaaacactggggacaagagtaacacaattcacttatattccagatatgtggcagtttcacaaaagtttagtctattacaaagatgcaatcccaatttagagatgctgttggcaaaagaactggttaaatgcccaaagaggagtctggtaggaagacgaaggagtccggtacttgcaaaggagaaagtgagagatcctattgttaggtgtcacatatgaggtttgtaatcaatcagtgtttgggttgatatgtctggcccatggctcaagtgtttttctttttttgttgttgtttttttgttttttgtttttgagacggagtctcgctctgtcgcccaggctggagtgcagtggcgcaaactcggctccctgcaagctgcgcctcccggattcacgcaagtctcctgtcgcagcctcctgagtaactgggactacaggcgcccaccac

SEQ ID NO: 316983 - DNA, 4001 bp, Homo sapiens
gtaaatggaacatacccttaaaatatccaattaaatatctgcttttaggttcttgtttattaagacgaacgaaatttgaaatgacaaagatgaaaaggtctataagaaaatataactttaagacaacataatctcatttcaagaacaaatagtgtattctgaaacacattcctttctcccaaaaagcaaataacagtaataaacacttcccgacagttaccaatagaaaccaatgcctatattcttaaaaggaaggattatgtttgggggactatctttaaagaggatgctgttgaaaacatttttcattggcattagtgcacatttggccctttctgaagttaagagattaaactgtccactagtaaaaatgtactcttatttaatttgttcacaaaaattaaactaggatagttttgggaccttgtttcatcttcagtgctaatgaaatagaatctattcgtgtaaaaatctcaaagcacaaaccatattacaaatgctaggggaaccaaaacagtttggtaataagaaatggtccagcagactaacggtttcttttaaagagtctcagcatttcaaatcagttgaaaaaaaggaagtattaagaaatggtattgggacataggctaagcctttggaaaagcaaataaatctagctcccctcctacctcagtactgaaaattccaagcgtacgaaaaattttaacttaaaaaaaaaaaccttaaaattactacaaaaatgagtacattttttaaaacactgggagtgtggatagctttccagcctaacataaaacccataagccttaacagacaaaaaaattgacagactaccccccaaaaaatgcactaaaaacaacatgcacaaaaggcaaagtgagaaaaatattacatgtacgacgtgcaaaaggctattcttattcaatattcaaatacctcttccatacaaataagaaaaagatttaacaactcaaatttctaaaagccaggcaaagataaacaggcaatttaccgaaaaaggaacgcaaacgtccagtagttaaacgcaaaataaactcgcagcaagataccaatttcttcactccacagatgggcaaaattttaaagaacgcgggcaactatttcccccacttcgatgagaatgtgggagaagtgcaactgaaggccaaggtaaaatcccatcactgagaacgactcccaaagttggagcagtgactactttctcaaaacgagacagtgggagatgcggcgggcgggggacgggggtacaaacttgaacagaaacctatgagaaagccagactggctaaaaggatgaagacggtgcccgcatgccccgcaccggccactttgctgagcggaggatccgctggtcgccagtatcccgctcaccccgcgcctgacactgaccgggataaaagacagctcaggtgcgccgtcggcgaaactatccgagccaggcgcgcgtctgcggccttctgggctctcctccctcaggcgcggacccccggctgcccgcccctcacagccctcagccctcacccctcacagccctcacagccctcacacaccagccccactcactcggcgtccgggcgccgccgctcccggcgagcagctggtgaacctggacgcccgccccgccgcgttccaagaccgcgaggcgccccggcgagcagcagagttggcgcgtcacctccaccctccggagcagcgcgcggtggaggcccgcggcgctgggaaagagccagagctgtgcgcccggagacttcgcgggctgggtcgcggcggccttgcccgcggtcgagcgcccgttgcgccgcgacttcctccgcgacctccgctccatcgccgctttgcggggtcccaggcccagaggcgagaggagagaacgcctggtcccgggactgagcgcgcccactgcctcaggcgttgcgctgcagagcgggaaccagctgcgcgcagctgcgtggcgtcggggaaccgcagcctcagctactgagcccctgccgggacgccacgccccccacgtgctgtttgggggcggggcctgcagctccagtggaaaacgaaacataatgtttgttgttgtttttagggggcggaatcgaaaaggaaaaggaaactgtaatgagagtgacttggcaggcggccaaaggcaacaggtcgttggctggggtaaaggccgatgggctggactgagaaagtgtccccgggcgggcagcggccaccttaactcctggacggaatggctttcgaggaaacgctgcagttccactaggaggcaccctgacacacgcatttccagagggagggataacggaagccaaagtttgttaagcgttgtgcgccgcggccgggcgcggtgattcacgcctgtaatcccagcactttggggggccgaggcgggcggatcacgacgtcaggagatcgagaccattctggctaacacggtgaaaccccgtctctactaaaaatacaaaaacaaaattagctgggcgtggtggcgggcgcctgtagtcccagctactcgggaggctgaggtgggagaatggcgggaacccgggaggcggagtttgcagtgagccgagattgcgccactgcactccagcctgggcgacagagcgagactatgtatcaaaaaaaaaaatgcgttgtgcgccgggctgaaaccggcataaaactgggcagagctatgcaggcagctaccctcccccccacccctacccccacccccacccccctcgtgcccgctccgctacgtattcccgtattcccgggtgcctggcaacagtgatgtgctttaggccttttttagaatgcatacaaacggaaccatatctaagtgatgtctggcttttttaacttagcacaatgctttgagattcatactattgtgtttaattagtaattcatttgtgttattgttgaatggtagtctatcatatgggtaagccacagtttatttatccattcaccaattgatgggcctgtcggttgtagggaacaggagaaaacttcccctttgccctctgaagggtcaccgaaaatcaactgacaaggctgggcctgggctcctgcctgtaaccccagcccttttttagcccaaggcaggaggatctcttctttgtgaagtgtgtattcaaatcttttgaccatttatttattagctagcttgactttttatctaagagttctttatatattattgagttctttatatgtttcataccatgttctttattagctatacgttttgaaatgttttctacctgtctgtggcttgcctcttcattttaagtgtcttttgaagcactgaagttttcaattttgatgtaatttatccatttttttcttttacatagttcataccttttttgtcctacttaagacatttttgctaaattcaagattataagatttcctcatttgttaccttctggaagttttataattgttggtcttcattatatttaaaatgaattattctttatagtatcgatagatgctggaggcagataagggagggtccctggagaatctctgacctgcctcacaagcttttgtgcagctgaggaagcctgcccagggtcttgtctgggcatgcccacaagggacttgggggcccactgcaccaggagagtggggtgcagccagagggaattcagccttatgcagcagggatgagcaagaagtcttcagcttgtgtgtgttggcctgttattcagtctgtgagctgggagcctgttggcaggaccctccttgtttttttgctaagagcttttaataaatgccactcttcaccttgcaatgtattcacatgcctaattgttcctggtcatgagacaagaacctggattttagctgagctaaggagcaaaaattcctgcatcagtatgaggtaagaataaaggttcttttttttccttatggatttccagtcgttccagcttgcctatccccatggaattgccttggcatccctgtcaaaactcagctggc

SEQ ID NO: 316984 - DNA, 4001 bp, Homo sapiens
atatttattattattatgttttttgagacagagtcttgctctgttgccaggctggagtgcagtgtcgcgatttcggctcactgcaacctctgcctcccgggttcaagcgattcccctgcctcagcctcccaagtagctgggactacaggcgcccgccaccacgcccagtttattttttgtattttagtagagatggggtttcatcatattggccagggtggtctcgatttcctgacctcgtgctccgcccgcctcggcctcccaaagtgctgggatcacaggcgtaagccaccgcgtccggcctattatgtgtatatatatatatttatatattatatatatatatttatatattatatatatatatttatatattatatatatatttatattatatatatatttatatattatatatatatttatatattatatatatatttatatattatatatttatatattatatatatttatatattatatatttatatattatatatatttatatattatatatttatatattatatatatatttatattatatatatatttatatattatatatatatttatatattatatatatttatatattatatatatttatatattatatatatttatatattatatatatatttatatattatatatatttatatattatatatatttatatattatatatatatttatatattatatatatttatatattatatatatttatatattatatatatatttatatattatatatatttatatattatatatatttatatattatatatatatttatatattatatatatttatatattatatatatttatatattatatatatatttatatattatatatatttatatgctatatatatatttatatattatatatatttatatgttatatatatatttatatattatatatatttatatgttatatatatatttatatattatatatatttatatgttatatatttatatatttatatattatatatatttatatattatatatttatatattatatatttgtatatatttatatattatatatatttatatattttatatatatatttttatatatatatattttttaatgccccagtgtatttctaagggagatacaggtgtctgacccacaaaccacgtttgtaaggtcaggctgccttctccaggtagaaccgcgcaggcgaggatttatctgcaaggcaagccggagggaccacatctctttccagagcagcgctgaccaggttagtttcggctctcagtttcgctttgaacttgaattggaaaccgaaacaaatccgaggggcgttgggaaaacgaaactgaggaagttgctcttcggtagcacagggcaccattttcctggttcctgtggctcttcgggccccgaggaatccaaggctcccagcacccctccctgcctggcccgcggcgcccagcatctgagccgctccctgcacctgggcccccgcgcccctcacccgggtcccagcgctccgcacccggttccctgcgcccggtacccaagcccccgcgcccatgtactggggtcctcacaccctgcacctggggccccccgctcacctggcagctccccgcgctgcgcgcccctgcggcccagctgacccctgctgttgtctccgcacgagaggaccctgtggttggtcagcagcagcagagagtggcgctccccgctggccgcctgcagtagctcagccccggggctgcccgccgtcctccggcgctgcagctccctggagtcggcgccccaacagaagtacatcccgcttctgcgccctgtcgcctgctccggattccgtcggtcccgctgcgacaggctcccgaacgctggtgactgggtgcgcgatgatttcctgaatatcaagagactcaccctgtcttcaacccgccccaggggcgcagccctggccccatgtcaactctcgctgcctgaacttcaagtgctgaagagcagagagggcgtcccagggaataaaactgagtttacatcctaagccatttatgagtcgtgaatgccactttgggcaagttacctaatgattccgtgcttcagctatcatatctacgaaatatggactgcaattcagcaaatctaatatgtcgggataatttaataggcacataaagtgttagaataatacctagagtggttaataaagcatctgagtgcccacctcattccagaccttttttggcattgaaaatatgtttgttttttgtttgtttgtttgtttgtttgtttgagatggagtgtcgctctgctgctcaggctggagtgcagtggcaccatctcggctcactgcaacctccacctcacgggttcaagctgattctcttgcctcggcctcccgagtaggtgggattacaggcatgcgccacgacgcccgacttaatttttgtatttttagtaaagatggggtttcaccatgttggccaggctggtctcgaactcctgacctcaagtgatccacccctcagctttccaaagtgcagggattacaggcgtgagcctctgggccccgcctgaaaatacaattagtgaaagacaagatcctcttgatgcgtttacattctcctgagggaaagagaacataaacagataaacacatagtgtaatatcaaggggcaacgaaaaatacaacaggaaccagagggtggaggcggaaggcactggtatttgagatgatattagggaagatctctctgatgaagtgatatttgtgcagagagctgaggggacatgggaaatgagggaatgagtcgtgatcacacctgagggcagaggatgaaaagaagcagttggaaggttttgaatagagaagagccatgatctgacttcagtttttaaagattcatctggctgctgtgtgaaaaataataggacaaaaatggaagcagaaagccagttagcagagactacttcagagttcaggtcaggtgatatcctagaagggaagagaggagaagttattagattcaagacatgttttgaaagtaagagtccacagatttgatgatggattagaaattggggggaaagaagaaaagggattagggattactccagggttggctttaggggttactccaaggtaaactctactggactgggaaaccctgaggaaggtgcaggtttaagctatgtgtgtctggaatacagattggtaatgataactgtaagatgcttgttaatcaagaaggcaataggataaactgttttggagttgtagagagaagcttgggtgtagtcagaaaattgggagccatcagtgtagaggtgatgcttaaagccagatggctgaatgagaacacccagggggtgaatgtggtgacagtatagcagaggctagaggactgatcataggaggaaaaccaggaggaggagttatagacagagcaagtaacgaataaaggaaggatcaactctgtcaatttcttgtggagcaaggtaaggattgagcactgatttttatttatttatttgtttgtttgtttgagatagagtttccgctcttgatgcccaggctggagtgcaatggcgtgatctcaactcacagcaacctccgcctcccaggttcaagcaatcctcccgccttagcctcccaagtagcgggactacaggcacgtgccactacgcccagctaacttttgtattttttgaagagatggggtttcatcatgttgcccaggctggtcttgaactcctgacctcagatgatctgcctacctcagccttccaaagtgctgtgattataggccaccatgtcccgctgagcactggtttttagatttggtaactttgataatgttagccatcatcagcattattgatttttttttaaaagaaactattacagaacctatttatgtaatttcaattcaccactcttcatgaccatgtttcaagttctttaaagagaagaacaaatgttctttatttttcta

SEQ ID NO: 316985 - DNA, 4001 bp, Homo sapiens
ctgagagcaaaggggccctctctacgcccctcggggtgcaaggtccctgggaggggcacagacctccccttcctcccagcgtcccccactcaacacctgggccactggcccagctgtgcacgtggcttcctggaagcctgacacccacactgtcaggcagcagacccctcccatgtgtcccaggacccatgtgagcagggcggctggcaccgcaccccacagaccctgcccacctgtcccctgcctggggcacgcctgtgtggctgcagggcccggcctcaccaccaggcggcgccttggccccagcgatggccgcgcagccaccatgagacgcaggtcccacctgggagaggctctggccctaagtggcacccaccggggttaatcccagagctcctcttctgctcccctccagccaggacccctgcccgggtccgccccatcctccccttggcccttctggcctggcccagtgccccctgcccgccccaggctacccaacccagcacccacctgggccccctggaggcggggtggcctccacacagtagccccaggccctgtcccggtcgtagttgtgagttgtggcacacctggggggcgacacctgcgtgcatgggggtcccaggcagaggccccccaccccaccccaccaccctggagggtctctgggttcactgggtccgcctgctgcgtggtgagcgcctactgtgtgcccggctcccagaaaagcaggcagcgtggggcaggtgaccccagctcgggtgccccggctgcccggacccaccacttcctgtgtgcactgccctccgaagtgcaggcatgcagcatgcggcccccgtagcggaaggggaacctgcagggcctcccgtcctcggtgagtgctgtggggagggggtggcagggtcagggctccctcgaggggcacccgagcccctcaggacctccagccgcagccatgctcctcccacccagccctaaggtgaagcacgacacctcctcccaggcccacctgacccaccttgggcctgggggctactgctcgagggaactgccctgggcgggggcgggagccccccactttggggtccctctgcctctggagcacttgttgctggggtctcagaggtcacagaggtcaccaggatagtggggatcgcaggggtcgctgtggcattaggttctggggactccgtacggttctaggaggagcagaaagggtgtcagtgtgggacagaccctcacactcaggtcctgccgggcaggaggtcacagccctgagcctgtttccatactggggcccccagatctcggagcaggttccaggaggacacacgacattcctgaggcctcagccaggccctgacaccttccccgccctcggcccctagttaacacctgctcagggtcactgcccaggcccaggcactgctacccaccaagcttaaaccctgacgtcagtttttggtgatgggagcagctaggaggccctgggaggttcccccaacctcacgcatccagacccaacagaggtccagagagagggggcagcccccagacccataggggcccaggccaggccgcacagggatgacagcccccaggtggggctccgtgagcccaggccccagcctccaaggccagtccagcacccacctgccctgtgagggccagctttcaacgtaagccccctgctcggacccccgccccctcaaatccccacgctctgtggcgaccctccctctggcctcctcccaaggaccccaagtagccactgggaacctctggtcgcactgcgacaaggtcagtgctcaccccgccaggctggggctggaacccccgtggcagcagcagcagcagcaggaggaggaggaggaaggggcccagccccggtgggggccaggggctggggacccaggcccagcgccccatggctcctgagctggcctgaggggcagtgggaggcgggagcagagcggccaaggcaggtggggtcaaggcttcgtggaaatgattaaccctggctgcctcccacgtcaggcgggcccagccggagaggaagtccccgagtcccctggcccccacacctgctgcccacctcactttgaccctacctggaagcccagctgtctctctggcctcggcctgcactggtcctagtcctagacctgacatggtccttgggcctcagcttagaagcctcctccaggaagtcttccaggataatgcagataggttggggcctagatggtctggcgccgctcccagtccctgcaggccacagagctggccaccatctgcctgtgaattgtccatgatgagagccactacgggcgctgggccttggaggtgtccagctctgtgcccagcacagcacagacagtagcagtggggatgggattgtccctgtcccacagacggcagcactgggggctcctggagggttcggtgctgcatcctctcggtggccccagggctggccaaaaggccaggcacagggaggagaggggccacgcaatggctgagtgtagcataggatgacctgagatcctgccccacctgcctgttctgactctgggggtggccagggccccccagcagcccctggtgatgttcagagtgtcccttcctccccgtctcccagacagacccaggagtccactccaagaagcctttccaaccccagctccccaccgccgcctggatggtacaggccaagtctgcggcagcacaaccctgggccaggtaccctggggcctgggatggagctggagtcacggaattcgtgacttggggctgtgggcagagctgcctgaggaacctcttctgcaatattggagcagccgctacggcacctcgggttcctcctgagtcagcagcgacatcccagggctgccgaggtgggaggaggggtgagtgaaccactgtggcctggagaccagcgagggctgaagctgcctccctgtatcccctaaaacccctctctctgccccccatttgcctgtctgtgcagagggagagagaatggacacccactgaccacccagcttgacaccgtgggccccagggggcacagtgcacatggaggcgtggtgggccctgggggcacggtgaatggggggttgggggttgggggggaggtcatggtgggccctggggcacggtgaatggggggttgggggttgggggggaggtcatggtgggccctgggggcacggtgaatgtggaggcatggtgggtgctgggggcacggtgaatggggggttgggggttgggggggaggtcatggtgggccctgggggcacggtgaatgtggaggcatggtgggtgctgggagcaggatggatgcgggcttgtggtgggtggtacacacagctggcactgggcttcatcttccattccgacccctcccccagcccccttcctagagcaccactaagtggggtgcatccactccctggaagcttctagaacagccccaggggactggctgtgctctcgggcctctaggatggtctgaggagctcaccaaccaccctgtaccgagggtacttggctttaggggttccatcaaggcaacctggggaatggccctgcctcttccgactcaacccagcccccaaggccccggcctcccctgcagccacacctggttccctttctgtaatcagaccctccttagccccagggccttggcacaggcccagggctctttctagacttcctctgccgtccagttgcagtttacatggtccctccccagaaaggccctcagaccaccctgctaaacaaggctggggcagggtccccacgtgacggcgagagccagtctctgccatctggtcctggccctcaggccccaggagccaagcttccctctcctcaaagcccccttgaccttaccctggggcacttctcctcctcaggcccctctgtttcctgcatgacctcctggggatgtgctcggagtccccgagaacgaggagtctgtgtccccagca

SEQ ID NO: 316986 - DNA, 4001 bp, Homo sapiens
ttttttttattatgcctgggccagcaagactgaagcacaagttttccaagagtctctcagaccttgacaactggcagtgttctaacagaggaattcttaattaaacctaaaatggggaaagggagggggagcaaagacacctgattgtttatttcacgtgcagtgattgttaatgatgtgagccagcaatgattccttggagtacagtagataccacccatgactgcatctcctggcaagaacgatattgcaaactcaaaaacaagcgtgcctttacagtcaacaaacaccatgttagtatttaaacttattaacacaaggataacgtaaatgccattactcttaaaacaaattcttagagtagatcttccaagacaccaactgaccctgaaagtctgaatttataatgttacaaaatgacggagaatcgtctcagttttatgtgataaataacgccccagcaaaatctttcgccagtttttttcaggtccctaaccggaggaccaggagttcctttctgttggtttaactaatgtaatgcaagacacccccctctgacggggctggggatcataaaccaaccatgcttcaacatcctttacgattcaatcctctccctaaccgagcacgtggagaaaacagcacaaatctttttaccctagaaaaataagccggaaaccacagccaccttaatttacagtttcaccgcagccaatgccccattcgatccaaaacacactgttcatcgcgattcttttaaaatatttacccagcccagggtgcgggtaccgcagaaacgtctgttttcagagataggcaagtttgcacagcatcccgaccgcggactctgggggaggaaatgctacttgcttaccccagaggaacacacaacggaatcacgttagcgctatagaaaagttatggaaagaactcccccaaagaagttttgaccttcttacaaccaccggctttgccagagccacagggaaccccacccagccaatatgccaagtacgcatccgtgaagccggtgagtgcctaccttattctccaggcgccctagccccgggctgtcactccgcaggcagcaggacagccgagggtagaagccaccgcacagcatctctcccccactcagcagctccagctgggacatcatcctcctgtctctccttttcaggcgcttcggggggttcccattcaggcaccttctcctccttgctccgctcccttcgtttctttccccaaacttagcatctccttcaaagaagcccagagccacggccagcagcagcagcttaaaggagagcatcttcagcatcgtctgcccagagcagcaggggctgggcgcgggaggatgggggggaacgccactgcccagcaggggcactagggcgcagctccaggaggagtttgcggggctgtagggcactccagagacagagggaggtggcggggacaaaaatatgtacagcgatgcaactttgcaaaaaataaaagacgcggcgatgggtccaatgccttaggggagcccgaggagcgagataaagttgtgcggatgacaccgtttgcagttgtgccagtgtcagttgggttgggggctttctgctgcggctgggaagtgggaggaggagaaggagttggaagaggaggaagaaaaggagaggacagccacagatgttcacttgtccgtgtaacgggagttgtttaggtgggacagtagcaggaacagaaacggcgacggcggcggcggggcaggcggaggcagggccagcgctgggctctagatgatgctgaggtctcctctgccggcggctgcagcttctcacacagcctctcatgtttcgttccctcttttcttcttctttttaactagcgcgcggggaggtgctgccacagcgcgccccttgacgtcaccgcttctcgcgcgcccccgcccagggtggagggaaggggagggggcggcccccgcgcgagcgcgtcccccgggccccggcggcctccctgctgcggcggggaggggcggctagccgcgacggcggcggacggagggggagggccgcgagccttcggaaccagcctcgagggtgctgaaccccgcgcgcccgcctcgccgcggcccccgggtgggggcgtccacggcccgggttcccggcgggcttggggcagggacgcagtccggagattccgggactgcccggctgctgcagcccgcaggctcctctctcctccccgcttcccctccgcactgcctgggctaaaggcggccaagctgaggctccgaaagaaagtaagtaagagtgggccgtaggaggtgggaagggagggaccccttccagggccatccccacctcagccccccggcccgcccctcgccccgtgggagggtgaactaagtgggctggagcggacgggagggagcttttgggcccctttgtctcccccagccgcactgacacccccattttccacactgattttcaacgtgaagctcaagtcctcaaagatctttcttggggtctgacttagaggcagggggacatcccagatgccgttgagtaggctgagatggtttggagactcatcctcgccggaggtcctgcaagccactgaagtggcacagacgcgtgtgcgcggagtggggcggtgtgtcgggccacaggccaagcccaagtcggcctcccagagtgtttgccacggtttgggcgggttagtccccgacgcccctttcaggtccccacatgtgttcgggaataagccgggccccgctggtaccatctgggaacacaagttcttgggccgcaggtggacggagagagaagctgggcgcggaattagtgttcgttttaacacacacaaacacacacacacacacacacacacacacacctgcacgcacgcgcgcgcagtccctggggagaggttcccctgggtgtagaaacagaggcgttagatctggagaaagaattagatgcaagtctgagggcatccagaagcgctgtgctctacttatccccgtgtatacaagtaaattaaccttttccccagctagacaaagtctgtgtaaatagtgtgtctaaaaagatgtctacgttatcaggagcggtgacttgaggtttactggatccctgcaagttggcatcaggacgagcttctatagggttgcccacaaaatgcgcttctagcccacttgggtatttaacagagaagctgatttcccagaagatgggctttgatgaggagataaggcagttgtcccattttggcaatggaggaatgttcaccacatttgggtttgcttcacttgttggacattgatttcgccaagtgattgcaaaagttggtgatggttgaggtgggcagttgattaaattaatcacttctggtcacagtggctaggtaaggcttctgtctttttcacttcctgagcctggatattagtgaagttaggtttttccccaaagagatgacacatcagaataactgaaaagaatctgctaggatgtttggcccagtcctcagctaaatgtagagcccccatgacatatttaacattttccccaggggctgttgtatacacatgacttcttcatgcatgtgattgtaagtccactttggatctcacatacttttttttatctgacattctttctgctttgaggacttttaatataaaattaatcagaaagcagtaagcactttaagactttaaactcattaatagatctccagatgaatctcatcaaatttaaatcacttgcacaatttcatctcattaggtagtttgagaataaggactcggatccaatctggggtgctttccactatctaaccctttcttcccaaattccagttttatattctttttccaaaataaaagtccttctaaaatcgtatttcagtagtttgagctcctactctgataaattcctgttagtagttttgaaacaggcctttcttatggcttatactaaggccacttaaaggtaaatttattttgg

SEQ ID NO: 316987 - DNA, 4001 bp, Homo sapiens
cagtctaagtttttagagcacttatcccactaggctttaacaagttaatgacgtaaaatgacaagggttgcgatacagcagtatcagtactttcactaccaatacccttttacatcacacacagtgccatagtccctcctgtaccttcacattttatatatatctacataaaacaatttctttgactctctgcttaaaaaaaaaaataacagactatacagactatacaataactacaagtaactacaagtctgtctgcaggaatatactagtgctacaaacactggtttcagtcaaaaggaaggtttcaattaccttgtgttgaagtgtacaattttcattaggccttttcaaaacatagctgacaaccattaatacaagattaactaaatttcccaggttttctacagttattacctatacctagtcttatccacggctttaaaaaagatgacactgtaccttttcatatttctcctttagcttagctgctttctgttcatatggttgtttatctttggctgactgctcagaccacatttcacccaatttctttgcagtatccccaatggataggccagggtgttcacttttgatctttgggcgatgttcagagcaaaacaggaagaaggcagatctgaaaggaagcaacagagtttaataaactgaaggaaaaatccaaggagcaatttgggttattttaaacttacggtggccttttaggagcattggggtcctttttcttccccttcttatcacctttgggaggaacgtaatttttcatctccctgtcatagcgagctttgtcactttttgccatatcttcaaacttcgacttctcctttgcagacatggtctgtggacataaaataagagccaaaaatacagcaaaattgttacctataaacatccaaagacgacaagatcatctttaaggaccacattttccttaacagcattttgctttcgaagtcttatataagtaaaaacctaaaatcgtctgcctggaactcttaagatattcaggtgagtcactggggtggcaaagttgaagctcatgagttgcctactacctgcctaaggccctcctagccgaaaaccacacctgcaccccctgagctccgtccctctcctgcctcaccttccatctctccgaacacttcttggagaattccgcgaaattgacggaagagtccgggtgtttcttcttgtgctcttcccggcaggtctgcacgaagaaggcgtacgaggacattttgccccgcggcttgttggggtctcctttacccatgttgacagatccgcgtccacctgacggggccgaggggggagaggggaagccggagggtcggcgcggagcccgcagctgccagggcgggcgctggcggggctccgcttcccgcccaaatccgctcccgccctgcccgcgcccccctcctcccgagggcgtcctcccaagggcggccgcccgcgcccccgcccgcgccccggcgcacaccctcctcctcctcctcctcccggcccgagcggccgcggctcagcccagcaagtggctcccggggcccgagacgccgccgcccgcccttcaccgagtccggtgactccgcaagcgccctcaaaacgcctttcctgacagaaatgtcccccagctcccacgtcgcgagcctcacttaaccgctaagcacctcgtgaccgacattgaaaactcccagaaccgggcccggtcaggggcagtttccgcctcctccgactgcccgccggccctccacagacccagccctcgccggcccgcaccccaaatgccgctcgccgggtcagaccccgagagccactgcgccgagaccgagtagaggctctgagggaatggggaaaggcaggtccacgaacccgagggtattggagggtattcttgcctggtgcgagcttttcctcagagtcccgcagagcggccggacccaacggagacgcttccctcacggggctccggcgtgaactggtttatctctaacgcaatcctcagcctcttgttttgcagagttctccgcgccacggcaacttgacgagctaggccacgggccacatccccactaatctgattggttctgacgattattcaaacccagatagtccccgcccccttgccacggaggctaacgattggtcagtgtcttaccagacccgccctccacgccccagcctagcaggttcggtgggtcgcccaggtcgttaactcccagacccgttagaaccggtcaggagaggaatgtactgctcgatcctgattggcggcgggaagagggtttgaaaaatggcgggcctcacgctgactggttggggctgtaaacggtgggagtggttggctcgggaaggaaagccccgccagatttaaaaatacttagtcgggagactgggggttggtctcctggcttggcgacggcggcggctcggtttgctggcgctaaggtaacagaagaggtctgccttgcccttcctccgaccaccatttaggtcctgtctgtcccccgcgtcggctcagccctgcagcgttggctcctgggagctgtagtcgctctgctctgttgccctgcagggtctcccgtgcgccgcccagagaataataaatgaggagagcctggagtttgccctgcaaaaccgattgcccagctcctcccgctgtcgctgaggttgtcgtagaactcggggaagtcaaggcagggaacctcggaaagggcgcggggggccgggagggaaccgttcccgcgtcccgtagggtgttaaaaaacgttctgaaagtaagatgcttcccgccgagggagtttccctcagaaggctcctccttccttccctctttgtctcgggtgacaaatactgggaggtaaacaagggcaccctccgggtcccgaaggggcggaggcggcgccttctcccccggccccgccccctcctaccgggtccggaattccaagccccgagtgtctcggcccccacgccgcaccctgcagcggtgcgccgggagctcggagccggcggctgccctgtctttggctggcctggccttcgcctgggcattcactgtctcgtcctactagtgtgatagtttttaaaaattgagaatcgcataaaagcaatgcatgctccctatcccactcccaattgcgtatattctccaaacggcatacagccacgttacaggctcctccaagcttgggttaagaacctccgtgttagtatagggagagcgcgccaaagctaccttaccttactgcttaccagcgtcacaagctgcttttcccaaggtagaggactttaattgacatcctggtgtgctatttctgtggtatttagttttgagggattccccccattattggaatataggttgcgtgactgtttcaagaaatttaaatattttgtcttaatttttcagtaagttcgttggcacatgttaagactatgctctttggtttgtatatggttgtcataatagtatttgaaaaccagcagttgtttatctaggtttactaataaaaaagatcttaaaaaaaatgtattttcctaggaaatggataatggttgtccaacattgtgaatgtacttaatgccagtgaattgtacacttaggaatgggtaaaatggtaacttttatgttatgtatgttttaccacaaaaaaataaagtggcagtttttcaaacagaaaaaaatgtatttccttttatttaagggtcccagaattttgttaatcaaaaaccttagtttataacattctcttttctgccttaagttgtaatacctacaaaattagttacaagggtgttataaaagcacccaaaaatccaaattaaccaagtaattcatagtactttattcaaatagcaattagcagtgagatcactaatgcattacacttttaaaacgtatttttaagtttctgtttagatttttttaaattatggcataaagtaagctgtgcttatataaaaactgggcctttattcaagaa

SEQ ID NO: 316988 - DNA, 4001 bp, Homo sapiens
tttactattgatactaattcctacaagtttgctgtgctaccatacacaagaaattaaaaaaaccattaaatatttaggaacattcaacatcagaagctgtaaaatctaactgtatgagtagcccatcaaaaagctacaacctgcattttttaaaagtattttctctacagagaatcttatcagctatacaaaaatctgtacagtttttatactgaagctagtattgagctgcacttgaattcacattcttagcaaaataattgcctgagcacacacacacattccacacgcatcattaaaggatagccatttattcttcatcttcatcctcttcctcctcatcttcatcttcttcttcctcctcctcctcctcatcttctggttcgttcttcttctttgagcctgttggcctgccagggcccttctttcctgcttcacttttgcccttggcacgatatgcagcaatatcctgaaatattgtcaaaaaaataaagcatccggtatcattactcaactgtgaaaaaccacttagttgtaaacaatctaagatgattgaccaataaccctaataactgtctaaaaaggtaaccagtctaagtttttagagcacttatcccactaggctttaacaagttaatgacgtaaaatgacaagggttgcgatacagcagtatcagtactttcactaccaatacccttttacatcacacacagtgccatagtccctcctgtaccttcacattttatatatatctacataaaacaatttctttgactctctgcttaaaaaaaaaaataacagactatacagactatacaataactacaagtaactacaagtctgtctgcaggaatatactagtgctacaaacactggtttcagtcaaaaggaaggtttcaattaccttgtgttgaagtgtacaattttcattaggccttttcaaaacatagctgacaaccattaatacaagattaactaaatttcccaggttttctacagttattacctatacctagtcttatccacggctttaaaaaagatgacactgtaccttttcatatttctcctttagcttagctgctttctgttcatatggttgtttatctttggctgactgctcagaccacatttcacccaatttctttgcagtatccccaatggataggccagggtgttcacttttgatctttgggcgatgttcagagcaaaacaggaagaaggcagatctgaaaggaagcaacagagtttaataaactgaaggaaaaatccaaggagcaatttgggttattttaaacttacggtggccttttaggagcattggggtcctttttcttccccttcttatcacctttgggaggaacgtaatttttcatctccctgtcatagcgagctttgtcactttttgccatatcttcaaacttcgacttctcctttgcagacatggtctgtggacataaaataagagccaaaaatacagcaaaattgttacctataaacatccaaagacgacaagatcatctttaaggaccacattttccttaacagcattttgctttcgaagtcttatataagtaaaaacctaaaatcgtctgcctggaactcttaagatattcaggtgagtcactggggtggcaaagttgaagctcatgagttgcctactacctgcctaaggccctcctagccgaaaaccacacctgcaccccctgagctccgtccctctcctgcctcaccttccatctctccgaacacttcttggagaattccgcgaaattgacggaagagtccgggtgtttcttcttgtgctcttcccggcaggtctgcacgaagaaggcgtacgaggacattttgccccgcggcttgttggggtctcctttacccatgttgacagatccgcgtccacctgacggggccgaggggggagaggggaagccggagggtcggcgcggagcccgcagctgccagggcgggcgctggcggggctccgcttcccgcccaaatccgctcccgccctgcccgcgcccccctcctcccgagggcgtcctcccaagggcggccgcccgcgcccccgcccgcgccccggcgcacaccctcctcctcctcctcctcccggcccgagcggccgcggctcagcccagcaagtggctcccggggcccgagacgccgccgcccgcccttcaccgagtccggtgactccgcaagcgccctcaaaacgcctttcctgacagaaatgtcccccagctcccacgtcgcgagcctcacttaaccgctaagcacctcgtgaccgacattgaaaactcccagaaccgggcccggtcaggggcagtttccgcctcctccgactgcccgccggccctccacagacccagccctcgccggcccgcaccccaaatgccgctcgccgggtcagaccccgagagccactgcgccgagaccgagtagaggctctgagggaatggggaaaggcaggtccacgaacccgagggtattggagggtattcttgcctggtgcgagcttttcctcagagtcccgcagagcggccggacccaacggagacgcttccctcacggggctccggcgtgaactggtttatctctaacgcaatcctcagcctcttgttttgcagagttctccgcgccacggcaacttgacgagctaggccacgggccacatccccactaatctgattggttctgacgattattcaaacccagatagtccccgcccccttgccacggaggctaacgattggtcagtgtcttaccagacccgccctccacgccccagcctagcaggttcggtgggtcgcccaggtcgttaactcccagacccgttagaaccggtcaggagaggaatgtactgctcgatcctgattggcggcgggaagagggtttgaaaaatggcgggcctcacgctgactggttggggctgtaaacggtgggagtggttggctcgggaaggaaagccccgccagatttaaaaatacttagtcgggagactgggggttggtctcctggcttggcgacggcggcggctcggtttgctggcgctaaggtaacagaagaggtctgccttgcccttcctccgaccaccatttaggtcctgtctgtcccccgcgtcggctcagccctgcagcgttggctcctgggagctgtagtcgctctgctctgttgccctgcagggtctcccgtgcgccgcccagagaataataaatgaggagagcctggagtttgccctgcaaaaccgattgcccagctcctcccgctgtcgctgaggttgtcgtagaactcggggaagtcaaggcagggaacctcggaaagggcgcggggggccgggagggaaccgttcccgcgtcccgtagggtgttaaaaaacgttctgaaagtaagatgcttcccgccgagggagtttccctcagaaggctcctccttccttccctctttgtctcgggtgacaaatactgggaggtaaacaagggcaccctccgggtcccgaaggggcggaggcggcgccttctcccccggccccgccccctcctaccgggtccggaattccaagccccgagtgtctcggcccccacgccgcaccctgcagcggtgcgccgggagctcggagccggcggctgccctgtctttggctggcctggccttcgcctgggcattcactgtctcgtcctactagtgtgatagtttttaaaaattgagaatcgcataaaagcaatgcatgctccctatcccactcccaattgcgtatattctccaaacggcatacagccacgttacaggctcctccaagcttgggttaagaacctccgtgttagtatagggagagcgcgccaaagctaccttaccttactgcttaccagcgtcacaagctgcttttcccaaggtagaggactttaattgacatcctggtgtgctatttctgtggtatttagttttgagggattccccccattattggaatataggttgcgtgactgtttcaagaaatttaaatatttt

SEQ ID NO: 316989 - DNA, 4001 bp, Homo sapiens
gtactttcactaccaatacccttttacatcacacacagtgccatagtccctcctgtaccttcacattttatatatatctacataaaacaatttctttgactctctgcttaaaaaaaaaaataacagactatacagactatacaataactacaagtaactacaagtctgtctgcaggaatatactagtgctacaaacactggtttcagtcaaaaggaaggtttcaattaccttgtgttgaagtgtacaattttcattaggccttttcaaaacatagctgacaaccattaatacaagattaactaaatttcccaggttttctacagttattacctatacctagtcttatccacggctttaaaaaagatgacactgtaccttttcatatttctcctttagcttagctgctttctgttcatatggttgtttatctttggctgactgctcagaccacatttcacccaatttctttgcagtatccccaatggataggccagggtgttcacttttgatctttgggcgatgttcagagcaaaacaggaagaaggcagatctgaaaggaagcaacagagtttaataaactgaaggaaaaatccaaggagcaatttgggttattttaaacttacggtggccttttaggagcattggggtcctttttcttccccttcttatcacctttgggaggaacgtaatttttcatctccctgtcatagcgagctttgtcactttttgccatatcttcaaacttcgacttctcctttgcagacatggtctgtggacataaaataagagccaaaaatacagcaaaattgttacctataaacatccaaagacgacaagatcatctttaaggaccacattttccttaacagcattttgctttcgaagtcttatataagtaaaaacctaaaatcgtctgcctggaactcttaagatattcaggtgagtcactggggtggcaaagttgaagctcatgagttgcctactacctgcctaaggccctcctagccgaaaaccacacctgcaccccctgagctccgtccctctcctgcctcaccttccatctctccgaacacttcttggagaattccgcgaaattgacggaagagtccgggtgtttcttcttgtgctcttcccggcaggtctgcacgaagaaggcgtacgaggacattttgccccgcggcttgttggggtctcctttacccatgttgacagatccgcgtccacctgacggggccgaggggggagaggggaagccggagggtcggcgcggagcccgcagctgccagggcgggcgctggcggggctccgcttcccgcccaaatccgctcccgccctgcccgcgcccccctcctcccgagggcgtcctcccaagggcggccgcccgcgcccccgcccgcgccccggcgcacaccctcctcctcctcctcctcccggcccgagcggccgcggctcagcccagcaagtggctcccggggcccgagacgccgccgcccgcccttcaccgagtccggtgactccgcaagcgccctcaaaacgcctttcctgacagaaatgtcccccagctcccacgtcgcgagcctcacttaaccgctaagcacctcgtgaccgacattgaaaactcccagaaccgggcccggtcaggggcagtttccgcctcctccgactgcccgccggccctccacagacccagccctcgccggcccgcaccccaaatgccgctcgccgggtcagaccccgagagccactgcgccgagaccgagtagaggctctgagggaatggggaaaggcaggtccacgaacccgagggtattggagggtattcttgcctggtgcgagcttttcctcagagtcccgcagagcggccggacccaacggagacgcttccctcacggggctccggcgtgaactggtttatctctaacgcaatcctcagcctcttgttttgcagagttctccgcgccacggcaacttgacgagctaggccacgggccacatccccactaatctgattggttctgacgattattcaaacccagatagtccccgcccccttgccacggaggctaacgattggtcagtgtcttaccagacccgccctccacgccccagcctagcaggttcggtgggtcgcccaggtcgttaactcccagacccgttagaaccggtcaggagaggaatgtactgctcgatcctgattggcggcgggaagagggtttgaaaaatggcgggcctcacgctgactggttggggctgtaaacggtgggagtggttggctcgggaaggaaagccccgccagatttaaaaatacttagtcgggagactgggggttggtctcctggcttggcgacggcggcggctcggtttgctggcgctaaggtaacagaagaggtctgccttgcccttcctccgaccaccatttaggtcctgtctgtcccccgcgtcggctcagccctgcagcgttggctcctgggagctgtagtcgctctgctctgttgccctgcagggtctcccgtgcgccgcccagagaataataaatgaggagagcctggagtttgccctgcaaaaccgattgcccagctcctcccgctgtcgctgaggttgtcgtagaactcggggaagtcaaggcagggaacctcggaaagggcgcggggggccgggagggaaccgttcccgcgtcccgtagggtgttaaaaaacgttctgaaagtaagatgcttcccgccgagggagtttccctcagaaggctcctccttccttccctctttgtctcgggtgacaaatactgggaggtaaacaagggcaccctccgggtcccgaaggggcggaggcggcgccttctcccccggccccgccccctcctaccgggtccggaattccaagccccgagtgtctcggcccccacgccgcaccctgcagcggtgcgccgggagctcggagccggcggctgccctgtctttggctggcctggccttcgcctgggcattcactgtctcgtcctactagtgtgatagtttttaaaaattgagaatcgcataaaagcaatgcatgctccctatcccactcccaattgcgtatattctccaaacggcatacagccacgttacaggctcctccaagcttgggttaagaacctccgtgttagtatagggagagcgcgccaaagctaccttaccttactgcttaccagcgtcacaagctgcttttcccaaggtagaggactttaattgacatcctggtgtgctatttctgtggtatttagttttgagggattccccccattattggaatataggttgcgtgactgtttcaagaaatttaaatattttgtcttaatttttcagtaagttcgttggcacatgttaagactatgctctttggtttgtatatggttgtcataatagtatttgaaaaccagcagttgtttatctaggtttactaataaaaaagatcttaaaaaaaatgtattttcctaggaaatggataatggttgtccaacattgtgaatgtacttaatgccagtgaattgtacacttaggaatgggtaaaatggtaacttttatgttatgtatgttttaccacaaaaaaataaagtggcagtttttcaaacagaaaaaaatgtatttccttttatttaagggtcccagaattttgttaatcaaaaaccttagtttataacattctcttttctgccttaagttgtaatacctacaaaattagttacaagggtgttataaaagcacccaaaaatccaaattaaccaagtaattcatagtactttattcaaatagcaattagcagtgagatcactaatgcattacacttttaaaacgtatttttaagtttctgtttagatttttttaaattatggcataaagtaagctgtgcttatataaaaactgggcctttattcaagaactgtgtattgaatatgccaagcattgagcttggcagtcgagatacaaagatgaaaagtcatagcctgtgacctcaaaaatttagag

SEQ ID NO: 316990 - DNA, 4001 bp, Homo sapiens
agggggagccgcctctgcaggggtgccacctgggctgcaggaggggatgcaccccagggatgagtggagaacaaatttcaccctgagaaaccctttccatagtctcccccagaagggcactagacagagtcgctcgatttctgggaaaccacggaagccctgctcaagtctacgtgaagggggtgggggcctagacttcctgagtgtgggtgccgagatgtgggggcttttgcaaaggatcactccacgacatggaaagggttatctaacaagtgagtgagggtcgtaggccacttactccccagcacacactaatattcatacagaggacagcatggatcccagagccggagcctgcagagggcccacgtcctcagctggcctcaaggtccaaaggctgtgttgggggtggggggctggctaagccagggcttggggggttggactggctttcctggccttcctcccaggggtcttcctaaagggcaggtacaaaagggaggcagcgaccctggaaccctggggaggggaagcagaactaaggggtcagatacccaagcaagggggcaaaggggttctggggttgagaacccccagccccagtctcaagccctcagcagggaacaaaggcaaggagggggaggggcagaaaaagaagagagaggggttggactgggggcctcagaacaggctcccttcttgcctggcacagcccatgcccctcaaggaccaagagggagacccaggcccctgccccaggctgtctgcagcgggcacagaggaaacaggactctgggggggcacagctgccatgttagatggctcccctccccggccccacccccacaacactgcaccctctgctcaatgcccccttttatttttccacgtctgatgctactttgtctccctttccctccatctcttcctcctcttttctctctcggatcactcttgggtttctttttcctgcatcttcccctccccccaccccattctctctcccgcagcacattcctttcttcctccatcctcccattttctttctcagcctctttcgccttctcctgtatctttccctatcctctttcactctcctttcttttttctttggcctcctgttgtcccctgtccccagcctccctgggaccggaggagcccggcaatgggtgaagctatggcctgcaaaacctcctcgttagcggagctcctgccccagagggtgggcctccaaaccagcccaaccaggggctcctgggggccccacaaggcccagacgccgttccacagaagggagaggatggcccagaacgggcggcgacgagcccgaagtcccccagcaaatgcgcagggaggaagtcgggccccaccgcctgacccaccctccccgcgccctcactcactgtcaggactgaggccgcctccatagccaccgtgcgcccgtgggtaccagcgcgctgcgcctccgcagcccagagcgaagggcggcccgggaccggggggcggccgaggaccgaggcccagcgcgcccggcccgagcagcgcacgggcccgcgcctccccgccgggcccggtgcccgcgagcaactgtcgccgccgctgtagccgtcgccgccgcgcctgctcggcgtcctcgtcttcggggtcgtcgtcgtcctcctcctcgtcctcccggctgccgtcgccctgggtcgcgcgccctgcgcccttggcctcggccgccagcaggttctcgatgaggaaggaggaggcgcgggccggcgtggcgcgcccgggctccgtcagctcgtcaggcatcgcggccgcgggcttctcgggctcggccgggctcctcggtccccgctggggatggtggcgcgcggctcccgggcgcacgcgcgggccggccctggagctgctacccggaccgctggcgtcgggccccgcagggcaggcggcggcctccgcgccgggctgggctgggccgggccgggagcgagtgcgcgccgacagctgatcgggcagccgcctggctcgcctttcaggtcgccgttctggtcgccgccggggcggcctcactgggggcggggagggggaggggccagcaggggcggggggtcgcgggctgggccgggagggcggcccgctgagccccgaggacgctgcgccggccccgagcgcggccgctgccgggagacgctgcccagacctgagcgcgcgggcagcggcgcagccgagggcgggcggccccgggcgcaggcggggggtcgcgccgggtccgatcccgcgtgatcagttcccccgtcccgcgccacccgctccgtgggggcggggcctgggctgagcggccacccattggctgtggggccccgatgaggaacgggctggccaatcaccgtccggccagagccgtaattaccccgctgcgaggagggtgttggaccgaccgtgagtaactgtgtgtgtgcgcgcgcgtggtgtgtgcacgagtgtgcgtttgaatggctgtgtgtgtgtggagggcggcgtggagaccccggggctcccaagaaactgcaagaggctgggccacatttttttatttaagactttgtgtgtaatttaaaaatgggaacactgccaaaacaggactgcgaaatgtggcatatcttaatatttgcacttaaggaaagatgctttcaatgccaactgtagttcggtagaactcttcagttcccgggctcggtaccagtatgtaaggaagtgcaaccacagggctccgctggcagcccgctcgatgttaccaagcaggtcttcaccgcgccagcacccccaccgcccgctccaggggaagccagggccttagaagggggtgggagcttttggcccagcctctgccctgggcgaaggtcttgggggcaggccccttccctcgttgtgcctccgtttcttcgctctaaaggggtggggaggtcctcccatatctgcagcgggaagttcgggaacataacgcaccctggagctgtctccgttccggcgtcgacttcagacttacctacattaggtcactgcgcggacgcgcgggttaagccggcttcacccgatgcgagttatttcgcagagatacatccatcctcccagggccagccccgggcccctctccacccgagtaccgcccgcgttcccggaggtgaccgcaggcctggggcttccgctttgtttaattcttccaaaaaagcacggtggagggagcatcgcccccatttttcagcggagaaaactgacgggagaagagagaagagactcccccagagggtaggtggctccggcaagcctggaattccttcactgatgccccggagtccggctggttggcagggcggtggggctccaggagcggctgaggcctagccagctgggccctcgcggcctgggttcgcagagacaaaatggtgcgcctcttgggagcgtgtcctgggtgcgctttctggcggctgccaggaaggacctctagtgctcagtggctgccgcgatctcgagtgggaggacttttccagggactctaggacaagatgctcagcccatctccttttccccggcatcctagcccaagaggggcaaaaataatcaatgacagggactccccgggttgtttagcctggaggcagcccacagatgggggctcctccctccatgttgttgatgaggccactaagccaaagtggagagagttgggatcttagggaggagctgaggtctcccaagccctgctccctgggatgtccagggtcagagagactccaaggagcagaggtaccccagccagagggggctgggccaaggaaattgggacagagcgcccgattcgattagtttggagcgctagccttggggcagacaccgtctacactagggcgcttttgacagataaggaaactgaggccagagaggggccagataaaaagacaatgtctgtggggagaagtgtttttctgatagccgtccagttcacacaggctcccctgggtctgtctgtgagaggc

SEQ ID NO: 316991 - DNA, 4001 bp, Homo sapiens
ataaaccctatattccaaagtgcttctcccctcccaactttccctccaaatcctgggctctttctcagtaaaggaaatcgtgttttctaatactagattaaagcgacatcttgttatatccaccaacacctttctctttacagttaaaaaaaaattcagacacacacacacccctccccattacaaaaaggaatggaagcgtgaacccacgatcatcggtcagtaatcggagctaagaaaactcaaccaagaaacctgatttagtccctcctgctaactcccgtattatgttcccaatcccaaatgctgcattttaatacactaaatgcagatttaggtagtatatacaactgttatttcaattggaggaagcaagttaatactaagaaatttgcaccaaaaagaaaaaaaaagtatcccatagcacaatacaggatttgtttctcttaagaggactacaggcctcccttagtgggcgggaaacagatatcaagacaccaaaataggatcctgggcaccgggaaaaaaagggggctgggggttgtaaaaaattaggttgcacataaaaagtaaggtacaatctgtactaacagttggggaacccaatagctgagggcgcgaaaagggtgcgcggttagaataactcagtggggtgggggaagggtagatgctaggccggagataggaacagctccagtcaagtgcaggcccgatcgactaagaacttaaccagagcccgcggagcaaaaccaatgtaccaacaagaaactcggagcatttcaccagacccaatttggtctgcatgtcaaaatgtagggcctgtatgagtatgccattgtgcgatagcgtatggtggagaaaatgagtaaatccttaggcgaaacttattcaaaatcccaagaaaacagtcggcctaaggccgacaagggagaggcagaggtggacagcctacgcgttccccaaaacatgtgcttataaacaatcgcatcgtttcaggatggtggagaagcaccaaataaaccttagtaatacaaacagagaagctgtttgtgtctgtgtttttatgcccaagactgtagaaaaagggaaaaagaggggacagcatggaaagaaaaaaggtaccccacgacaggcgggaaaaaatcctggcggctaagtcggtgggaggagacccatggcgagggaggaaaggagggcgggccgaggagcagcatggtgacggctaaaggtggaaacgtgtgtgatgggggaggggggcgataagcaggcaaaggaagaaggaaatgaaggtccggggaacccaacatagaaaaagggagaccagtgcaaggaggctgcatgggggcccggagaacgggctgagagcgggaaccaggcctaatggcgggggaataaagagggggagggggactagttgggcctgactatcctgggatgccccttactcacccttcatcctcctcgttcttactggcgtcaatcttcgccccctccgactcggcgctgcccccttcggtgcctccagacgcggttccgcccccggtcccggctccgcttcccgccgccgccgctgccccctgtgtcgccgccaccatggctccctcctgctcgcccgccgagccgcctaccgccgccgttgccgctgccgccgccccgtccccgccgaactgctcctccgacatagtgctagtgtctccgccgctgccgccgagactacacccgccgctgccgcgaaccgaaactagcagcaaagtaatccccgccgctgccgcgcgcccgctctacctcgcgaagcacacaagacagggaaggcgcgcgcgtggctgcaaaggctcctgcgcctctccctggcctgcccccttcgcctcccactctcgcgcggcgcacactcccgctctctcccgctgcactaaaaaagaataagcaccagcggcggccgctctcgcctcctcctcgctttaatggcgccgccgcggaccacctaaaatggccgacggaagaacggcgcgtcccggtcacgtgacgcgagagcgcgcccttcgcgcgtccccccacccctatccccctagttttttttttttccctttcctcctcggtcccgccctctcgctaccctttataccttcctctcacgctccgcgttgcacagccttgggggcctttaaaaggaaccggaagtgtcgtgagctaagacagtcgcgcggggaccatcgagaacaaggagtgctgtttcgaagtagcggctagaggggccccctgcctccgcccccgcccttccgaggattcctggagtccactcacccctccccaccactccagtagcggcgggagcagcagcgttaggccggggtgtggctgcacctctgcgaaggctgtcgtgccccgtgcagctgcggcgttcgggtgggggaggggaggctcacaccctgcggcggcttaagcctggatttacgcactggaggagggaattagccctgagatgtcagccctgtgcccctggcgctgtccacccggacgcccgcggagcgccaggcgccgcagcggaccgcgcgcgcactgattgccgcagctactctccctgccgtcgccgcccgggaccgggtgacattgaggttttcgtctatcgccgctgggccgatagggcttctttttaagatttggctttccaagtaagatttttgtttgcctgcttttctcctggaatttttttgtttttggtcgaagaagcaggtaacttgcatatcttaaggaaaacattgtttttgctttgcttttgttgtttaaagatcctaaaacgtaccgtgattcctttacgttactaataattggaaagtgtgttaaatcaagggttcgcttaatgttctttagcctttgtacatagaatatataaatgtcgtgagtcatctttacgaggtttatgagtttgtgttcgggtttggcttttttgttgtgtgtgcgtggtttttttttttcttttcttgtaacaccgttaggcgtttcattaaggtgtataaaaagtaattttatacacctattaaaaattcccgctgcctcggctggagactggattattcgggctttgggatttgctgcttccagcagtatccttagaagaaaatgaagcttctaggtacttctgtagtcaacaaataattatttgcctgtttaattaaagtgttcgggcacgggggaaacaaagacgagtttgcagactccagcaaaaatcttaagagtttaagtatttgggccgggcgcggtggctcacgcctgtaatcccagcactttgggaggccgaggcgggcggatcacgaggtcaggagttcgagacaagcctgaccaacatggtgaaacccccgtgtctactaaaaatacaaaaattagccgggcgtggtggccggtacctgtaatctcaggtactcaggaggctgaggcaggagaatcgcttgaacccgggaggtggagattgcagggagtcgagatcatgccacttgcactccagcctgggcgacagagcgagactccgtctcaaaaaaaaaaaaaaaaaaaaagtttaggtattttccactgcagttaaacgaatttgtattaattggacactatccaaaaatctcaaaggaagattataagtaagttttattaatcaagttagtagaatttacattacagaataattaaaactcaagaatacaggtcaaattctgaaaacgtcctaaaaatataatcttaccaaactcccgtaataatcaagtcacataaaggtaataccaagaatgtttaccgtaaagtggtagtgactccacatttgtctccacctgccagaatattagcaaaggataaagtggatatggtgctcaaaccatatattccgggttagatacaactaagatgattgactgaagggaagtctgtttaatcttttctggctcaagtgacggtaattgtcatttattttgatcttaagatatcattagacatacccaccttttggtaatagtgacttt

SEQ ID NO: 316992 - DNA, 4001 bp, Homo sapiens
aaaaatttgcaaaacaccacaaaagcagcacaatgcaaaacatagttcctaccttatcaacactagcagcatctttgaaaagcacaaatccaaatcctcttgatctcccagtgactggatctgttttaattgtgcagtctacaacttccccaaatcgagacaagtactctgtcagatcttttttgcttgtatcccagctcaagcctccaataaacattttactagaaataaaagtgtttttaaaaaaaattaacaataactcaaatgatccttcagttctggaattaaatcgtgaaataaaaacagggacatttaccccctaagtgtaggcaatttaattcatgtttacatttaatctatgtcacacaaaaatcccaatatcccaacgaagttactcaaaccagcggacagctcactgtccgcactacataaagcaaagctcaaaagagaccaataaaatacagtaaaggttctgcccagattcctttaggtagaaggcacaacttcctagatgaatccctcacatcttatcttacttaggtccatcttcgttctcagctgtcaagccaacgttccacccagagaactcatcaatcataacacgttttgtgaatctgggtaccagtcgcctgcttgtgccccaactcagtcctctaaaactcttcccaggaaaaccgcgccgagtggtaacagagacacaatgaagaggcggcggcagctgcagcgtgcagcgctgggaggccggcccctcccccccgggtcccacgcggcgcctgcgcgctcgggacacagacgccgccgccctcctcctccaacccctccgcccttcccccactcttcccgggtctctccagtcaccccctcgatctcttactttcctcttccctccaatctagtggggcccagaaggcacgcggggaatcgactctgagaaagaatgggggcagcgcgcggctcacgaggaacgaagggcgcgtgcggcgcgctgggggagggggagcgggggaagaagcgtgcggtacccgtcatcctgctgattcttgctcgcgttgatcttggatccctctgcgaattcctctatattgctgtactcgttcatatcctccatagtgacggagctgtcggcaggggggtgctggcgcgcagtccgggtcgcggcagcagcggcggcggagcgttgtatggagctggatttaaaatggcggcggaagagatccgggcgccgcctgcgccctccctttatagccgccccgcccgccaatcgggagggctgctgggcggtgacgtggcgctgggcccggcgcgccccctgccgggcggagctgggagcgagcgaagggaggagcggggctagctgccgcggcggccgcggccgccaatgggagaggctgcgggaggctaaagtagcgggagcggaggggaacaatggcggcggcacatgggaaagcctgggcgggacctccatcgcggccctcccggcaaggagagaggccacgcgtgaggggacgcgggcttgggagaagagaagaatcagaagagaaaaacgaaggggcgtaaattcctggggtcagcagtcccgagcagagccgacgcagggccacagtccctcttgccttgggagcctttgtctctggcgtccggtccagcccactcctaccaaaaagccgtcaaccccgcctttttctgccctcggttcgccagtgcggagccgctgcggcggccgctgctaccgactagcaccgcggccagtctgctccggaaaaaggcggactgcgcccggcgctggcgactgaggcggcgagcgcgctcgcccgccgcgcgcacgcgtgttttgtcctcgagctggcaggaaccagccgaacaggaagcgggcgcgcgacggctcctccgggcagcgcagcgcgggcgcctcttccactgtgaccacgggcgcgcgggccaagggggcgcggcggggcctcccgggctgatcggccgaagcccgggccccgcgcggcctctggcgggctgacgccgggaggaggggcgggggctggccagatgactgtatctatgcaaaggcggaggcggtgggcggggagggggctggattcagtagagggcaaggggcactcacatccccggcgcgccactcgcggggctcctttctgcacgtgccccgggcctctcccgctcgctcaacctgtctgcggagggcgcgctctcgcgcaccctgctcccgcgttcgcttctttgttcccgcccacgcgaggcccattttgacggatccagttcgaggcctgacggcggccaatcggcgctggcgccttcaccctccccgccccgccgaacccgtcaagggccgccccttttcctgcccacgtggtctcgggctcctgccccgtcctgctcacgagttcagggctcctgggcggccgccttttccagttccaggtgtgcagaagtgtcctctccccacgcgcggcgggctgcacttggtcgctggctccgagatcgcgcggggccgccggaagcccaagacggtaccgggggccgcagccgcagccggcgccgccctccgccctccccaacagcaggccgagtcccgtagcatccggtagggaaatggtcgtgctttcggtccccgccgaagtcaccgtgatcctgttagatatcgaaggtaccacaaccccgattgctttcgtgaaggtgaggggcggaagggagcggggatgttacttttccttaaaaacagttattattttttctaagtatttcaggccttgcattggagacgagggttaggagaggcggtgtggctgcctcttgtgtggaatggggaggaaggagagaaagcctgcggtgggttgcggggatgcttttcctcgcgacactagcttctccctcccccgcccttgcgcttggttggatccagatgggtgggaagggatggaagttgacgctaaaaatcaccgaagggcaggtaagccggggcggggtgtgacggtgcgggcctcgccacccggcaggtgtgcacccggtcgcttccgcaggtgagcgcagcctttctgctccgtcgggcctggtgtggcagcggcagcgatttaatggtccttaaagcttccgatctcaaaatggaaagactgaagtgtcaagatgacttttcaggtggccctggtgtcgggcaatcaaggttcctcttcgccccttcccactcttgctgttagtggccaaactgcacagtgtattattttactctgttaggcgctgtggtccatagcgctgattttttgagctataggacacgtctagattccgttcactttcctcagaaaaccacagaagcttgaagctcttatccagagcattccttctaggatgtcactgtgaaccagcacttgtctgcacctcagcttgcaacttagcggattccttctttattctttgtctgttagaataagcaaatatgaaatgttactttaatttttgaaagaattcctcgggccttgtctttttatttggctccctgaggtttaagaattcattgcagatacaagtacttcttagaggtgcttgcatgcacaataatagtcgagatatacaaagtatattaccaagtaggaaaaatccatcttccaagaaactgagcagcttgggttttaaattctattttagtttccatttttaaaaaaaattatctgtgaataaggcttttttttttttttctttgagagtctcactctgttcccaggctggagtggagtggagtggtgcaatcacagctcactgcagcctctacctccttgggcttaaggcatcctcctgccccagcctctcgagtagttgggactgaagggagagccaccatgcctggctaatttttgtattttttgtagagacggggtttcgccatattgcccaggctagtctggaattcttggcctcccaaagtgctgagattacaggcatgagccaaggcgcctggcctgaatgagtttcttgatgtaggttataatataaaa

SEQ ID NO: 316993 - DNA, 4001 bp, Homo sapiens
acatgagctgttagacttgggttacagtaaatcaccttcctttaagttctggttctggttggccagacagctgttccatttgctaaaaatagatatgtttgcctttctgtttgacctgtaaatgacaggatcatctatggacaagctctccaaagagtgcctctggcttaattagtaaaaataattttggacttggggtccagggtcttggtccttggatctactggatccattacaagcttctaaacctcaactgagcatggctcatggtgacaggacaagtgcctgatgctctggtatataaaataggaaaaataatgtctctgctttagagttgaggttagaagtgtgaagtgctttggggacccacaggagagatgctagatcagttccaagtagtctatcatgcaaaaggattgtctttccatgaccaaagggaaaagagaagtcggagtttagacagggttttaaaagtcagctaaaggctcccacattgcacctgtggttaacaaccacaggccgtgttgcattctttacctggcacttttcgggataatacaggagcatttaaaaaatagataagtcaatgaatgcacttagggggacatcggctgccgctgccgtcagctgaaatgttagctatctaccgtcttataaaacgccaggaaaaacctctaaaccttagagccggggaattttttaaaaaatcggaaccaaatctccgtggcttcgtgcagcgtgagttctgcagctcgggggacgctgcagtgtgatgtggtggagagagcatgcttcaccgctcctgccatcctgacagcgccctccctcccggcctcagcctcctggttcgccaaaccggaggactgaatttatggctagctggtctctggggcgccttccagctctgacattcccgcctagaatagatcttcccgaaggtttcgcagacagaccagaggggaccgagccgggaaggcgagacagggacaggcgagagacgctgctcccaactcgcagagggagaaagcgtgtatcccgggctgccggggagagtggaaaagaaaggactggtgaccgaggggtttctgcgcagctcccggggaaccacggctggatgggggtggcggggagaccgggcgcccatgggagcggggaagcggggaggcggcggcgggagccatgcagggtctgggcccctgggatgcgggcagaagcgatgggagatcatggggagggcagcccggcgggaggcgcggacgaacaggaccgcccagccgcgagaaggctcagcccaggcaggggtcggggcgcgctgggcgcgtgtggggacgcacctgggtctcctcctcggaaaggcctgcctcggccgcgatgaggcacagcgtggtggaatccgggtgcttgtcgaccttgttgaagttgtactccaggatttccacctggtcctctgtggggccgctcgcggtctccgccgacatggtccctgcgcgctgcggggcagggagaagcggcggcggtgagcgaggcgtggagcgggcgggacgcagcgaaggaaggcggtcgcggcgccgccgggcagccccagccccaggccgccccctccagcggtgccacggccgcgcaagtccccggtggctgcacgctgagcgggggcttacggctgccccccacccgggcctccctccctggactgagcgctgttgcgggctgacggcagagcctagcgtcctgcgcctcccgcgccccccgggaccccttgcaggaactgtatccctgcctgcgacgggggcgagatagatgattccgcgggccctcaccgacctccggctctaaggaaggagtgaaggaagcgcgggggtgattttgagaaatccccttaaaaacttcctcccgaaagggggacctcccctggggacagacttgacagatcgcgagggtgggttcgcccgagtccgcgactagccggcctccggcctccccggtaggcggccttctgtctccgcagtgggttggcgctttggggccctctccaggcagggctgcacaccccacccttcctccaaaaaagttccccgcaagacaagttacttctcaaagttggggagacggaggcggtgcttttaatgtctttccattttacagagatggagataggtccgcagagaagtgatttaaggcaggggattgagacacgggagaaacttccacctgtgggcttgcatgtgccactctgccgctctgcaacctcctccttcaacccttcgcccccactctttctaagtatgctttagtgagtccccggcctgcagtcaccaggccactattccacaatttacggcaaagagcctgcctcactgtgtgctccccgaggggaggacttgcaagatggagccacaatccaactgaggaggatccagtcagctgtcttttaaaatttcagacttccctgtgattgtattaaaatttactataaagtcaggaaaatgggcccatcacaagcttcaagatctcttgtatctccttactttagagccaaccattactctagcaaatttgaagcaacatgacttcctgctgggttctctccatacctacgaagtctctgaattgggaccaaaaacttaaaaattttaaaaattggcagatgtaaccccatccacctcctcctgctaatttaagatgcatgaaggtatagaaagttggagtcttcaagatatccttggctgtgggtttggcacacctgtcaggacttgactgtcgctgacagtaaaagacaagggcaagtgtgggaatcacgttggtttgttgttttaacaaacaattgcaaaatcatccagcacaatcctgagtaggttgtgatgtggtttgtgcctgggatgagccacacttcactgatgtcccggcagaatgtacccaatgctgttataaccttctccactgtgacctgcatcttctacttcctaaataagtgtctttacctctcctttgggtcactctgaaggggctttcaggcacaacgggaagtcattctactgtgagagtctggctcaagtcacttgccaagccaccatgaaatcccatgtttttaggggattctgtgctttcccacctaaaaatcatagcactgattcctgtcacggtgctaggcaggagagggtcataccaggtcagaaacacttcttcttctgtgtgcacccattgcccgtacctttgacacacaacttcagagctgggaagaaccttggaaattacctcttccagtcttcttctgtaacagcccaggaaaatgagcataggaagactaactttctgaatgttgcccagctggtgacctgtgctccgctagacccttctcagtggggcagtctgtcattagtctggtaggaaaaatcaggagggcagtagtcataatgcaggcaggagctcattgccattttgaatgggcatagactgtcctagtaggacaccaattctagccaaagttgcccacgggaaccacccaccactgcttgcttcgcttgaaagaaaacaagggctgggagacagctgcctctgattttacttcttgccttaggaaggttccagctaattttgtgtaacatagttgtgccggctcttccatgaaaattttgtctttttctttgtagaatcctcagtccttcagaaatattaatttctaaactgactgttctgcttatactttcccctcttttttggttatttaattcctgttataacactcaagggctgctactggtcttacatttaatttactgcattttattttatgagatttctgtggcttcttgttacaggactttgtatgagattttgtggagaggtcctggttaactttaaagaactccttgggttagttggctgagaatcattggctttggttggctgctgagacttgtgggaggaccatttgaaagcgcctacttctccaaggtacaccaagcaaacctgatttctagaaacgaaggtggaagatctctata

SEQ ID NO: 316994 - DNA, 4001 bp, Homo sapiens
acctcaagtgatccgctcacctcggcctcccaaagtgctgggattacaggcgtgggccaccgcacccagccactttctttttgctatagattagtttgcattttctatcattttatacaaatgtaatcactcaacacatcctattttgtgcatggacataacatctaattatctccctggactttagatttcaagctctttgagaacaagatccattttttcttttctcttcctcttggccttcaacttatcttttctcagatatagcccttaatcattatttgcttgattgacataagaccttcatgaacttaaaaccaagcttcagtttggtggctaagaagtgcctgccacgttgaaggtttttaactcgccaccacttctggagaggttcctcagtcggcagcttcagcccagttaaaaaaaaataataataagcatatgagcttcatttaggtccgtggacttctaggagtccagaaagtgagagtcaaggtgtgggttggggtgtggggtggaaggggaggctcaggaagcgaggaatgaatacctgagaaaggtccttggctttcaccagattcttgatacaaagggatagactatggaattaatgccctgctctattcctatctgcttttcatgaatctgttgtttaattataaatcctttactatctgctcctcccttctcctcccttcccacctccccagcaccttcgttttgttctctgcctgccctggttatacttaaccttacttaactaaacacactacagggccctgtccagtagcagtgccacttcatgggaactgtttgcattccttttctctttaagagcttcttatctgaactatgtgatagattgtacctttttattcaatgattcttattccactttacttaacagtttaccctgaatacttggatgccactcacatatcacaaacctatactttctctaaaccccagagcctgggattccttttcatctcaaaaaaaaaaaatcactgtttttgttgttataaataagtattatgagaaccagaagtaacaataaactgcaaattcaaaatcaagccacttctccatccagagacagctccctcacttccccttgtcaaacacaaaacatattttaaaacgatattatgtctgattttagataaaagtctgggatgtagaataacaataatctgcttctaaatgagaaaatcataggcatctgacaaatgctggtttcaaagttatctttccaaaatagaagcgagtaagaaaaacatctcacctgcttggccaaaagaccaacaccaactccccttcctccaaattcccctcgaccccatgcagttttgtttgtaagggactgatgtcttacacccagcagcatttcctagcttctgcttgggggtaagcttgtcattcctattctccctttcacctctaccgttttccaacagatgagcaaatacggtaacgatagcattttggtctagttcctgcacaaactcattcctctgcataaaaggcagacctttgaaaggtacttacgtggaagaggcaaaggcaagcgcaagccctgggtttggaagctgtgtttgctgatgccagcctgcttaaatagctgggctggctgacgcaggctgctgatagcacgtttatttacgcctatgagcacacactcgagcaaggacctgaaaaacctgcagcgtgggcaggaggtaaaccactgaaagtatgccgaggttacgtctctcctggttattcaggtttgatgttcaggctgggacttctgagagtctcatggaactttctcgtcactatcttctcgtccctgacctctctcctagccaagcaagcttcttcaccaagataggataagagagatgtggctgagagaagacggggaagagaaaagggaccctgagtcttctcatccacttccttactttgagcgagtttccagttagatgttgcctcatttcaaagcgtagatctggtgcggttgatttcacagctctgagagctggatgccaagctaagagcctggacaattgcccaattaatgaaaggttgttttcttttgggcacagaatgtacacataaagaacagttaaaagggagagattcgggctaggatgatacagttttaggtctccctcaaaaacgattctcatttatttcccctgcatctgtactttcctcttaccatcccctccccttcgttaatgaaattcctgtctaagaggtgaaagattccccatgggcttgcgaataaaaagccagtgtgtgagcaagtctgtgggaagatgcatgcagagtgtgacagagagtttaggggctcgtgtgacaatccgtggaaatgtttctaaaggcgagggtatgtgtgtgggtgtgaggacccggctgttggatgtttacgtattttattagctagatacgggagctaatactcaattgcagtgcactaaacattattaggtgggtatgattttgagggaatgagggaagggagacaaggtctggtgagatcatctgtgggattatctgtgtgtatttgctggtttgtagcacaaaccggtaagtgccatccagagagccacaccctatattattcacttcagcagagaaagagaaagcccacttgagtctcttgggaacagtagccatatgtgaaagaagagcagcgctcattcagaatacctctttccctcttggaaaagggggtgacggttataaaacatgtgtgggaaagagtagagacagggggcccaggttaacccaaccttggttaccagaggaattcttttgtttcctgcctaattcaatgcctaacttctgaccattctatggccaaatctggattcttgctgccacgattttttgaatgggcagggtctatgtcttgtttatcatttgatacccacagcattattattattattgttgttgcacaaattattactatgacagcacaaattattatgatgatgacaatggtgatgatccataatctagtaagactgactgtgtgtcaggctccatgtaaggactgtacagagagtttgtctgcttatttaatatgtaatacaataaccctatgaggttgtattgttttttgtttttcactcaggctggagtgcagtgacacgatcttggctcactgcagccttgacctcccgggctgaggtgattctcccacctcagcctcccaagtagctgggaccacaggcacacaccaccagaagtggctaattttttgtaaagacagtattacaccatgttgcccaggctggtctcaaactcctgggctcaagggatcctcctgcctcagcctcccaaagtgctgggattacagccgtgagccaccatgcccggctgagttagttttttttattatcgttattttacagaagaggaaactgatactcagaaagactaaataactttcccaaggtcacagtgaatggtgggggtggaatttgaatccagttctatctgattccagagtcagggtttcactcaggactggcttgaaccaatacttagaaagttgcctaagagtgttttcacctatccttaattgtgtttttgtttatcatctgtcttccagaatgtgatttccatgacaacaatgacctttctgcattgtttactcctgtgatccagaacagtgcctggcacttggtaggtgctcaataaatatgtgccatctgttcagtttctaaattcccgtggaggcagtacagcccaacagatagaggtcctggcatcaacagagtctcatcctggttcagatgagacatttctttttctcttgcataatgtgtcaacttcaagctgtttctctttatccggtgtatcatggagattaaagaaaaagtgattgaaaccatgaagcagtttttacatcacttgactctgcaggtagcaggtatatggttccggttgattgggggtgcagtgatgaaaccaagacctctagctttttccatctttcattt

SEQ ID NO: 316995 - DNA, 4001 bp, Homo sapiens
gatttcagttatgtaatttcctttacaatttctcttaactgttggtacaccacttccttctaacacgtcagttcattttcattctcttacagaatattttaaaattttaaaataaatgtacatttgatgtccctttaagaacaggagcactggaataagatttgcaaaagttttcagaccccttgattaaaaagtgccttacaatttactcagtctctttgaataaaactttgtgaaatacaaatattttacttttctagtttttctccagaatttttgtttcctgtaagtttattggggcactctcaagttctccaatagatgtacaaaaaaaaaaaaaacagctttataatcaaagctgtttattgtgtatgccaatattgtccctgatacttcacaagtagattggtctattttaagtgagtagccggaaacaggaaagcattgaggaaaggctgatagagatgtttctactacaattctaacattgtatactttattatgattactattattattattttaaagtactgtctcattggggaaaaagccggagaaaacatatggtcaaaagcatctagcacttctgtgatgatgctccttgaacttgtattctgatatgtttaaacgaaaaacactgccacatttgattgtcattggactccagctttctgggagaagttgtttgtcaacagtaccttacttaacctactttaattttccaagttttgtctgcaatttcaatcatttaataattactgcagcagcactgtctttgaatacataaaggaattttgattacattaatgctgccaaatgactacaataaaaggatttctccagcagtcttgcctttctttcggttttacagctattgggctgtcagaaggaaacgtatcagtccaaactgtcttttggagcttcaaggtagctgctctcgaggaggcagcggaggcggcacccagggccccctggccgggctgccttcaggttgttgcttgttgagagcacgttcccagttgacagattgattcccctgtcttacctctcagttgttgctggtcagccacatcgcactggatgaacagagtcttctgaggttcaaactgctcatccagggcagctttacactgtacacctgcttcaagattccaatccaccagcgctacctatagacaagaggagaggaatcgcgggcctgcgcagctcacgaaatagacggacaaacaataaacacacaagaggctcccctcctggacctgaaatttggcaattaggtttgggttccctcccagccacttctgaggtgtgctcacagcctcagcttcagcaaattttggaagtggcaaagtgggcacgccgggcgcggcctccctgtctccgccagtgcacctcgggcggcggggcgagtctcggagtgtgtgggcagagaaatttccgcggctgggcgccgggcttaccttggcgcccttaagcagcagcgcctctgcaaaggctctgcctatgccctgagccgcgccggtcaccagcgccactttgccgttcacgtgcatggtgcagccactgctggggcgggcggtgggcgagctccgcgtctccgcgcggccgcggcttttatgcccccctgcgcgcgcgcgcgtgcagcccggcggggcgctcccctgccagtgggcggggaggaaactgtcaagccagcgcccgccggggaacccacgactgtgtcacctgccccctgagcgttctggagcgccaagcttcgcgatctttgccttccggactcgcagaccggctcaaagcctcccctcagcctctggctccgtgattggcaggcagctgacagaagaaaagttaaaaggttatttctgaagaagagtttccttcagtgccctaaagaccaactggatagaaggagagcggagcagaggcttggaagcttggatccctcctcctgcactccctcccggccccgactccggaacaaaacaagcaaacaataaagcaaacttgttgctcttttgtctcaaagttttgtgtgagttcccatctcgtaatcagtggggttgagggtgacggggagcagaagtaactaatatcattgtgttttcttagttacattttggacaaatttttacggatactggagatgagaagtggactctgctctgtcctgaaaacctggaatcataacatttcatggctaggactagagtgtccttggcgctgtgtttctggtcagtgtcaattgtgtgtcatattgagatgcccccacaaaaactgtcatcatcaacaggcgctccagagccgctggtagcctaccaaattgttggctcaatggaatgcttacttgttgaaatacaccaactttggaagctctgagtcaagtttgggacagaggttccttgctctccaggaactccagggctagctgtatgcggacttgcataaataacaagggctattccactgactttgtctctttttctcaggttgtcagcggcaggctgcaattttaattctgtaaacgtaagtggttggctttttttttttttttttttttttaatcttgagacaagatctcgctctgtctgtttggctagaatgcagtggcataatcccagctcgctgcaacctcaatctccagggctcaagcgaccctcccaccttggactcccaaagagtgctaagattacaggcatgagccactatgcccagctggcatttattttcttaaagaaaaaaaaaatctaaatacttgggggaaatgggagttgagcaaaagactgacactaacagcagaatgaatcatttttatatcttctttaccttctttactgggaaaggtggctggctcagcagggaaggagtgtatgaggagactgtgtaaaatgtgtcttgtcgcgttgttggtaagccgctaagcaaatgtctttaacattaatttgaaattaggtcttgacaaaatcttgagaaattaaaacaggaaaatagatatttgtactctaggatgataattaaaattgtaatatgaagagtaaattgaggggtcatattgaaagggaataatagtagaagacaaaaagaaaacaaggaaccaaacaaaacttcagctcctctaatggcatgcacagaacatagaagtttctgatgaaggaactggcaaaaaagacagaaaaggaactgctggggtaaaatggcaacatgctgggagaacacaggtttgcagctcttgtgggagaaatactttcaagaagaaagaagtagttaataatgcaaaatactcaggtgagcaccagggaataaaggatggagaaatattttgaatttttcaggacaatatttagtgtgagtaaatttagaaggcacaaaaactgaacagctgaaatgatctgtgagaagatagatattgtcatggactgaagaccaaggttacatggaaagagaaatggactggataatagttgaaaagattagacagcaaacatgtttttcttttaagaaaagataagaagattgattgaggtcaaagtgcaatgagtcaaggatagtgacaactggaagaacaggaagcagtttggcggtggcggataggtgaggcacaaggacgtcagcactggattcagacaaaccgggtttggatcttgtgtctgctactgaccagctgtgtaaccttgggcaatttgcttcaactctgggtctcagattccttattataaagtaagcttttctaaaaaaaaaaaaaaaggtgaaaattaaaataggtgaagcatattaaacactattacagagcctgccacaaagtattaatacattaatattagtcccaacatattacttctgaaatattaatgaataataaatgtgagatagagaaaaatgtgaagaataggtttttttagtagatagcaaggactgaggtctagagaaaacttagtaccccttcatccctttccctcctctcaatttccactgccactgtccagattcatattttctcctatgat

SEQ ID NO: 316996 - DNA, 4001 bp, Homo sapiens
tttcagatttcagttatgtaatttcctttacaatttctcttaactgttggtacaccacttccttctaacacgtcagttcattttcattctcttacagaatattttaaaattttaaaataaatgtacatttgatgtccctttaagaacaggagcactggaataagatttgcaaaagttttcagaccccttgattaaaaagtgccttacaatttactcagtctctttgaataaaactttgtgaaatacaaatattttacttttctagtttttctccagaatttttgtttcctgtaagtttattggggcactctcaagttctccaatagatgtacaaaaaaaaaaaaaacagctttataatcaaagctgtttattgtgtatgccaatattgtccctgatacttcacaagtagattggtctattttaagtgagtagccggaaacaggaaagcattgaggaaaggctgatagagatgtttctactacaattctaacattgtatactttattatgattactattattattattttaaagtactgtctcattggggaaaaagccggagaaaacatatggtcaaaagcatctagcacttctgtgatgatgctccttgaacttgtattctgatatgtttaaacgaaaaacactgccacatttgattgtcattggactccagctttctgggagaagttgtttgtcaacagtaccttacttaacctactttaattttccaagttttgtctgcaatttcaatcatttaataattactgcagcagcactgtctttgaatacataaaggaattttgattacattaatgctgccaaatgactacaataaaaggatttctccagcagtcttgcctttctttcggttttacagctattgggctgtcagaaggaaacgtatcagtccaaactgtcttttggagcttcaaggtagctgctctcgaggaggcagcggaggcggcacccagggccccctggccgggctgccttcaggttgttgcttgttgagagcacgttcccagttgacagattgattcccctgtcttacctctcagttgttgctggtcagccacatcgcactggatgaacagagtcttctgaggttcaaactgctcatccagggcagctttacactgtacacctgcttcaagattccaatccaccagcgctacctatagacaagaggagaggaatcgcgggcctgcgcagctcacgaaatagacggacaaacaataaacacacaagaggctcccctcctggacctgaaatttggcaattaggtttgggttccctcccagccacttctgaggtgtgctcacagcctcagcttcagcaaattttggaagtggcaaagtgggcacgccgggcgcggcctccctgtctccgccagtgcacctcgggcggcggggcgagtctcggagtgtgtgggcagagaaatttccgcggctgggcgccgggcttaccttggcgcccttaagcagcagcgcctctgcaaaggctctgcctatgccctgagccgcgccggtcaccagcgccactttgccgttcacgtgcatggtgcagccactgctggggcgggcggtgggcgagctccgcgtctccgcgcggccgcggcttttatgcccccctgcgcgcgcgcgcgtgcagcccggcggggcgctcccctgccagtgggcggggaggaaactgtcaagccagcgcccgccggggaacccacgactgtgtcacctgccccctgagcgttctggagcgccaagcttcgcgatctttgccttccggactcgcagaccggctcaaagcctcccctcagcctctggctccgtgattggcaggcagctgacagaagaaaagttaaaaggttatttctgaagaagagtttccttcagtgccctaaagaccaactggatagaaggagagcggagcagaggcttggaagcttggatccctcctcctgcactccctcccggccccgactccggaacaaaacaagcaaacaataaagcaaacttgttgctcttttgtctcaaagttttgtgtgagttcccatctcgtaatcagtggggttgagggtgacggggagcagaagtaactaatatcattgtgttttcttagttacattttggacaaatttttacggatactggagatgagaagtggactctgctctgtcctgaaaacctggaatcataacatttcatggctaggactagagtgtccttggcgctgtgtttctggtcagtgtcaattgtgtgtcatattgagatgcccccacaaaaactgtcatcatcaacaggcgctccagagccgctggtagcctaccaaattgttggctcaatggaatgcttacttgttgaaatacaccaactttggaagctctgagtcaagtttgggacagaggttccttgctctccaggaactccagggctagctgtatgcggacttgcataaataacaagggctattccactgactttgtctctttttctcaggttgtcagcggcaggctgcaattttaattctgtaaacgtaagtggttggctttttttttttttttttttttttaatcttgagacaagatctcgctctgtctgtttggctagaatgcagtggcataatcccagctcgctgcaacctcaatctccagggctcaagcgaccctcccaccttggactcccaaagagtgctaagattacaggcatgagccactatgcccagctggcatttattttcttaaagaaaaaaaaaatctaaatacttgggggaaatgggagttgagcaaaagactgacactaacagcagaatgaatcatttttatatcttctttaccttctttactgggaaaggtggctggctcagcagggaaggagtgtatgaggagactgtgtaaaatgtgtcttgtcgcgttgttggtaagccgctaagcaaatgtctttaacattaatttgaaattaggtcttgacaaaatcttgagaaattaaaacaggaaaatagatatttgtactctaggatgataattaaaattgtaatatgaagagtaaattgaggggtcatattgaaagggaataatagtagaagacaaaaagaaaacaaggaaccaaacaaaacttcagctcctctaatggcatgcacagaacatagaagtttctgatgaaggaactggcaaaaaagacagaaaaggaactgctggggtaaaatggcaacatgctgggagaacacaggtttgcagctcttgtgggagaaatactttcaagaagaaagaagtagttaataatgcaaaatactcaggtgagcaccagggaataaaggatggagaaatattttgaatttttcaggacaatatttagtgtgagtaaatttagaaggcacaaaaactgaacagctgaaatgatctgtgagaagatagatattgtcatggactgaagaccaaggttacatggaaagagaaatggactggataatagttgaaaagattagacagcaaacatgtttttcttttaagaaaagataagaagattgattgaggtcaaagtgcaatgagtcaaggatagtgacaactggaagaacaggaagcagtttggcggtggcggataggtgaggcacaaggacgtcagcactggattcagacaaaccgggtttggatcttgtgtctgctactgaccagctgtgtaaccttgggcaatttgcttcaactctgggtctcagattccttattataaagtaagcttttctaaaaaaaaaaaaaaaggtgaaaattaaaataggtgaagcatattaaacactattacagagcctgccacaaagtattaatacattaatattagtcccaacatattacttctgaaatattaatgaataataaatgtgagatagagaaaaatgtgaagaataggtttttttagtagatagcaaggactgaggtctagagaaaacttagtaccccttcatccctttccctcctctcaatttccactgccactgtccagattcatattttctcct

SEQ ID NO: 316997 - DNA, 4001 bp, Homo sapiens
ctctgtcgcccaggctggagtgcagtggcgcaatctcggctcactgcagcatccgcctcccgggttcaagcgattctccctgcctcagcctccccagtagctgggattacagacgcccaccaccgcgcccagctaatttttgtatttttagtagagacgtggtttcgccatgttggccaggacctcctaacctcaggtgatccgccagcctcggcctcccaaaatgttgggattacaggctgagccacctcgcccggccaaacttttttttctttataaattacccagtctcaggtatgtcttaatcagcagcgtgaaaactaactaatacaatgctgatttatttcatctgattaattcaatcccagaggcaattttaacataatcattgaaaaaattacaaacttttataataaaacaatttaacaatatattattccgtatactgctgtaaaagcacagtaaaaaatagtctcaaaaattctagtctctgtgccagaaagatgacaacaatccaatttcaactctctgacaacacaggctaatcaatatccaatgcctatactaaacatcttaataaagacttcagccgaaatatttttagttcaaaaaagagaacttttggaataattttgttagatagaaaacttacaaatgaggaattaagtattgaccattctacagttcaatacaaaatgttagccaacgtaagctcttactcttaaatacgacacatcaagaattcaaacatatttgggcattccagacacagttttttacatgcttagtaattgcgcaataatctgagttagagatataaaaacaaagattacttgtgaatttgctatagctcttctttgagtttaagatgcagatcttaacttgcccagtaataaacttatacaaaatgtaatggcctagagcatgtttacactcctattatatagaccctggtgttctgaaatgtaaaaattggattcagacagcaatcatgtgagatactattgttcacaggggaacttcttgcatatactgacattaaaacagctttttattacccctaacatttgatggtaaagaatgttaatttccctcatttcacagtgtccctgggcatttcaagttcaattctggaaaagttgccaggttggagttaaattataggacaatagagaaatagaagaattgttgttgactgagtaagatattgatttcaatcaagcactggatgtttaactttgaattagcaagctgaaagctctattttttttttttttatcaaatatcaactaaatgtcattttaagtgactgtttcacattaaagccaaagcaagaggaataactgaaatatcctttgggagctgtgagttgaaattcctggcctggggtaaatcccttaaaccatctctgaagccaaaagatgataggttgcaattcttatcaaaacatggagatgcttcaacaaaatgtgccttaaaataatataaaatattaccagtaaaagtcttaaactttaaagcaaaggaaagaaattgaacagccatgagataatattctctactccatcaatccaagttattgaagaatcacttgggaaaattctggaagtagtaacaaaccctgattaagacaggatttttcctctagcattgattatattttctatgttaaaatccacttgaagagatcttcttaaatctcctgtacctatatttccttaaaaatgactatttgagtttcacatattcgcatatatggagaggttctgggtaagacaaggtcagagtgagcaccatcatgaaaatagctcacaagacagttagtcacaaacaggatatgagaataataaaaactctgaagtaaagagtaaagcatatctcatttattacctatgtggagttcagtaatatgacttacctgtgttatgtctctcgggagtctgcagtgtcttgtatccctgggtatgtgactgtgccttgggtttatatgacgagtaagtgataatcacgagccagtgagaggacaggcaacttccttctacctaacgctcttccttcttttcttagataaaacatgcatgccaggcagttcaagcctgcgaagactgctggttatacaggatatctgggtataaataaaccaacacatttgtatacaaggtaaagtcaaagttatagctgcatatgtatgcccactgttacatgttcacttattttcagttttacaccataggctcctggagaataagaaaacctgaatgtaatgaaatcatctttgcagatgtgcacatgacttgcttctctattttagaaacagtctctcctgtacctgctgtatgttccttcgaggcagtgtctaacaatgtggtgtatttaacttgtttgtttttggtttctcccagtggaatgtaagctctgtaaaggcaggcacttcactgtctttttcactattgtctcctcagttctaagaggagtgccaggcatgtcatgaccactaatatacatctgatgatagaataaccctaatttatagttcacgtttttgcaaggactgtaaatttgcattgttgctggtttatttcatttactctcatttctcagaaaagccaaagtgtttaaagtaaacctggtgtagaagtttccaattcatcttgtttgtgatccttttacaatttagtaacaaatgcctgacattttagaaatttattgtttcacttcttagtgcaggaattatttttatctataatattaggacagctcagtgaaaagatccaataaaatgcctgcctgggccttactgagcctgaggattatccatgaaacatttcaatgaccagctggctttcaacttccagaaaattactcccacaggcaacaatagcaacatatcaatcatttaatatttcttatttctaaagtgcttttaattttgaaaaatatgtttacatccacttagtataaacgtcagaaatgaaaataaatgtaaatactagtatgtaaaaagagaagacgcaagtgtagccctttacccaccaaaaaaggatacatgtgtgtcaaaatcaagtgcaaatgggatgggagtgggagctatacaaaattaacacaatgcatttattatctttgacagctttaacttatattttcaaaaaaatctttttatcctcacctcaatgatttttaatccctatttttataaatgaggaaactgagacatagggaaattaggtaaattgcctgcgaatttttgttgggacaagctaggattaaaatctaggccttctgatgacacatttaatatttttccttacataatgctgcctatatataatacgagactgcttcagttaaaaaaaaatcaagtatacaaaaaataacacttttctcattttgtattacaattttatcttttacgaccagttgttttggctggaggaaagcagagtaacacatcaaggattggggaaggagcagccacttgatccttggtcaccgatcaacagaggctgctctagaggcatccattgtccttgtgtgcatggcctccacgccaggagctctctgcagctcctgtagcattctcattttgctaccttcttgccccagtgtggtggtttcatcacaacgctgcctgagattccacctgcccagtacccaacagagccacttcttctctgtggtctttctacctccctggaggcacaagagggtcccaggagagggtcccagatctcctctactcgggaagcacagctttcccatcctcttgtctcttctcccagcccaggtgggggtgctctaactctcctagtcttctaccagctgtgggcctttgggcaggtaacttaatctctctgtgcctgagctccttcacctttagatggagattgattctacaataaatatttatttgttcctaatctttgccaggtattgttctgaacgctagagatatagcagtaaataaggctgggcgcggtggctcactcctgtaatcccagcac

SEQ ID NO: 316998 - DNA, 4001 bp, Homo sapiens
gtaaatggacatctacttcatacccatgttcagtaaccgcccccccccaccccacaccccagcaagctaagactggggtcctgtgatctggagccctatggttcagcatttctctggaacaatcttcctatcccccaactagttgctgcctagtatcagcttcctatccttaaggggaagggcagaaagtaaggattcttccccaccagaaaattgtagtgccagaaggaaaaggagaggttaactatgatccaaagaaacagaaaaccggtgaatggctaccaaatgctcaccatgtcctagaaagaaacaattcgtttgaaacgtcaaacacttactatgggtcaaacactgagaagctcttaccatatcatcaaatcctcgggcaataatccttgaggcaagcttgagaaattccattctacagctgaagaaatcaaggttggtgtggccaagagatatggaaaaaccaagtcactcatctttgccagagctgagagtcaagccaggatggtctgtccatctcttaaccagtacactacccattaaattagcgctggcaactatagtgtgggctcagggaggacagcatctaggtatttgacacagaggtgagataatggtgatctttccctctatctgggctggtcaagatgtggccatctctggaggctcccagggcctaaataagaggcctagaagacctgggattgtccctgtagctccccatcttggagtcagcctgcattcatggggcaggagccctgaacctgcatcaggttccttctttctcaggtaaggaaaaaacttagagctgataaggcagcaccacattttgcagccccattttggagagacatctttttattaggactttgtaagtcactgcagtagtctcctaggtctcatttattgaatatttagatttttattcctgttctgtgacgcccttttcatctgcctaaaaaaaaaaaaagaaaagaaaaaagaaaaagaaaagaaaagaaagagaaatcttcctaacacagtcttaaatacagaaggctatgcacaatcttacttgtcctacactgcacagcaaatcaagcactcacaggccttcaggtgcacctgcctggtttccctcctcttggctagggaagtactggggcaagtgggcagtttctttttcaaatttccacttatacctgaccttaggtggtgcctattcaacacttacagaatgaatgaaacaaaaaggctcatttagagtgggcgctaaacaatgtgtacacatggacttagtggaatagtagacactggagactccaaaaggtgggagggtgggagagggatgagggatgagaaattacctattagatacaatgtacaacattcgggtgacagttacactaagagcccagatgccaccacaatgcaatatacccatggaacagaactgcacttgtaacccctaaatctattttttaaatgataccccccaaaaagcagtttggggtctgagagtaagggagggagagggagaatgagaggcgggaagtggggtggggagagacaggcggggaggttccggtgtgaagttgtttccgcgcaaaagaaggagagcggctggcggggcagacataggtgtcaggaggacaggaaaggggacaggaccaggaggctggcgcttaccccaggaggatgaggaaccgcgggtccgtggccaggttggcgtcaatggtgacggacaggaacgaggggctcaccaggtgcagcggctcctgggtgaagaagtccaggtccacgacgtcctgtgcttgcgcaggtcggggcagggcgccaggggagaggggacccagcggccccaggagcagcagcatcagcggcggcggcagcgcaggcttcgagcgcagcagcatcttgggctcacctggctgctccccccgccagctgccgcgcagcggagagtcgagagctctagcacttcctcccgccgagccccagcgcccttttctcctttcctccgccccgttacgcctcctcacccctcccactgcgccctccatccctcccactcctcttctgcatccctcccactgctcccaatccaaccccgccccgcctgcccggctctctcctacttccttgctcgctttcccctcggtggcggtcacgttcacttacgaaatcacccacacccacttgaagggtgcggagatggccgggatccaagcgcccgggaggcctggggaggagcgcccggggaggagcgcccggggagcagcgctgggcatcccggaccaggcttcctgacgcacgtgttctgcgcgctctcgtgggaacccagcgtttccgactcccagatcccattctgatggcgccgggtatccctctgaccctcgagtaaaacctccaatggagtattcatcccttcctctcccatctagcttataaacacttgcttgtcacttgagccagccaaaatctgattgtcctctggccaggcagtttctcaggtattttacttttgcttgaaaaaatctggcctcagcatacgctaaactgcagctggaaagagatcaaccacccaaaattctttatcaacttctcattaagacaatatttagcaatcttaaagggttagttgctccaatgtctggaactcaggacctgaagcccccatacaaagtgtagagtacggactgcccctgaatttggagcctttgccaaatttctcctctgcgcatttatctttcgctgttggtcagacttttcttcagcttttccttgatgcttacactgatgtataatcatagcaagcatcgcacgcttagtgcctactgtatgcctgatacaggtgctttacttgtgttctcttcccttctcacaaccctgccaagtgcatactgtccttgttttacacatgcggacccaagctctgagacagtaactgggtgaagtgtcagaatcgggatgtgaagtgtcagaatcgggatgtgaatgcagttacaaaacctcgagcagatggcagtgtgtttcagctgaaatgtaacttccctcaaggaagctttctctcaatctccaggcagctctccatgacacactctcatagcatcctcaatttgttagacactctcgtagcatcctcaatttgttagacactctcgtagcatcctcaatttgttagtattgtgatgttgctcaacattggcttcatctactagattatatgctccaccaaaacagagattaagtttgtctcacacgctatgctagccatagctcaggcatgtgatcatgttggtgcttagtaagagtctaataaatattggttgagtaagcaaataacaccaaaacccttagatttttccacttgagattgtaccaccaataaggcaacaaataaaaatagattattttgaaatgcatatctaatttgcataaatcaggccaggcatggtatgtgatgccagtgatgccatcatgcctgtgatgccagcattttgggaggccaaggtgggaggattgcttgagccgaggaattcaagaacagcctgggcaacatgatgaaaccccatctctacaaaaaatacaaaaaattagccaggcgtggtggcccgtgcctgtggttccagctactggggaggctgaggtgggaggtttatttgagcctgggaggtggaggttgcagtgacccttaatcacaccactgcactccagcctgggtgacaaagtgagaccctctcttaaaataataataataattatcattatttgcatagatctacctattcttaagcaacttaaaagctaagctcatagtgagttttgcaactagaatcaggttcatatcctacaattactgtatacatatgaaaaaaaattcacacataaacaccacactaccagaagagtgtaataatatggtagcagacgtggagttggaaaaacagaagtttcttttccacatttgtcatgacattaatcttacaccccaccccatgcccctgactcctgtt

SEQ ID NO: 316999 - DNA, 4001 bp, Homo sapiens
gaatggctaccaaatgctcaccatgtcctagaaagaaacaattcgtttgaaacgtcaaacacttactatgggtcaaacactgagaagctcttaccatatcatcaaatcctcgggcaataatccttgaggcaagcttgagaaattccattctacagctgaagaaatcaaggttggtgtggccaagagatatggaaaaaccaagtcactcatctttgccagagctgagagtcaagccaggatggtctgtccatctcttaaccagtacactacccattaaattagcgctggcaactatagtgtgggctcagggaggacagcatctaggtatttgacacagaggtgagataatggtgatctttccctctatctgggctggtcaagatgtggccatctctggaggctcccagggcctaaataagaggcctagaagacctgggattgtccctgtagctccccatcttggagtcagcctgcattcatggggcaggagccctgaacctgcatcaggttccttctttctcaggtaaggaaaaaacttagagctgataaggcagcaccacattttgcagccccattttggagagacatctttttattaggactttgtaagtcactgcagtagtctcctaggtctcatttattgaatatttagatttttattcctgttctgtgacgcccttttcatctgcctaaaaaaaaaaaaagaaaagaaaaaagaaaaagaaaagaaaagaaagagaaatcttcctaacacagtcttaaatacagaaggctatgcacaatcttacttgtcctacactgcacagcaaatcaagcactcacaggccttcaggtgcacctgcctggtttccctcctcttggctagggaagtactggggcaagtgggcagtttctttttcaaatttccacttatacctgaccttaggtggtgcctattcaacacttacagaatgaatgaaacaaaaaggctcatttagagtgggcgctaaacaatgtgtacacatggacttagtggaatagtagacactggagactccaaaaggtgggagggtgggagagggatgagggatgagaaattacctattagatacaatgtacaacattcgggtgacagttacactaagagcccagatgccaccacaatgcaatatacccatggaacagaactgcacttgtaacccctaaatctattttttaaatgataccccccaaaaagcagtttggggtctgagagtaagggagggagagggagaatgagaggcgggaagtggggtggggagagacaggcggggaggttccggtgtgaagttgtttccgcgcaaaagaaggagagcggctggcggggcagacataggtgtcaggaggacaggaaaggggacaggaccaggaggctggcgcttaccccaggaggatgaggaaccgcgggtccgtggccaggttggcgtcaatggtgacggacaggaacgaggggctcaccaggtgcagcggctcctgggtgaagaagtccaggtccacgacgtcctgtgcttgcgcaggtcggggcagggcgccaggggagaggggacccagcggccccaggagcagcagcatcagcggcggcggcagcgcaggcttcgagcgcagcagcatcttgggctcacctggctgctccccccgccagctgccgcgcagcggagagtcgagagctctagcacttcctcccgccgagccccagcgcccttttctcctttcctccgccccgttacgcctcctcacccctcccactgcgccctccatccctcccactcctcttctgcatccctcccactgctcccaatccaaccccgccccgcctgcccggctctctcctacttccttgctcgctttcccctcggtggcggtcacgttcacttacgaaatcacccacacccacttgaagggtgcggagatggccgggatccaagcgcccgggaggcctggggaggagcgcccggggaggagcgcccggggagcagcgctgggcatcccggaccaggcttcctgacgcacgtgttctgcgcgctctcgtgggaacccagcgtttccgactcccagatcccattctgatggcgccgggtatccctctgaccctcgagtaaaacctccaatggagtattcatcccttcctctcccatctagcttataaacacttgcttgtcacttgagccagccaaaatctgattgtcctctggccaggcagtttctcaggtattttacttttgcttgaaaaaatctggcctcagcatacgctaaactgcagctggaaagagatcaaccacccaaaattctttatcaacttctcattaagacaatatttagcaatcttaaagggttagttgctccaatgtctggaactcaggacctgaagcccccatacaaagtgtagagtacggactgcccctgaatttggagcctttgccaaatttctcctctgcgcatttatctttcgctgttggtcagacttttcttcagcttttccttgatgcttacactgatgtataatcatagcaagcatcgcacgcttagtgcctactgtatgcctgatacaggtgctttacttgtgttctcttcccttctcacaaccctgccaagtgcatactgtccttgttttacacatgcggacccaagctctgagacagtaactgggtgaagtgtcagaatcgggatgtgaagtgtcagaatcgggatgtgaatgcagttacaaaacctcgagcagatggcagtgtgtttcagctgaaatgtaacttccctcaaggaagctttctctcaatctccaggcagctctccatgacacactctcatagcatcctcaatttgttagacactctcgtagcatcctcaatttgttagacactctcgtagcatcctcaatttgttagtattgtgatgttgctcaacattggcttcatctactagattatatgctccaccaaaacagagattaagtttgtctcacacgctatgctagccatagctcaggcatgtgatcatgttggtgcttagtaagagtctaataaatattggttgagtaagcaaataacaccaaaacccttagatttttccacttgagattgtaccaccaataaggcaacaaataaaaatagattattttgaaatgcatatctaatttgcataaatcaggccaggcatggtatgtgatgccagtgatgccatcatgcctgtgatgccagcattttgggaggccaaggtgggaggattgcttgagccgaggaattcaagaacagcctgggcaacatgatgaaaccccatctctacaaaaaatacaaaaaattagccaggcgtggtggcccgtgcctgtggttccagctactggggaggctgaggtgggaggtttatttgagcctgggaggtggaggttgcagtgacccttaatcacaccactgcactccagcctgggtgacaaagtgagaccctctcttaaaataataataataattatcattatttgcatagatctacctattcttaagcaacttaaaagctaagctcatagtgagttttgcaactagaatcaggttcatatcctacaattactgtatacatatgaaaaaaaattcacacataaacaccacactaccagaagagtgtaataatatggtagcagacgtggagttggaaaaacagaagtttcttttccacatttgtcatgacattaatcttacaccccaccccatgcccctgactcctgttgtgagtcaacagtcataccaatttctttctttttttttttttttgagacggagtctcgctctgtcgcccaggctggagtgcagtggcaccatctcggctcactgcaagctctgcctcctggattcacgccattctcctgcctcagcctcccgagtagctgggactacaggggcctgccatcacccccggctaattgttttgtatttttagtagagatgggatttcaccatgtctgtcaggatggtctcaatctcctgacctcgtgatctgcc

SEQ ID NO: 317000 - DNA, 4001 bp, Homo sapiens
ttcttggggagaggttggggaatatgctggctacagcaatagaagaggcctcaggtcctcacatttcagtaaatggacatctacttcatacccatgttcagtaaccgcccccccccaccccacaccccagcaagctaagactggggtcctgtgatctggagccctatggttcagcatttctctggaacaatcttcctatcccccaactagttgctgcctagtatcagcttcctatccttaaggggaagggcagaaagtaaggattcttccccaccagaaaattgtagtgccagaaggaaaaggagaggttaactatgatccaaagaaacagaaaaccggtgaatggctaccaaatgctcaccatgtcctagaaagaaacaattcgtttgaaacgtcaaacacttactatgggtcaaacactgagaagctcttaccatatcatcaaatcctcgggcaataatccttgaggcaagcttgagaaattccattctacagctgaagaaatcaaggttggtgtggccaagagatatggaaaaaccaagtcactcatctttgccagagctgagagtcaagccaggatggtctgtccatctcttaaccagtacactacccattaaattagcgctggcaactatagtgtgggctcagggaggacagcatctaggtatttgacacagaggtgagataatggtgatctttccctctatctgggctggtcaagatgtggccatctctggaggctcccagggcctaaataagaggcctagaagacctgggattgtccctgtagctccccatcttggagtcagcctgcattcatggggcaggagccctgaacctgcatcaggttccttctttctcaggtaaggaaaaaacttagagctgataaggcagcaccacattttgcagccccattttggagagacatctttttattaggactttgtaagtcactgcagtagtctcctaggtctcatttattgaatatttagatttttattcctgttctgtgacgcccttttcatctgcctaaaaaaaaaaaaagaaaagaaaaaagaaaaagaaaagaaaagaaagagaaatcttcctaacacagtcttaaatacagaaggctatgcacaatcttacttgtcctacactgcacagcaaatcaagcactcacaggccttcaggtgcacctgcctggtttccctcctcttggctagggaagtactggggcaagtgggcagtttctttttcaaatttccacttatacctgaccttaggtggtgcctattcaacacttacagaatgaatgaaacaaaaaggctcatttagagtgggcgctaaacaatgtgtacacatggacttagtggaatagtagacactggagactccaaaaggtgggagggtgggagagggatgagggatgagaaattacctattagatacaatgtacaacattcgggtgacagttacactaagagcccagatgccaccacaatgcaatatacccatggaacagaactgcacttgtaacccctaaatctattttttaaatgataccccccaaaaagcagtttggggtctgagagtaagggagggagagggagaatgagaggcgggaagtggggtggggagagacaggcggggaggttccggtgtgaagttgtttccgcgcaaaagaaggagagcggctggcggggcagacataggtgtcaggaggacaggaaaggggacaggaccaggaggctggcgcttaccccaggaggatgaggaaccgcgggtccgtggccaggttggcgtcaatggtgacggacaggaacgaggggctcaccaggtgcagcggctcctgggtgaagaagtccaggtccacgacgtcctgtgcttgcgcaggtcggggcagggcgccaggggagaggggacccagcggccccaggagcagcagcatcagcggcggcggcagcgcaggcttcgagcgcagcagcatcttgggctcacctggctgctccccccgccagctgccgcgcagcggagagtcgagagctctagcacttcctcccgccgagccccagcgcccttttctcctttcctccgccccgttacgcctcctcacccctcccactgcgccctccatccctcccactcctcttctgcatccctcccactgctcccaatccaaccccgccccgcctgcccggctctctcctacttccttgctcgctttcccctcggtggcggtcacgttcacttacgaaatcacccacacccacttgaagggtgcggagatggccgggatccaagcgcccgggaggcctggggaggagcgcccggggaggagcgcccggggagcagcgctgggcatcccggaccaggcttcctgacgcacgtgttctgcgcgctctcgtgggaacccagcgtttccgactcccagatcccattctgatggcgccgggtatccctctgaccctcgagtaaaacctccaatggagtattcatcccttcctctcccatctagcttataaacacttgcttgtcacttgagccagccaaaatctgattgtcctctggccaggcagtttctcaggtattttacttttgcttgaaaaaatctggcctcagcatacgctaaactgcagctggaaagagatcaaccacccaaaattctttatcaacttctcattaagacaatatttagcaatcttaaagggttagttgctccaatgtctggaactcaggacctgaagcccccatacaaagtgtagagtacggactgcccctgaatttggagcctttgccaaatttctcctctgcgcatttatctttcgctgttggtcagacttttcttcagcttttccttgatgcttacactgatgtataatcatagcaagcatcgcacgcttagtgcctactgtatgcctgatacaggtgctttacttgtgttctcttcccttctcacaaccctgccaagtgcatactgtccttgttttacacatgcggacccaagctctgagacagtaactgggtgaagtgtcagaatcgggatgtgaagtgtcagaatcgggatgtgaatgcagttacaaaacctcgagcagatggcagtgtgtttcagctgaaatgtaacttccctcaaggaagctttctctcaatctccaggcagctctccatgacacactctcatagcatcctcaatttgttagacactctcgtagcatcctcaatttgttagacactctcgtagcatcctcaatttgttagtattgtgatgttgctcaacattggcttcatctactagattatatgctccaccaaaacagagattaagtttgtctcacacgctatgctagccatagctcaggcatgtgatcatgttggtgcttagtaagagtctaataaatattggttgagtaagcaaataacaccaaaacccttagatttttccacttgagattgtaccaccaataaggcaacaaataaaaatagattattttgaaatgcatatctaatttgcataaatcaggccaggcatggtatgtgatgccagtgatgccatcatgcctgtgatgccagcattttgggaggccaaggtgggaggattgcttgagccgaggaattcaagaacagcctgggcaacatgatgaaaccccatctctacaaaaaatacaaaaaattagccaggcgtggtggcccgtgcctgtggttccagctactggggaggctgaggtgggaggtttatttgagcctgggaggtggaggttgcagtgacccttaatcacaccactgcactccagcctgggtgacaaagtgagaccctctcttaaaataataataataattatcattatttgcatagatctacctattcttaagcaacttaaaagctaagctcatagtgagttttgcaactagaatcaggttcatatcctacaattactgtatacatatgaaaaaaaattcacacataaacaccacactaccagaagagtgtaataatatggtagcagacgtggagttggaaaaac

SEQ ID NO: 317001 - DNA, 4001 bp, Homo sapiens
taaggcagggatttgcagcggagcgcgcgtctcctggaatttcagtaggtaaggcttattctaattgcacccagtgttacccaatattaccaggaatgcagaaagcaagaaaaaaatccgaacgtcaaaggatgcgctttgctttagaaatgcagggaggcagaagttgggttatttctccctcctttttttttcttttttttttaaagatggaattcctggaattaacccttgggtggaagcatttcaacaaaataaaatgagatttgcctgcaaagcgagaacgcacgggtgggaatgaaggatcctgcctgtgccaggctgctgcctcagcagtgtccaagcacccagcgcctgaaagcgggagcgtggggactcgtctggggaccctcttccggggctactggcgggaggcgcagccgagctggtggtggcggggtttccctccggggctagggctgagggaggagaagagggcggactggctccttccgttctcggccaccctccccgccactccttgaggctgctccatgctaacaggagactgtttctcggagcgcagcgcaaagacagtggatttggagtggcctccctagaatccccccaaaagcatcttggcacaagttgtagataaaaatagctcatgataacattgtgggaaagggaggagcgagactcgcgcaaggcgaggcaagggtaccactggatctgcaaaggaggaggaagagggaggatgcaacccttggcccaagagagcgccctgagtgtgcgaggaatcgctggctcccaggggagggaaagagatggaagacctatagcgcctataactgcagagttatagacctataactgcagagcccagcacaccccatcccgcgccggcacccggctttggctccagcttcttcttcccatcatccgcctacgttctgggtctgtcctccgcttcctgggacaggctggggctagaaggaggagcagcgcgccgtccgccccctggctggtagagcgcacctggagaggtcaagctccgcgaataagacccttcctgggagctggggtctaggcgttccaaccgcgggttcgcaccccgccatccctcacctccatccgctgccactacccaagggcccggaaatagaaaaccacgaagggggaaaaaaatcagtaaaaagtaacaagaaaaaaatcaagaccctcatgtaattggcattagggatgagaggtttattgtcagggctgtcacctcaatctctctctttgggagatgcctatctccaaccaaatgcaaaggcaaacccgaccaaggcttctccacccccaaaggctccctcagccgagttacttttgcgggctgtgtcctcgccccagtttctggccccaggtggtacccaggatccgttgagtgctgcgctctcgctgccctacagggtcctatggtgaagctgcggtcgcgaagcggccggcaggagcgaacctcacgactctgcagggggggaaaacatccaacccagtaagagtcagaaatctgggtccctgtccttacagatcaaccggtccctcgggacttccagagcagaggtgctagggcaggaggtgaggaggatgggaaaatccccagcctttgcttcctggttccctctgcatccactccacctgctccagcctcgattcttcttaggttctgcacttgcccgaagtccagaacgccagacaaaggcacctcggagccctctacacctgcgtcctgccactctcccaccccgcgcgcgccgcactcacctgagccgcgcctctgtccagcccgtccggcgccctaaataggctcctaggctgggccatgggcagcactgccgagcacccgcggcgggtagagcaagtttctggatggcccggggcaggcgggcggggagaaggcgcaggcacccactgagacccggctgtcgtggcggcgactcctggctgccagggcgcagaggaccttgcaggcgggcgttttggtgctcaatcccgaggagggggaggagcgggaggaggagcgggagcaaaaggaggggacggaggaggccgggcccggagggagagcgcgttgggcagaggaggatcgcgagcgcccactgctgcccggcccgctcgggtgccgcccagagtccggcccgctaggtgcctggtgctccgctctgcgctcagctgctccgcacagccccgcctggcacgcagctccagcggctggtcgggtagtagtcggtcccgcccacccggtgcggtggcccctggggtttcagtccaaggggagggaccagcgctccaagaaggtgaggctgctgggatgggtgactccgccgtcactgcaaacacgggacgtcccgtctactcccttacgcctgcttggtctgagcccgagtctacctcttctctaagtcgccagctcggcacttgtacccgggacctgtgctcctcccacgtgagtctgcaccatgcgtattcccttcctggcaggtgacccaccttaggcgctggcgctccttccgccccccgggaagcaggaggtgccatcctctccaattcgctctgcagccggactgggaccggagcggcggcctgggccagaatccgcgtgaggagccggcttcaaagagcgccctgtcgccattgaacactccttttcctttggtttagcgtcggagagcggacgccaatttgccaggagagcgcggaaaattcagcttttttttttttttttttttttttttttttccgctagtgcactaggattgcaaacgtcagctctgaaataaaaagcaggatatttctgccccgctcctctattccggaagctgggaggttctgtgggagaaaggacctgcacccaataactcaatttaagatttaaggttttgaggggcgtggggttggaatcgccttggagaaacgggtttgcctgcttacctgagccaaaggaagttgccctcaaaggcaggtcagcaatcataccccgccaaaagcaaatgcacatcaaagtaacttcctttaaatgagattactgtagtttccatgtcttccacattagtaaataaatatttggaagacttcgaatttgtgatttacgtttaaatatatttcaccaacattgtttaattaaaaaaaaatcccatctaagagaaggttcctataggaaattggccctttaactcatacacagattaccctcggcactttcagaaaacaacacagtgaccagtatattctgtctttttgatacagccagaagcaccctgaaagctgagacctaactgtgcttttggaaaataagcttttaggagttgaatgaccttgtctacttcttttagtcagaataatgttggcatgtctattttaggttaaaaaaaaatacaaattctaaaaagtgactttaaaggcccactttgaaagccttagcatttaaactaacattagatttaaaagaagggcttttctcccccattataggaagctgtgtaaaatcatgtgtgaggttgtgagggtcaaatggaagtctaagataaagttctgccaattactggtgtctttaagcttccaccagcagccaagcacagtgcagatcatgagtccttcaaaatacggggtggttttaatgctctaagttggtatgattactttttctaaagagctcaaagtgctttggtgccatagtatgaatttcattacccattgtgagacacaaagggggttagcaatgattctgtttgcaccctggaagccaaaggcaggttactcacccacttagttccctaccacaagaccttgaaagaaactggaaccccaggtctccagcccagagattttgttggaagtttccatttgcaggaaatgactgcagggcacatgtgggaagtgacaggaatttgaggactaacattttagttttcctcatttctttttaaatctgagcaattgttcattgatcgataatctatgttcttacattcagataaata

SEQ ID NO: 317002 - DNA, 4001 bp, Homo sapiens
cctctgcctcccaggttcaagcagttctcctgcctcagcctcatgagtagctgggattacaagtacacgccaccacgctcaactaattttttgtatttttggtagaaatggggtttcaccatgttagccaggctggtcttgaactcctgacctcaggtcatctgcccgcctcggcctccaaaagtgctgggattacaagtgtgagccaccgcatccagcctgcacttgtaattacttaatgtccattttccctactagactgaggtcatggaaccttattttctgtttgtcaccctatccctaatgtctaagcagcagacagtcattatttgttgattgctgtcttcatcagccactcactgggttaaccctcatttaacttcacatcctttgaattattgtttacagcattgcatgtcaactagtgtgtaatggataatgtttcaggccatcaggtatcttctagaaacccctttgttcatctaccaaaggtcaaataaaaggttggattctaggtcctcttctcctccctaagccacacctacacttgtcctaggtaaaaaattacactgaaagtttttttcccttttattgtttttactaaaagatgctttcccgccactccttcagtatcacaggtcaaacgtggtaaaaaatgttttttaaaaaaatttgagacagggtctcactctgtcacccaggctggagtgcagtggggcgtttacagctcactgcagtctccacctcccaggctcaagcaaccccccacctcagcctcccggaaaagatgctttttaaaattactcttggcaataactatggcaatgtagcattggtttctgttgagtataatctttttgtttgttttttgagacggagtctagctctgtcgcccaggctgaagtgcagtggcgccatcttggctcactgcaacctccgccccgcggggttcccgccattctcctgcctcagcctccccaatagctgggactacagacgcccgccaccacgcccggctaatttttttttggtatttttagtagagacggggtttcagtgtgttaggatggtctcgatctcctgacctcgcgatccgcctgccttggactcccaaagtgctgggattacaggcgtgagccaacggcgagtataatctttcaaaccacttttctcattaacagtaagtaggactttctcttaataggtacaagcttcttactcttttaatatatagctaaaacgattgttttttccctatttttaaaatagagggatcaatgaaatcaggttcaggaaaaaattatgagttatccttagggcaaaaatggggatcaatttacaaatggggcagtaactgggactattataacctctaggtctgtttatcatgtgatcatacaacatattaattcatgccctcccatctgcaaaatggcaatactaatttttttttcctccctgctttgcagagatgaggtaaagggtggttgccagcaaaatgcagacacatccacaaattaaaggtaccagaaagtaaaacatagtaaacactgttaccttatttatatcccagagaaccagcttgcttttaagtttagcaaattcataggcagtcagtctcccaattccatgcccagctcctgtaatcagcacgatttcgccggtgactgattttctcctcttaggaataaaaagcttcacgaaggactctagggagcagacgatcagtaacgggagaagcaggaggatgtccagaagaaatttcatcccttttgtggctgcgagcgtttggtgtgtttttttttttttttaccactctaaactgcttttagagggtagctcgatctaacaccagaaagagtaggggcgagagcaaggaggaactcccgtatcaaagaaaaacaactccgaaaccgttccttccgctgggctgggctttgttggtctttcgcaattggctcgggctgcagtgcttgctagctcagagatctgggagggacgaagtccagaccggagcaaagcttcctagttctgctttgcgcagcccccacgcggtgtgtggccgcgattgtcttttacaccactttctcccggtgtcgtgagccggccttggagggttagttgctcacttgttttcctaaattggataagttccaaggataaccgacagtgtccacaggccagatgcttctttcatagttgaaggttgcttatcactagatagggggtgccgctgggcgcggcggctctcgcctgtgatcctggcactttgagaagccctggcgggaggatcgcttgaccccaggagttcgagatcagcctgaacaacatagggagacccccggtctctttttttttttttttaattagccaggcgtagtggcgtgtgcctgtagttccagctactcgagagactgaggcacgggaattgcttgagtccaggaggtggaggctacagtgagtgaagatcgcgccactgcactccagcctggacgaaaaggccagactttgtcctaaaaaacaaaaactagatagaggatgcaaatgtagattcctatcttaaaggatcctgaaaagaccaatcgttctgcttccagctgagaaattgcgctacatcacattttagtttgaactaagcacgatttctggaagacaggggaaattttgtctgttcaaggacagcttcaatcaagcgccagaaaaaattgttatcgtattaaagggattgtttccacaagaaagaagagtatatttgaataatcatttttcacttgacctattagagtttgaaaataaaaaatatatgttgtactttaggaattttatctttattcaagtgaataaatagcaaatcatttagcctaaagattacctatgtaacatttggttttgtagcctatataaatgggtattcagtatatgctaactagtgacttgaaaaaattctagagattggttactggaagaaaagacctaactagggcttgtgtccagtaagagcttaataatggtattgcatgcatttttttccaactcatttttgacagacattggatttgggttttgcgcaagacactccagtgcttgggaagggactttgttgtgtgacaatagtcaactttcatatttaagagccagaaagatcacacaaaaaaatcaaagttcacaaatagttcaaactcgattgtccctcttacttaagcagccatacgttgttataggggatgaagggatagtggcagcctcacaaaagtgaaccccattatagaattctttgaattcagaatatctacaacttttttttggatagcctccaaatccaaatttacaaaacacttgtatagaaagtttacaaagtgttcttccacatatattatttcatttgattttcaaaagcctcctaggaaatagagaaaagtagagtcaggatatatttatacctatactgtaaatgaataaatctgttagatcaactttaaaatctacacagtgagtaaaagtgtaactggggctacacatatgttcagtgtttgtcaattttttggtccaacacctacaggaataaattacatctgacatggtgatctactataagaagtgtttcaactatgttgagtttcatatattgaggctctagctatgctattttttttttttttaaaggagtctccctctgtctccaggctggagtgcagtggcgaaatcttggctcacagcaacctcaacctccacctcccaggttcaagcgattctcctgcctcagcctcccaagtagctgggactacaggcacgcaccaccacacccagctaatttttgtatttttagtagacagggtttccccatgttggctaggatggtctcaatctcgatctcctgttccacccaccttggtcttcccaagtgctgggattacaggcgtgagccatggcacacggtctggctatgctatttcttattccattctattaattaaaaaaaactgggtagttttaacctacag

SEQ ID NO: 317003 - DNA, 4001 bp, Homo sapiens
cctaaaggagatctgagttacattacagccttagagtgaatcattcagtagcttaaatgtttaaccatgaaatttaatgattcaaagagaatttttgaggttgggttacctatttttcttaagtctttttttattttttttgagacagagcctggctctattgcccagcttggagtgcaatgatgccatcatagctcattgcagccttggcttcctgaactgaaacgatcctcccacctcagcctcccgagtagctgggactacgggtgtgcacccccgcacccagctaatttttgtattttttgtagagttgggggttttgctgtgctgcccaggctggtcttgaactcctgggctccagcaatctgcccacctccgtctcccaaagtgctgggattacaggtgtgagccactgcacccgcccttaagtcatttttaatacgacttccttctaatttacttttctcttgtctctggaaattttaaaatttaaaaaaaacttaataaatatagccctttccccaaaaatacacatctggaaagagatttgaaggttagatttcatcaagcccttttcatagatttatacttatttatatttttggacaaatgcctgagaacagcaggcaacaattttctctatttgtaaattcttgctatcttccagaaagttcattcgaatttcttcaaagaccaaaaagatggcaaatcatttttatatacatcaactcctctattatataaatgctcatatctgttaaataaaaatgtagtagcttttttgtatagtattcttcactattcagaaaaaaaacagaaaagaattagttctctaagtgtaagagacattttaggtttcaactaaacatgacagcaaagaacatgagaaagtaataatataatggtaattaaaaccactgtaatttgcagaaaatgtgattctcaaggagtacttcacaatttttccaatcctaaaatcctgtaaacacttctctgcatatattttcatggccttaccagaatttacaagtttagagaaaatgatacaagatttcagttccttcagttttatttggggttgttaatgtagtgtttacaagtaagaacacaggaaaaatactaatgtccaaggaaaagcctgactcactgcgcacatattttatttaacacagttattgtttatcatgtgccacgtatcgtttatcatatgctaagtgctgaaaatattacttatttaatccttttgactacggactggcaaacattttctgtaaagggtcagacagtaaatattttagaactgtgttgcttgtgcatgaggggaggcactaaaggtttctgttgcaagttcttcgtttgacttttgtttgtagctgtaattttcagatcccgttcttgcccatcccctaagttattatccccacttcagagccaagaaaacaggctgagagataatatgtgacttgcctcatttagcagcttggaaggagactggctcctgagtctttctatcaacctgcacaccatgtcataaaaatcgctgcttagttcttaattacattcccttcatctaactaacctgacacatatacagactaagggaccagggaatttatcaaactttgaaaaacaaaaatacaaagataagtagatggtaagtcaaataattcttaaaatacatatcttactctgtgactttaaaaagttggaagatgtatacattaccttattaatatcccacagaaccaatatgctctgtcgttttgcaaattcataagtagtctgcctgcctattccatgcccagctccagtaatgagaacaatctccccagccacagattttctcctctgaggaatgaaaaacttcaccaacgactccaagtaggagtagatgatggtgatcagaagcagaaggatttctaggatgatgttcatggctttgctctgtcctcttccttctggttcagtccttgtgtagtcctagggaggaggtactgtctacacagagctctagggaaggggtgtgcccagttgttaatgggactaccagatggaagccagctttggaagcaggccttgttcacgtgttctaatgggtttgaaacacctcaaatatgaagtgatgccaagtgatgccaagagcacaagagagtgtgctctctggacttgtttatctgaaaagcagttatgtactatatttcaccttgaagtttcacctctagaaacaattctaggggccaggtgcagtggctcacatctgtaatcccagcactttgggaggctgaggcagaggattgcttgagcccaggagttcgagaccagtctgggcaacatagtaagaccctgtctcaaaaaaaaaaaaaaaaactatagaaaaaaattagctggatatggtggcatgtgtctgtagtcccagctacccaggaggctgaggcaggaggattgcttcagtccatgagttcgtggtgcagtgagctgtgattgtgccactgcgctccagcctaagcaacagaacaaggcctggtctaaaaaaaaaagaaaaagaattctggagatactgcatcagctaatgatctgttggtatctttctggaaattgttaccttttttcaatatgaaaaaggagaatgtagagataagcttaaagaaacttagataaagtctgaatgaacccagcttagctatttgattcatttattcacaaaagctcagcatcaatatttcaactggctaattattttacacatgatgaccatttccctgaaaatctcttgagtttgggggagattttaggatacagaaccatcagttccctttgtgataatactggaaagagcattagaccaggagtcgggaatctcaactttaaagtggggtggcttctgtctttgtctgctgctgtaacaaattaccattgaccaggtggtttataaattccagaaacttatttctcacaagaagtccaagatcaaggcgctggcatattctttgtctggtaagagctggcttcctggttgatagatggctgtcatttcactgtcacctcaagtggcagaaggaggaaggaaaccctccgtgttctcttgtataagggcaattattcccatggcagagctctcatgacctaatcacctcccaaaggtctcacttcctaaaaccatcacactgggagataggatttcataatatgaattttgaaggaacacatgcagcctatagcaacttccaatagccaagaagtgggaacaaccccagtgttcatcaacagataaacaaaatatgatatatacatgcaatggaatattactcagccttagaaaggaaggaaattctgacacatactactagatagatgaaccttaatgacattatgctaagtgaaataagccagatgcaaaagtataaatattgtatgactccatttatatgaggtacctagagtagtcaaatacacagagagagacagaaagcagtaaggtggttactaggggatgaggagaaaaggaatggggaattattgtttaatgagtatggagtttcagttaggatgatgaaagctccgcaggtgaatggtggtgatggttatacaacaatgtgaatgtgcttaatgctactgatctgtacattacaaaatagttaaaatggtaaattgtatgttacgtgtgtgtgatttctagcaatcctatttattttctctatgctacagtttccttaactagaaaatagatattttttaaaaaagcacacattacccaacatagaccttcagagcacataacaacctcaaccttccctcatatgccaacacacaaagtggctataaggatcaaataagagaatatgtttatgaaatagttttgcaagtagtgaatggttatataaatcaaatactaattatagtaagaatgcgaatgtgttaatcactatatatcatggactgatttaagggctttacatatcaacttgtttaatcttcacaacatacatttgaagtaggtgcta

SEQ ID NO: 317004 - DNA, 4001 bp, Homo sapiens
ttactgttctggtttctgatcttttaggatatggctttaaggactaaaagaatgtccaccctacctctcagttttttctctataggttgagagtcaatgaagccaaagattgctcccatttttaacccctactctgctgaaggtggagagtggaatttccggtctgtttctggcgaaagccagtatttgttgtggcttaatataaaaccttgtagagacgaattcatcgacttcacagttactgtttcggcctctcactgtgcataaaagccagaaaaagatgtaaaaagtagaagagttcaaacattattgaggattaccttatctatgcccatgtattgaaaatataaacgtccaaaacgtttaaaatttcaatagaagaaacgtgtacatctacgaaaaaaggtataaaaccttctagaatcttcttggaaagaaatcaaagcacagactgcttcaagtgagctactcttcaacatctttttgccatattttaaagctttccatagaatagtaaatgaggcatttaaagaccattggacactgaccttgttttagtatagttaaggtattatattttggaccattcagaacggtcaaattaagatgccaaattacctttccataaaaagtaatataggtttcatacagttggtttcctcataaaattaccagtaacagcagcctataagcagcaactagtttttcatatttcagaattacttcattatattccttgccaacaaacttcccaggccagagaaacaacggaacatgtggaaacatgtttccatgacataacgccgctcctcctaagcctttcattaagcgttcataatagaatcactccacagtcatgtttatacgggacagctgcccccgactccggcaattcactctgcagaaacacgcttttggtccgacccaaccccgccgcattccagcaactgacgtagttaccaatgcacaaggccagtgactcccatcccgaggctctccctatcaatgcaccattgacctggccctgtaaaccggctccattacctgcagttctcaagggcactgggttttgtaaaaccccacatgcctcactccccgcccttaaaaaaaaaaaaaaggctttcggggccagatgaacctgcaattcatctctgacgtgtgcagccgaagctgactttttacttttctgagaaaaagctgtcacccagagggacggggaaaggaaggagggcagctggcgcggggccgataatcccacgtaaacctcgttagaggcaaccggagatctttctcaatattccggacgccaggggctgtcccacagcaacctcttcctcgcaagcaaaagaggcgttgggggacagcggcacgaggcaggggacgtgcgtaggtacagaaaagagagctgcgcaaactagtgcggtccctcgtccttgaaggaaaagaagctttgcggggcgaggaagtccgactgccacccggcggtctctagggactgcggttgacgggttgcacctgtcatctcggggttcggcgcacgttaggggaaaatccgaggaagcgagcagacaggacaaacgttaaggacgggagagaaaaacgtttcttagggtcgaggtgatgctcagcagaggcacttacggggtacacctgtcgctgtactcattggcgatggtctcgatgccgccacttctcgcgacagcaatgtagcagttgagaaagccgaggtcaatgccaaccacagacatcccgccgcgtgatggtcgggctgctggtactgaacccttcggtacgggaaccgtgtcctcttctgggctattgctgctgggattgcgactcctaccagaagcaaacgagaggggaccccaagtcgctaagcagaaaatctagggcagggagtcggaaacccgcggaaggagcagaggccgtcagcgccgcagcctgcaccgcgtcccgcagcctgggtctttccctactgcggttcggccgcctccaaccggcggttactgggacctgcgcctgcgcgctcggctgcccgggaggcgcgcgagcctccgctccgcgcccgagccagctccgggcccggacttcggccgcttccgtcagcactcgggcaacggctgcccaagaagctgcgggttcgagaaagatctggaaaatggaggctgctgagctatccgggggcgggagaagcgggaaggcggggcggggaggatcggggaaaggaggctaggcacattggcttgctcgccctcgctcggcagtaggacgtcgggcggtcgggctaggtgagaggcaggcgaccggccggcccggggctttgcgaacgtgttttgaggcacatttttgggttgttttggcaaccggaggcgtgcttgtcacggcggcaggatgctgtcctggctggcgggcgccgccccctcaccccctgccctcagaagggctcgcccgcaggcctcgcctccccgaggggcccatgtgcagcccggcgccctccccttgtggctggaggcccgccgcgcccggctctgtgaggtggcgcgcattgtccgacgtccgccgctccgccctgtccagccccgggggagctgccgagcccgggacagactcttgtgcgaaagcgggatgagcacatgttaggtttttttcttttttcatcagcaggatttgaaatatcaaaagtcaaacttctgtcaagaaataagatcacactgacaactttccctccacgtacctttcctcacacctttctaaaagatgctggccccgccgctgacccttgtctctggaaaccagttttacaggaaagtgaccttaattaagtgtgccactcacaccagccaagtctgtgctttagcctccagccgctgccctgtggtcctcaaaaaagagcccagtgtggtccagcgccctccctcttggtttgatcggcatgtgttgcctgtctgtaattaaccaagttttatgttacacttaagaaatttggctgtcttgttgcttttcgttcacttttacgtgtgtgccctgttccttctctgccagtccttggtctgttccctgttcctccccgtcctcttcatctagtctctgttccttctcatccaattctttgtgtgttttcctgttccattttggtatccatcttgaaaacaggcgtgtttttttgtttgtttgttttgtttactagattctttagtattctgattatccctagttgtccacttctttaaataacttagattttttactattaataatgttgctacagcagcagcagcagcaagggtggctatagttcctgctgctgttagaatgaacgtgaaatccattttcaagggcaatactgaggcaactggattgtacagtattgcttgggctctggtctctacattgaagaaatcaatcaggcctctcttcccttcatgagcactcaggagacgtggagcccctgggtgaagctgcgctctgagacaccgcagaactcggcgtcccagcgggcagctcgtgagcagaacagggattgggcgttgccctgcgactgaaccctgggccctggtcctgctgggcgcctgtgacttccaccagttctcctcacacacctcttctgacatcggccatcactatctagatttattccagaatatcctgaaattctcctagtacaattaatttatcttaattccattagtttatccatgttgtctatacaacttgagggtgtaagaatgttttttttttttcctattaaaaataccacttaaaatatcaaagtaaaaaggaagttgaggccaggagcaaagtggtgttatcatcacgttccttacaattactggcaggacgtgagagtacccagtggttaaaaccatgacgggctttggggtcacacagatttgggttgtagtaccaggcttgcctaacttactacctgtataacgtttggcaagttacttaatgctccaagccacaggttcagtctgttaaaatgaggacaaatatgccta

SEQ ID NO: 317005 - DNA, 4001 bp, Homo sapiens
gaccacttaggttgttgtgacactacaggggacttatataatgacattaagaatgctaattaaggtacagtgtaaagagatattaggaaagtagaatgaaaagcaatggagactggctttataataaagtcagtgactatgagccagagttctattacagaatccacagatggtgtaaccctgagattagaacattagtgatattgggtagcgaaaaataaaatgaagagaattcacagggaaaatgattgtatctactttgagaagttgaactggtgaagattattcaatatttcaaataatattattcaacaaagttagcctcatctgggactctgatatgcttttataattatgtatatgcaagtgtatccagttcctttgcagatataaaaaagtatagcaggttacttatttctaaattacaaacgtaaataaaagcatttccattggaaaatacaattaccacaagacttacagttacatggcatttttggctgttaattgcagttataaagtaattcattaataggtaatttaaaaatttttttctaatctctctttcctgtcatttgtgatataacattacagtaacatttttcatctaattataataaaatgtcctgctcttaaacagccctacatctctatcatgaaaagcagaacccaagatttatggcatttaccatattatttattcgtttattttgcttcactcaattaaatggaaacttctactataggactaactataaaaattatgtattttgaagtttttctattacctaatatataaatcctactacaactctttttatgatacaaaaggcatgagaattttactgttgttaatgattgtcaattctgttgcaagtacaaaataaaaaagggttctaagaaattggtcttcttttactaacacataaactgatagataaacgaacatagataatcaatatacaattaatggttatgaaaaacatatttcccaagtaacacatcaataaaaatttggaacagtaaactctttcttttctgccataacacaaatgaatgaaaatgagttaaacaaattagtaagattgagatgactaactcttatacagtatatgctttgcattataacagcactgttttaaatgatggaaaggtcaataaaaaagtaataaaatagtttcctattaagaagaaagtaaatttttaaaaataaacctttataataatatatttaccaagagagaatttatcagtatcttcttgtaaaatttgaactcctggtttaagttaaatgtagaattaataattaagaaagtagatattaggtatctagacaaggaaataaaaagagttaattgaggtcccaccatcagagaggatgtaatacattgccatattccacataatttactttgcgtgatgattgctggtgttaattcataggaattgagatctggaagtcatcttcagatcccgagtacaaaattgtacacattacagcatcagggcaaataactaatgcatgcggggcttaaaacctagatgatgggttgataggtgcagcaaaccaccatggcacacgtttaccaatgcaacaaatctgcatgtcctgcacacgtatcccagaacttaaagtaaaataagaaagtaaaataaaataaaataaaatgaatttgtgtgtgagtttttaaaggaaatatttattagataaatcatctatgctaatttgaacagtcctattagaaattatggtattctataggtaatatacaaaaatgtaaattatttatttaggcaaatacgcaattcaagtaaactagatttaaatagataatatacattttcataagtgggttactattgattttagcaaacaaaagcttatgctaatatataatattagattgtacttgaacatattaccttttactcaagaggagagtcaagaagtcagtgaagctgaagtgaagtctcaagagatgtccttttctatatggctgatgtatttaaacacgttgaaatctcccttttgtttttctaaatagcatcaattaggagatcatatgattgagacggaaagtaatgcccaaaatctgtctctacaaattctaaaaataaacttaaccaggtgattttacaatagatcattgtgaagacaaagcaaccggaaagcgaatggacccatcacatgctaatcccagtgttagtctagccctgagtgagtcagacaacggaaaagcacgctggaggaaaccaggcatagaaatgattgcagtgataaagatgtttctgtagaataccatctactacttttcaacaaatatatgtccaagatggaacaacgctatgtcaaaaataatacttaccatgttatcaaaattttacacattctctagtaaatagtgataattggcataataaaattggagtcattctatacttcaaaagttttcctacaaatcattatttatcttgtatttttacctttacattgactttgagtgttttaagtaataaagtgaatgtaaacatttgccaaaattcaatcatcttttggatatcatatgataaaaacattctcatatttaatgtcaaaagattctaggtgcttggtcacatatctctcacataaaactgatttcttatgtttagaaatttgaatttacttccctggagttttctgaggttcatatatatttatagaggccatttgttgaaataactatattagacagaaagagaaaaacagaattttaatttaattcataggcaaacatgtataagcattcacctactctctaccggttggagaatttgatgtgctaagaactgagtattaaaaactcttttctaaagttcagataagttatacagcccagtccattgttcctcagagggtgccacatgcgaccatcatgatcagcatcagctagtagctgttgaaatgcagattcttattctacttttccaaacttactgagtcagaatcttgtggtgtacacctggaaccggaattttaagaacatgtccaggaaactctttgtgtactttaaagatagaaaaactacttaagagatttataaacgcatggtctttagcttgatcccactaattagaaattgtgttttaaatttgtgtctgattcagggaaggaaacaacgcccaccagggcctggtggtggggaagggagggagagcatcagggcaaatagctaatgcatgtggggcttaaaacctagatgatgggttgataggtgcagcaaaccaccatggcacacgtttaccaatgcaacaaatctgcatgttctgcacacgtatcccagaacttaaagtaaaataggaaagtaaaataaaataaaataaaatgaatttgtgtgtgagtttttaaaggaaatatttcttagataaatcatctatgctaatttgaacagtcctattagaaattatggtattctataggtaatatacaaaaatgtaaattatttatttaggcaaatatgtaattcaagtatattagatttaaattgttcttttggcatgaaatttctaagcatcagagatataaggtctcttctctggcacaaaacaaacccattctctttacattctcaatgaaacaaagttacataggattcagtgactatttttttttaataggtacataggctgcattcatcacccaggctggagtgcagtggtgcaatcatagctaactgcagtctggaactacagggctcaagcaaacctcccctcatactcctaagtagctagagacacaggtacgcacgactgcaccagcctaaatttttaattttattttttatagagatgggtttcacaattttgtcaacattgttcttgaacttttgatttcaggtggtcctcgtgcctaagccttccagagtgctgggattacagtcatgagccactgcaccatctcatggttcagtaactactgaactatgtctgatttaaaaaatataccctgctttaattaattacaa

SEQ ID NO: 317006 - DNA, 4001 bp, Homo sapiens
gctctaggaatcttcctgccttggcctttcaaaatgcttggatcttcggtgtgagcccagggcatagcttcattaattgataaataaaggtgagtgctctaatttggaattattaatatgctaaggaaacacacaaatggacatcttaaatagaccaagataatgggagtaagaagataacaaagaaaggcaagcttgagttggattatatggaatgagtaaagggaggtgttgggagactgcaatgaaatacaacagagaggaaagcatgttgaaagttcaaacagtttagcatgtagggaggacaaaactggagaaaagatgaccacttaggttgttgtgacattacaagggatttagataatgacattaagaatgctaattaaagtacagtgtaaagacatatttagaaagtagaatggcaagtaatggggactttctttataataaagtcagtgaatatgagccagatttctattaaagaatagcacagatggtgcaaccttgagattagaacattaatggtattggttagagaaaaataaaatgaagagaagtcacagggaaaatgattgtatctactttgagaagttgaactggtgaagattattcaatatttcaaataatattattcaaagcctcatctgggactctgatatgtttttataattatgcatatgcaagtgaatccagttcttcggctgatataaaaaagtaaagcggattacttatttctaaattacaaacatgtaaataaaagcatttccactggaaaatacaattaccacaaaacttagaattacatggcatttttatttgttagttgctagctataaagtaattcattaatagataatattttaaaaaatttttctaatctctcttacctgtcacttgtgatagaacattacagtaacgtttttcatctaattataataaaaatgtcctactcttaaacagccctacatctctatcacagaaagcagaacccatttgccttattatttcttcattcattttgcttcactcatttaaatggaaacttcttgtataggactaactataaaaattatatatttcttgaagtttttctattacctaatagataaatcaaattatgactctttttatgatataaaaagacaattttaccgttgtttgtgactgtcaattgtgttgcaaatagaaaatcaaaaaaggctgtaagaaagtgcccttcttttactaacagataaaatgataaatgaacatagataatcaatgtataattaatagttttgaaaaacatatttcccgagtaaatcaataataaaaatttggaataataaactgtcttttctgccataacacaaatgaatgaaaatgagttaaataaattagtaagattgagaagactaattgttatacagtatatattttgatttataacagaactgtttttaatgatggaaaggccaatgaaaaagtaataaaatagtttacgactaagaggaaagtaaattaaaaaataaatttttataataatgaatttgcaagacagaatctatcagtatcttgtaaaatgtgaacttctacattaagtttaatataaaagtaataagaaagtagatatcaggtatctaggcaaggaaataaaaagagttcattgaggtcccaccatcagcgaggatgtaatacattgccatattccacattagttactttgcatgatgattgctggtgttaattcataggaattgagatctagaagtcatcttcagatgccaataaatggtaattatttctttataagaaattatcatagataatatacattttcataagtgggttactattgattttagcaaacaaaagcttatgctaatatataatattagattgtacttgaacatgttaccttttactcaagaggagaatccagaagtcagtgaagctgaagtgaagtctcaagagatgtcctttcctagatggctgatgtatttaaacacgttgaaatctcccttttgttttttgaaatctcccttttgtttttcaaaataacatcaattatgagatcatatgatcgagacggaaagtaatgcccaaaatctgtctctacaaattctaaaaataaacttaaccaggtgattctgcaatagatcattgtgaagacaaggcaaccggaaagcgaatggacccatcacatgctaatcccagtgttagtctagccctgagtgagtcagacaacggaaaagcacgctggaggaaaccaggcatagaaatgattgcagtgataaagatgtttctgtagaataccatctactacttttcaacaaatatatgtccaagatggaacaacgctatgtcaaaaataatacttaccatgttatgaaaaattttacacgttctctagtaaatagtgataattggcataataaaattggagtcattctacacttcaaaagttttcctacaaatcatcatttatcttgtatttttacctgcttacattgacttagaatattttaagtaataaaatgaatgtaaacattggccaaaattcagtcatcttttggatgccatatgataaaagtattctcatatttaatgtcaaacgtttctaggtgcttggtcacatatctctcacataaaactgatttcttatgtttagaaatttgaatttacttccctggagttttcaggggcccatatatcttcacagaggtcatttattgaaataagtacactagacagaaagagaaaaatagaattttaattaaattaatagacaaacatgtataaaagatcacctactcactaccggttgtttaattcaatgtgctaagaaccgagtattaaaaactaacttctaagttcagataagttgtacagctcagtccattgttcctcaggatgtcccacatactaccatcacaatcagcatcagctcatacctgttgaaatgcaaattcttagtctacttttccaaaattactgagtcagaatcttggggtgtacacctggaacctgaattttaagaacatgtccagaacattatttgtgtactttagagtttgaaaaactatataacagatttgtaaacgcattgtctttagattgatcccactaatagagattatgtttttaatttgagtctgatacaggaaagggaacaacacacatcagggctggtggctggggagggagggagagcctcagggcaaatagctaatgcatgcggggcttaaaatccagacgacggcttaatagatacagcaaaccaccatagcacacgtttacctgtgcaaaaaacctgcatattctgcacatgtatcctagaacttaaagtaaaataataaaataaaataaaatgaatttgtgtggtttttaaaggaaatatttattaggtaaatgttttatgctaatttgaacagtcccattggaaattatggttattctctaggtaatatacaacaatatatgttattgtacctaatattattaggcacatgtaatttatatataatatataattcacataccagtgtattgccacaactgtgataaggcagtagctattgatatttcccttgtaattgaaaggcatggccttttcaaagaacatgacgcttgcttgtagaggacaagataactgttttacttaattataaaatataaagctatgttctggtccatcagtcttctaaaatggcctattgttcttggagagtgagaccataactcacaaatatataattcaagtaaattatattattattcttgttcttttggcatgaaatttctaaacatcagagatacaaggtctcttctctggggcaaaacaaagccattctctttacattctcaatgaaaaagaattacataggagtcagtgactattttttttatagatacatagtctgcattcatcacccaggcttgagtgcagtggcgcactcatagcttactgaagtctggaactacagcgctcaattgaaccgcccctcagactcctaaatagc

SEQ ID NO: 317007 - DNA, 4001 bp, Homo sapiens
ccttatgagagaggctacaggcagcgttcggccttgtccctgcctgcacttctgccgtgtgaagacgcagcttcctcccttccgcagagtgcagccctcaccagacaaccaagcctgctggcaccttggtcttgaactttccagcctccagagctgcgagaaatacatctctgtcctgtataaactgcccagtctcaggcgttgtaccagcacaaggtggactgggactccccgccaaaccctgcggtggctcttccacataatcctagctaatctcgaatgatgcttcccacacggggctcccaggaaccccagcgtgctgggaggaggtcacgtgttctgccagaaaagaagagctctctgttgaaattctctggggaagccctgggtttcatcaattgaggacactgcaggttttctcagaacctctgatagattgagcctgtgagtctccactacaggaatagagcgctcagttccccaacctttttacaccatgaaaacacttggaattgtgttcagcggaccgcagaaaaaatgaggaagccctctgcaggcttcccaggagccccggcagttggtgctccccatggtgctcctgaggctccacggagcctgttctggcagctactgcatctctccctgccacctgcaagctgatggcacgcaggaccctgactcctatccatgaacctggggcccgtcgcctgtcttcagtgaacccctgtccggccacagcagagtctgctttcctaagaggcaccccaaacagggaaaaaggtacagcaggttttccagcattttcctccacgtacagagtcaacctgcacggtgagatgcaacctagagccgactgcctcaagggaggctgttctagggtctgaccccgacattctctcccccaagcagcctctccctggggcgccctaagcagttcagggacctgcaccctgacccttcccacacagtcctgtggagacatgcacttaaccacagtctccaggaaagaaggcatcacccaagagggcaccccggctggagagttagggcaggaaagagtgcccttcactcaatacccggacagagcaggggtccaaggatcaagggaatgggcacgagacatcagttctgaagagaccagagctggaaacagtcctagatgaggcccctcgggtggccaggagaccaccgggtttcccttttgactctaattctgtgaccttggggacagcggtttacctttccgggcctcagtttcttcatctgaaagaccagagggctggtgggatgatttctgaagggccacccggtggtgcccagggaagggcgacctcgagctcggccctaactcccggccttagtttccccaagagaaagaagcttcacttcctccctggcccccgagcgcttacccaacgggcaggcgcccttctgcagctggcgcacgggcgtcccggagagctgcagcgcgcggcggctggccgcctgcagcgcgcacacgttggcataggtgtgcccgtcggtgccacacacggcgtgcgaccagcggcagcggcataggccgcgcacgcactccaggctctcgccgcaaggcgagtccagagggccgccacagggctcgccctcgctggcggcgcacaccaggcagcagttgcagaggtcgggcacgtagccgccggggcagcgggggctgggacaccgcgacacgtcgcagcgcgcgggacacggcgccgcagggggctcccgggccagcgccagcgcggccaacgcggccaggagcagcgctcgcgcctgcatggcggcagggccggcggcgggtggcagcgcgggagaccgggcgggggccggcggggacaacgaggccgctgcggggccgggcgccgggcgcctacggatgggactggggcggacgcgcggtcacatgcgccggtggctcaggctggcgggcgtcagggcggcaggggcatccccagggcgcagggagcgcagggaccagctccctccagcctgacggtccgcgggcggcgggtcccgcgcctttaaaggcgaccgcccagcccgccctcgctggaaggggcggcccggcccctccgccagccccgcccaggccccgacagggccccgcctggccttccgggcctggacccacccggcaggccttgggactctggtcggcctggtcgagaaaacccgaggctacagacacgcaggggtcctttctggtggggacccccgggcccagcctatcccagaaacgttgggggatgcgttctccccgctctggaggggtctgtccgtgtccagtctcctctgtgcctcagtttcctcctccaggaaaggggaattgacagcatttctcaacctcatagggtcgttggaagaaccacagaggccatggctgagcagtgttcccgagtcctcgctgtccacggaaccggaagctgtttccattctcatcattgctcctgcattttctgcagggccccttcagacccaggtcccatcacgagagtcagaatctggtgacagtgcgtcagctgatggggtgaaggctgcggagttgtgagagaaggcagaaccccccttggaggtgaatgtcaagcctgaagaggaaggatgggaagcgggagctggccgtgacctgggcagaggctcccaagcaaaagcaggtcggggcagcaggagataacgccgcgcgcacagcctggagctgcggtcttcacactgtgtgtgttcctagtaccctgggctgcctggcgaagcctgggtgtccttttcagaacgatgtcgtcaagtagatttaaacgcataaaacaaagaccatggggtcacaaaggggaacaattctatcaaaacacagttatcaaaatacatgaaacaattcatgacagcgtggcctatgggcttctttatcagcatgttaatggcaggttctggtcggtctgtcgtctgataccagtggacacttcgcagcagccctgtgcagagggctgccactggagacaccttcggtgagggcggtaacatggggatgtaaacactgcttctgctggccgtggagccacaggccctgctggctggggtcaactgcacccccaaaggaatgaatgctggacttcagttggagttgttggggtaaataaagacgtttttccatccaggttcacagatacccaagttaagaatggggaggggtacctctggtccagaggagggagggggagctggaggttaaagggcctcggggaatgggaaggtggaggggcctgatccctgagggccctgggtcctcaaaggcctggggaggcgttgagtagggagcggccccatcagacaagatgtctggggaggatgaggtgggaggaggcggggcgccaagtgtgagcccccataggacccagagagagtgaaaggttgaagggtcccaggggacggggagagaagggacctggagcttctccccctaaaaggccctttgacaaggggcaatagcacctgcgtttctgcctctacaaacctcaagtgcactttactttgaagatgtggagaatttcaggccattttttggaatgacccagaatgctaggagttggggacctcagggctgggctgaacctccctcaaccttggccagggctcccggttcatgtctctgcagggtgggcttgcctaaggcgcaaggagaatttttcacgtgcccaggatgcctgcccctcgagtaagccttggtgggctactgtggcccagagctggctttttggggggcctgtgttttcctgcagacacctggccctgaagatcaacacttttccatccctggatccttcagtgcgcagaaaactaagtccctgggaagggcccaagagctcatttcccctaagcttttcctctacaatggggaaactgagtctctgagagagtccaggaccggcgctgcagcaggtcagagtttgcacagcctgccacagcttccaaggaaccacagctaccgatgtgtaggc

SEQ ID NO: 317008 - DNA, 4001 bp, Homo sapiens
ttagaataatttattcctaaattttattccaacaaataagctaacactgctctccgaatcattttctaattaaactttgaagacgagacaaggatcataacagaaacaaagaacaagaaatattactaaaaattaatcagtcttaacagagatattcttaccaaatgccatctgggacacatccagatcggaaatagaatactgagaggtaagagaaaggcctgaactgcaccagagtacttcctaactcctactgtacactcgacacacagacttccagggaaagtcctggggttccgctagatgttttaatggtctctcttttcctgtttcaaaaattctccccaagaacaagcaacagaaacccctagcttccaaaaagtaacaagctgtcagcaatgaagcaaacagaaaccctttcactggcacatctgagatgcccacggagtctgcggaccccccgtattctggcaagcctgactggaatactggtaaaatgtacacctcattcatccctcggcaattaacctccccatcagcaacgtgttggttttattcccaacacacataggcaaaaaacttcaatcaactcttcctaatatttaagataatttcattaatcaccacgtaagttcaccactttacttggcaaccacaactcattcaaacgcctgcagaccaacttaggcttagatgagcagatctcttaggtggtgcttaaaatcgtgttactaccaccgtgatcatgaactaaatgaaatgtcctgacaatgtaggaagagcctcaaatctcaggctgttttaagtgccactaggaaaagaaatctcccattggacgcgccctcactccccgccccccccctgccccgccactcccgccgaggcgtcctaaaagcattatgtcatccactgcccccacatctctccagctccaaaccccgcctcctctcgaagtgtcccgcgcccccagccctcttccctctcagactagaagagggaagtggcactgagcaaatctcggctcctccaagttctcttcacaacgcagttaaaagaacccccgccctggtttctcgcaaataaaaagaaacaagttctcgccccaactcttcgcatcctgcgaagggcgagagggctgaggccgtgactcccctcggtgaattcaggacaggccccaacaaggctctgcctcccctcgcgagaggacaagggaagacccaagtgagggagcggggctgaagtgggggaaggcctcgccccaggagggggcgggtgtccctcatgggctctgggttgctgggtcactctgtctctgcggggccgggggttcgtgtcgccggcccgcaggctgcagggttaccgccatccccgccgtagcctgggacccgccgggacagggagctgcagcgggcccaaactcacggtcggtgcagcggctcctcagccacagccgggccgggtggcggcgggggcggcggcgggggcggctgcggctgaggcagcagcggctgtgcctgcggcggcggctgaggaagctgaggaggcggcggcggcggcggcggcggtggcggctgttgctgctgctgctgctgctgctgctgctgctgctgctgctgctgctgctgctgctgctggaaggacttgagggactcgaaggccttcatcagcttttccagggtcgccatggcggtctcccgcccggcacggcagtccccggaggcctcgggccgactcgcggcgccgctcagcaccggggcaatgaatggggctctgggccgcaggtaaaagcagaacctgagcggccgtccatcttggacccgtcccggcagcccccacggcgccttgcgtcccagacgctgcgccggcggaggcggggccgcgccggcggaggcggggccacgccggccagcatgattgacagccctagcctgcggactctgccaatggctggccagggaaccagcccgcccctgcccccgcaggttctgcctcacacagcaaggccgctgacagcgcagcgccccacccgggcgaaggcgcggggctcaacggagaggggacggggcgtggtgagactgtaatggggtgaggcgaagctgtgtgtgaagtgtcgcggcgaggcgggacgaggaagggacggggcgggactgcatggtaagggaggcgtggcgatgcggggggcgtggcgatgcggggggcgtggtgaggtaggggcgtggcgaggccggggcggggcacagcagggaggccgcctgaggggcggggcgagacgggggcggggcggggcgatgctggggacggggacattaggcaggccggctgaggggcggggcggctgaggggcggagcgggataggggaggggactggccggtgaggggtggggaggctgggggcggggcaggaaggtgagaggtggggcgagggaggggtggggcgcggaggggcagggccatggaggggctcgcccatgaaggacggggccatggacggggcggggccgtggagggggcgccgagcgcgggcgcaggcccatgcggaaaggatcccccgccgacgcctggagcggggcgacagccggccgtggactctgagccgaggtggccttggggtttgccctcccgccacactggcccgtggccagagccatactcacccggacagccctgcggggagccagctgcggggctctctgcacggggagagggtgggcgagctcctgcgcagagcgcagagaatgcgcgtggtcggcacgacctgaggaccccaagtgtgacccccaccccacccccagtgagctggagaggcccctgcagggcggtgtccacaggcctggcgccccccatcggtcccagcgcagcgccccggaagggaggagagggtctggggcaggcctgggtggtcagcgcctgctgcccacagaggcactgtgattagtgcagcgagaagcagctatggccacaagatgccgcccacaggaatgagtcccgacctgggggcgtttctttatgggagtgcacccctgctctgaccttccggcaggacccccaaggggcgtcattcagcagcagctcagcagaggtctgtggggcaccccctcacgcctgggacacaggccgtggcgggcagggtcctggtctccagagcctcctgccttttgggtggtagaggggcaaacggagagggcagctgtccagcctgcccagcagggagtaaggttggcctcagagacaaccgcccagccggggggtgatgcaggcagagaggagcccagtaaagcctactttagccaggccacacctgcaacccagagtcccctgctctgtggccacaaacagcacctccgccttgtctcagagcctgtcctaaagggaaacccagcattgtccccagtggggtagcagtagcctcccttttcttgagaaggacagcagagaaacagctgttagttcccagttcttgggaggctgatgtgggaggatcacctgaacccaggaatttgaggctgcaagtgagctaggattgcaccactgcactccagcttgggtgatagagcgacactgtctctaaaaaaattaagttccagcgaggtgcggtggctcacgcctgtaatcccagcactttgggaggccaaggcaggcagatcaccagaggtcaggagttcgagaccagcctggccaacatggcgaaaccctgtctctactaaaaatacaaaaattagccgggtgtagtggtgcatgcctgtagtcccagctattccggaggctgaggcagaattgcttgaacctgggaggtggaggttgcagtgagccaagatcatgccattgcactccagcctgggtgacaagagtgagactctgtctcaaaaataaataaataaataaagttcccagttctctgctgttaataagggcctttgtccactgtgtcaggcctcaaggttgttagttacctcagtgggcagactcataagatggccccagcacccctcacctcctggta

SEQ ID NO: 317009 - DNA, 4001 bp, Homo sapiens
cttggaataattggtgtgtgtgtgtgtgtatatgcgtgtgtgtgtgtgtgtgtgtgtgtgtgtgtgtgtatgggtgggtggatgagagacagagacagagagacagagaggatccataatatatgaaatatcacactgacatcatgtagcacgcaacagcaactccgctaaggatgcttccatgaggagttcttcagagtttcgccttgagatatcgggggcagatttcctcaaattaatttgctctccagctccatttaagctttccatctgctagtgtatgagactgtactgggatggattaggggctctccagggttagggtgacagacatggatgaaaatttcaattctatggaacaatcgaagatgcagctctcaaagtgggaatagggcctgaataatcttggggattgcagccataaaaagagcctcagttccacataaattcctcatgagtaaaaggagatagtgaaatgctatcctatcttaattttattctatttaataaaattgtatttaaaattatatcataatagaagttgggcaagcttagctgaaagcctactaacactcagccatttacatttacatacacatttaactgttagcaccttctcatacacagtcacagctttggcaatattttggaagcaaaatgtagtggtgatggcaatttcccatgaatacattttgaaaataatacttaaaatgtgcaaaccaatgtcatatattgaaacctgctggtaaattgtgtattgtgtcatcatcagccaagatttattgcatccttactgagtatctgacactaagtcctggagatactgtcttgggtcctaagtcacactctttttgtgtgtcagagtgagtctttgggttttggtgcccagacagtttctcacagtcctatcttagtaaaaggtcttgatggccccttgggaataaacaggctttgctcctgaaggagcccatctttttaagcagcactgatttctatcggggtggtctaaataatgctttgaactttgccagccgtgaccaagcccatcagcaaaacagaaagattattgctttgccactttgtgagaagggtcggaatatttataatattttaaagagctaaaagcttagatacatagaattatagaaatagttttgattacacaaatttctcataacaataaaaataaccagatgaaaagatggcataaataataataataacaatacaaagaaccaagtagttcttgtagtcaggattggctgcctatataaatctaattttatttactttgtgagtcaacaaaaagccaagacctctatagtgaccactactaacccagacaacaattcaaacattcttaaaggagaattttgaggatttaatttcaagttttattgggaagggtatgataaactaccaagagtatttatttctctagttagtacaatatattttctgttctgactttagagctataggaaacatcaaaacctaatgtttaatatgttgaaaagacaacatatgtacttgaagtacagactaggtataatttgtagagaaatatgcatatatctagccagatttgcaaatgcaaaatagtatttcaatcaggttatcttgaatgcatcagaatgagaaaacaaacagttaagctatgatttgcagagaatgaaagtaagaagcataatgtagtttatgtgcatagtattaagaacttatttacatgcttaggttaataagtttagccttttggaaagaatttaaaatctgaagtgccagtttaatgataaataattattaaaccatgtacaatgcaataacatcatttaaatgaaaaattcaaagccaagttcagagatgtaaactatggagtgtctaattttatgataatgaagttgttctattaaatcttaccctctggcagtcctggagtgaggaagcaggctcaaggcagtgagtggcacagattgagtatttcctctgccctctcactcactcattcacttgctcttgctggctataaactcttctttgccttccaacagccaatcactgtcacgaccaaggtgatgtcagaacgtggattctcaccagaaaacccccaaacttcaacactttttcaagacacaggctcagttgaataaacaagaaacgtgattctagagccaagaggtttgcattgtggaatttaattgaaggtttagatgaagatgaatagtttgggctccgaatatgtataataatatactggatttgaattaaaataaataacaaaggctttaaccttttaaaaatttcataattatacaagttttcactatgtcgaaagaaaggaaagcttgctgtcattagatataattttacattagtttagctaaaaaaagaaagaaaaactaaataataagggaaaggagcagatgaaccatcaatattttaatatcatttgatgtttcctcctgaaatatacttcattgactcataaattaaagttgatatgattaagtcggtcagactttgtaagatatagttgctaaaacatgatgctgagtataaaagttagaacttttgagaatcataccactgagaggcagattttatattttgttttgtaaattaaatctctgtatattgtccatttatgtggcccttcctgtcgtgcatgtgaggtcagctcatttttttcttgggcttctatatatatcttttctattcattttcatatttaatttttttcctatgagaataacaaaatgactagagctagcaggagtgatccattgtttttgaaatgattcatgaaaccaacaccacaaagaatggattgataaactaaagtactaattttttaatttacaaagggaaatctagcttaatagtttgcatattctcctagtctagtcattttattcttcctccagttgcgaagtctgcttgagaaatcaaaaattaatgaatatcattttttttctttttttctcttaattttttttattattatactttaagttttagggtacatgtgcacattgtgcaggttagttacatacgtatacatgtgccatgctggtgtgctgcacccactaactcatcatctagcattaggtatatctcccaatgctatccctccccactccccccaccccacaacagtccccagagtgtgatgttccccttcctgtgtccatgtgatctcattgttcaattcccacctatgagtgagaatatgtggtgtttggttttttgttcttgtgatagtttactgagaatgatggtttccaatttcatacatgtccccacaaaggacatgaactcatcattttttatggctgcatagtattccatggtgtatatgtgccacattttcttaatccaatctatcattgttggacatttgggttggttccaagtctttgctattgtgaataatgccgcaataaacatacgtgtgcatgtgtctttatagcagcatgatttatagtcctttgggtatatacccagtaatgggattgctgggtcaaatggtatttctagttctagatccctgaggaattgccacactgacttccacaatggttgaactagtttacagtcccaccaacagcgtaaaagtgttcctatttctccacatcctctccagcacctgttgtttcctgactttttaatgattgccattctaactggtgtgagatggtatctcatagtggttttgatttgcatttctctgatggccagtgatggtgagcattttttcatgtgttttttggctgcataaatgtcttcttttgagaagggtctgttcaagtcctttgcccactttttgatggggttgtttgtttttttcttgtaaatttgtttgagttcattgtagattctggatattagccctttgtcagatgagtaggttgcgaaaattttctcccattttgtaggttgcctgttcactctgatggtagtttcttttgctgtgcagaagctctttagtttaattagatcccatt

SEQ ID NO: 317010 - DNA, 4001 bp, Homo sapiens
tgctgcagcccgcctgtgagagacattctgagcagaggaggcttcctcggggagggccccggggacacggctgaggaggagcagctgttcctcagtgtgcacgatgccgtgcagacagcacgagcccgccacagggagctggaggccaccgatgcccatctgtagcagggccaggcctgcccagcagcctctgctccctcctggggacccacagcagacgtctgcaagccactgctgagacccttcccagggaggagccacccaagagctgcactcttgtgccacagctgccctggggaaaccggggaaccccaactgggaaaggaggccctctgatcacacgcaggacccaaacactcagaaatcaagaacctctgcctccgagacaggctggcccacagtgctggctgggccccaatgcaccgtccctcagctcaggagggatgggcctgacctgacgctcagggttgacatcttatttgaacaagggtcccccgccatcatgcagcctccaaggtgccaagaggactccctatgcccaggcctgcccggtgcccaccctgctggtaggagccagcggctctggccaagtgcacgagggtctctgtgtttccagaaggccccacacacccaagtgcccctcacacctcgtgcctccccctcacagggtggccacctgcaccagcgtcagggcccagggtgctgtgaccgatgagacctcagctcagccctcaggtgcagtggccctacccagcctggccagcagacacacacagggatgctcacgggtgcaccaggagccaggtgcggcgcagccaaccctgagcctgcagggagacctgcaggaagcccaccgtgccccatgcaggggctccctccagcacacagccctcaccccagcacagccagcaaggacacgctctccccaacagggtgcttcggcgggaggtgggggaacaaggggtcttccgagcagcccccagccctcccctcccatctgtgcctctgtaaggggctctgggacgcccagaccctgcccgccgcccacctggtggtgacaagctccagcagccagtgggtccggacctgcttgatgccgcggtgagggacggcgcccacataggcgaggttgagctgctggtcccagctgaggacgtactggtcagcctggctgtgtggcagcggggggctggggacaacaaaggggcggctcagtcccgagcctcagcatggctggcagcgcggctgacacacacgttcaagcccaggactgcccgggcgcaggatccaggcgctgcccgtgcgttcagtgactaataaaatgacccttagggccaggaatgtggggaggtcccatcttcatggggaacggcagcagcagtaagacgaggggccaacgccagccctggccctggccctgccaggaaggcgggtacctcagctctaggtggaaggaatgggacaggcaggccaggtcccgctgcagggccgtccactcccaggggagactcctggtttacctcaaagagcaggatcccgggcatcggcctgggctgcagggggcggcccaggctcacgccccggcgcccactcaggtggaggacccacccacaaacacggcggggggcgggcccgggagagccagggccccagaggagggagctccggtctctgaagctctcacagtgcgcagtcagggggcgcccgagctctccccgtgcggccagggggtcccggaggccgcggagcgctcaccagaagcctgtgctcctccagaagcgccgcaggggccacagcgcgcgggccgcgtccacatgcaccaggtgcggggcctcggccggggccaccgggggcgcggccaggagcgaggccaggagcgccagcagcgcggcgcgggggcgcaggggacgcatggccacgcgtgctcggggactgcggggcttcgggctgcactgccggttccgcctccgggtcggagtctgggcgcgcaccccatgtgaccgccgccgcggggcggggccttggtgagggggcgatggccgggtgggaggggttgggtggcctcggggagcctcggggagccgggagcacggcagggcttggagccccgcttccttgcgggcctcaggggctgctctgaggaccgatgactcggaaagcgctcagaagaacgcttcgcccgttggtgctatgtgagttgagccattactgtcttgtttttctctgtttttgtgtgtttttgagacagagtcttgctttgtcgcccaggctgaggtgcagtggcgcgatctcagctcactgcaacctccatctccggggcttcagcgattttctcaccccagcctcctgagtaaagcgtgcgctttagcaggaaggagaattaccccagaagagcacactgggccctccttacacttggcttcagatccatggattcaaccaagcagactgaaaatattgttttaaagccaaagcaatacgaaataatacatattttaaaacaatacagtataacagctatttacagagcatttacattgttttagggactataagtaatcttgatttaaactacacagtaggatgtgcgtaggtaatgtgcaaatactgtgccattttatatcaagtacttgagcacctgcaaattttggtatctgggagggtcctggaaccaataccccgaggataccatgggacaactgtagtacatgtgtagtccatgtatgcatgtgtgaatccaagcaaacattgtataaaaataataatggaaagaacaggcttggtgcggtggctcacacctgcaatcccagcactttggaattgcaggccaacacgggaggatcacttgaggcctggagtttgaaatcggcctgggagatgtaccaagaccccatctgtacaaaaaaaaaatttagccagatgcgatggtatatgcctgtgaggcccagctacccacgaaattgaggtgggagattgcttgagcttaggagttcaaggctgagacgggccatgatcacaccactacattccagcctggttgacaaaatgagaccccatctctaaaaaaagaaaagaaaaaaagaacagtctactaacaaaacgaaaatactggacaataatcctctctaagttgggagaaggataattagagttacagtgttctgggtctttttattttggggagaggggttaaaatattgcttaacattaggtcttcttatgttgaaattgcattaaaagtgattagccatttaaaagtgaaatagtgtgtatatattccaaattagcaaggaggaaaaacataatacaaaaaaattcattaagaaactaaaaagtaagaaagggagggaaaggcgagagaaaccatgcaagtacagaactgtctccaggaacagcggggtaagaccctcagtccaacgaccccagagaaaacaactaaaatgatggataactcgctttaaaaacaattcctcaaagcgtcagagaactgagaaaaacagtaagaaaccaccagtcccacaccgtggtgcaggacacagcaatggaaactgaattgtttcagaccagccgcctcctgagagcaaccatcagaactggagagcgctgaacggaaccgtccagggcactgggagctctgaggagcctctgaggcctcggggctctgcagggacaagccgggagggggcggggcccgctttggggcggcgactccacacccctgcagcgtatcccagccacacaagacatggcgacacgctgctgcgttcgttcctcacactgtggccacaggacagaagtcgaggctcaggcggggggcctggtaaagactttgggtttttcttgggaccccaaagttctatcccctaaaagcaaaggtaaaccagcaacagaattgtctttgtggggactgaagccagccttaaatcacctcaagccctgagagaattaaggtgagccgctcaccgggacacctgtggacagaaaagtacaccttccctgga

SEQ ID NO: 317011 - DNA, 4001 bp, Homo sapiens
ttctaccttggctaagatcaggagctgccaacattgaatgtctgactttcccttgaaaatactgccaatggaaaatgttatttcaggcattagagttaaaatttctatgtgtgtgtgtatgtgcgtgtatttgcaagtccagactttattttcttctttctttcttttttttttgagatggggtctctgtctgtcacccaggctggagtgctgtcatgtgatctcggctcactgcaacctccgcctcccagattcaagcgattctcctgcctcagcctcctgagtagctgtgattacaggcatgcaccaccatgcccagctaatgtatatatatatattttttattagagatggggtttcaccgtgttggtcaggctgatctcgaactcctgacctcgtgatctgcccatcttggcctcccaaagtgctgggattacagacgtgagccaacccacccggcctatttccttatttcatttacagcaagcttggacttgtttggaataaaataaacaatcaaacataatctcaaagacatttctgctgaacagtgtatcctggggacaaattatgcaaaacaatacaaatcaaagaaataggaaggaaaaacaaaatggtcagaaggttgacaacaaagtgcatcacaaaaacagtcttcaaagagtttgtattttatttttgcccacaaataattagctagttagattactgtttgagaacctataatttttagaaagtggactattttcttcaatactaagaaatcagggctgtgcacggtggtttatgcctgtaatcccagcaggccgggattacttgagctcaggagttcgagaccagcctaggcaacatagtgaaactccgtcgctataaaacaaaacaaaacaaaacaaaaaaccaaaaattggccaggcgtggtggcacaggcttatagtcccagctacttgggaggctgaggcaggaggatcgcttgaggcagaggttgcagtgggccaagatcgtgccactgccctccaccctgggcgacagagcaagatcctatcttttaaaaaaaaaagtctgtctggaagtccttactttatatttaattgtcaaactcctttcccccatctcttgacttcacctctctctacatccccaagccaagaatgatgagaaatggacagatgttagcacgagttgggtgcgctttgggcatggggaagtctgaggtctcggaaaatcttttctacatatacacccggccctcactttctggacgcacgcagcaaactctcaaaataaaaccaccaaaaaggagaagggggggcgtcgcccaccgctcctggcattccgcggctgccaactctttccctcccatctggctcctgggatgcccgcgggggaatcgcagtgagcagcgcggggcgaggccgccgcggacgccccgtcggatgtgcccttcgctgggccgagcggcgcagggttggagagggaagcgctcgtgcccaccttgctcgcaggtgcccttgctgacctgggtgatggccttctccccgcggctctcggccctctggctggcggcgcgcagctggcagccgctcgggtaggtggtgccgtcgctgccgcacaccgggtagcggctcttgcacacgcacacgccgcttacacccggaccgccggctgctgccccggctttacccttccgcctcttgcggctcttcacgcactccatgcccggcgcgcagtaccccctgccggcgccgccacccccgcacggctcgccctcgccgcgggcgcacatagggcagcagccgcacgcgtcgcgggtctcgcccagcaggcagcccagcgggggcaggggcgggcaggaggccggctcgcaggggccgcaggtgtccgaagaggaggaagaggagaggggcaggagcaggagcagcagcccagcggcgccgaggagcagggcgcgcagcgacggccgctccatggcggggtgcggtggcagcggcaagggcgcgagtgagccgtgtcgggccggccggcgccttaaacccgccgccccgcccggcctgtccgcgggaaccacaccccggggcggtgagagcacgggggccccgcccgtgccgccctcccggccccgcggggcctgcgcgcgcgctcctgctggcgtcggggggtgagcgggcacccggcgtgaccggcccatgggcgctcggtctcacgcccgcttcgcagagctcaccccgccagctcctgctcggtccccagtcccctgccccgagccctcagggatcgcaccgcagtgcgagcggctcttccaccctctggtttctccccgtttccggtcaatatatttaaacttcttaacaaccacggcttcgagacgatccagggtttcatctattaaatcctccgtgggcctgagacacctgagtgctcattactctgtggtttgggaagctctcttaagaacaagctgttaaaaacccccacttgtggactgtgtccccgctggccacaggcctgctgtggtcttgggtgtcaagcactaaaaggacaaaccgttgccaaccacttccctttctggaacctcttaactgcctgcacctccctccccgctttgtctcccagtggcattcaacaagactctgtgctttttttgtgctgagccgttttcagtgagtactggaatccgtgtgagagctgtgcccttgttttgagttcttgctgaactgctcgccctccagcaagcctctcgggagaacagagcgcagctgagaggagcaggggtcccagctccttcctcgttggagctgccacggaggcacctaaagcgcccccagtcttcaccagcattccaggaggtttttgatataaacggtggactcttcctcagtctttctgcgaagtgctctgcaaactcaacttgaaagcctctcttcccaggaacactggcctctccaatgcagacatggaagttgctttcactttttaactgaatgtgtaacattgcagcgtgcattattctgcatgtcacattgtggttcttttgtgttcttttttcttagcataaatccagggatttacagggttgctgactgaaagccagcagttcagttcataatcccattagcagtgtaaagaactcattctcaacagactcttacaaggataattattgcaaattttttgaaaattaaatgaccacaaaatcggggggtggagagtggggaaacatcctccaatccagaaaaacctagcactgctttttggcctctccttagtgtattatagacaagtggagcattttttttcccctcaaaggtcatatgttgacctgacagttgtttaaaaaacaatgaaaaatctttacagcagagtttccctaaatatttttgtctttgttccatcctaagagatgcagtttacatgacccatttgttttcttgaaaaggaaacaaatgcagagtgcactctatttcctattgtatttaatttctttctttctttcttttcttttctttctttttcttttttttatttttttgagatgaagtctccctgtgtcgcctagtctggagtgcagtggtgagattttggctcactgcaacctctgcctcccagcttcaaacaatccttctgcctcagcctcccgagtagctggtattacaggcatgcaccaacatgcccggctaatttttgtatttttactagagacagggtttcaccatgttgcccaggctggtctcaaactcctgacctcaagtgatccacctgcctcggcctccgaaagtgttgggattacaggtgtgagccactatgcccggccctgatttcctttttattaattcactggtcaagagccactaaattggttccatgatctagtatgacgatctgtcatagttttagattctccagaagctttctctgagacaaggattccagtgcaagtaggtcacctgagaagccacatcaggacacagagattgagggttggggcaggcaggtgagcaagcagg

SEQ ID NO: 317012 - DNA, 4001 bp, Homo sapiens
tgaaataactcattaacatctgaaagaggtaaaatgacttaaatgatgtcctctttcctacttgtgtatccatgactcttaaaagttttttctcaatgaaatataaatgagcacataatgcctgaccaaaaatatagattgttgaggagtgacttgactattaagtcttaaatagaaaatgtctatattctattacggcatatgattacttccttaccagaaacctgggaagttaatatagaaaaatattaggcagcctaatatctatcagaaatacatagctgtcagaaaagttacaaatactttcaattcaccaagacttagagtctagcatttgctctcaccaacaggcagtatttttcctaacaaacctgttattagggactgtgccttactttattccaagagcatctgacacatagtaggtgttcaataaatatttgttaaatttaattcacttcaaacaaataagaaaatagatttaacaacatatgctagatatgaccataatgagtttactaaaaagtgattgccttacacaaggcagaataggatagtaggagtgcgggctatagggtcagattgcctgggttctgcttacactcttgcttgctgtatgactttggtaagttacttcacctctgtaagtctcaactggctcaactgtatgtcagaagtaataatagtatttattctcatatggttactgagagaattaaatggaatattatatgtaaaggaattagcatgatacctagaatatcatattcagtaagtgatagctgttttatatacagatggtccccaacttaccatggttctacttatgatttttctactttatgatgctgtgaaagtgatatgtattcagtatgctcctcagctacaatggggctacctccctataaagtcactgtaagctgaaagtatgatattttcaactttcaactttatagggtttatagggaagtagccccattatatatatcatatatttttagatatgtatatatacttacattgtacatgctttactaatattttatattttaaatcattagaaagttattcttaatgctaaattagtataaaatatatatataaggcctattcttaatcacatttctgtcattattcatcttgaaataagaaccacagactcagtgataggaacaatccagacaaattttagtgtgtccttctaaatgaaaattatttaatactgtacctctaaattcagaatgtattccattttctgaagttgtttgaaagatcagtaaacaaaataacaaaagttcagtcatcaatttataggcaacctgtataacattaaacattgttaaagggtcataataaatctgtgggatcagatccaggaaagctgttaaaaccaataccagcctctttggggaaataaaatcccaatgcattccatgttgtacttacagtaattattatttcatttctccagaatattaatttaagagactcaagggaaggattatagatttttaagattcaatatggacattcatataagcaggactatctgtagttagctaatttcttattctctagtttgtagtaggcaaacaagtaagtaagataagagaaaaaagaataaaaagagtcttatctatgtaaagacaactgccatagaaagatgaaagcatgttaggaaaaagtagctggctaactggccaaccaaagcataggcataaatgtttaaaactgaaaaacagatctgtcctatatttttcctttgatctgggatcattttctaaatatcacatacctttcacatgaacagccttaataaaaaccgccaggactccccagaaaagcaaatggttcttcatcttgacttcacttcttctgaaaaactggagcaaaaaaagtcagggttaaggtgtgtgatctataaggagtgtgcaaatgatggtgcttctgctttcttaaaataacactccaggcagctaacaaactaaaaacaatcacaactgtggttgaagtctgaagtttaaatgctgaactggaaaaatgtatgactcacatttaagtattttcttgcaaagcatccaaataaaaaccataatttgatacaatcatttttattttgcatttacactatataaatgtttaaaccagaagactaataataatttcaaggaaggattccattaagaatgttgaaatagggattttccattttattacctagatatattcatattagtcttcaaatcagacatctgacacttgtcatgcctagaataataaatgaaggtaagtgaaggaggagagatgaaggaaggggagagaaatgaaagtcctttaaggtcccaagtgtatcttatgttaattttttatactagtccttaattaaccaagctaccagatttaaatatatattttgtatatatctcacaaaatatgtattttgtatatatctcacaaaatctgtattttgtatatatctcacaaaatctgtattttgtatatatctcacaaaatctgtattttgtatatatctcacaaaatctgtattttgtatatatctcacaaaatctgtattttgtatatatctcacaaaatctgtattttgtatatatctcacaaaatctgtattttgtatatatcttacaaaatatattttgattactttcagttattttataagctcaaacatggaattggaattagaagctggtagatacttggctgggcgcagtgcctcacacctgtaaaccctgcactctgggaggccgaggcaggtggatcacttggggtcaggaattcaagaccagcctggccaacatggtgaaaccccgtctctactaaaaatacaaaaatgagctggacatggtgagggcctgtaatcccagctatgcgggaggctggggcaggagaatcgcttgaatcttggatgcaagaggctgcagtaagccgagatggcaccactgcactctagcctgggtgacagagggagactctatctcgaaaaaaaaaaaaaaaaaaaaagaagcgggtatataccagataaataagttgccatattttaatttgatagcattaagacggaccttctgtctagttacacctttcagaattgcaaacccataagatgatttttgagatgcctcaaaagcaaactgaatcactgcagtattttgtgtaaaatttttttcacttaattaatgtcattttttttaactgagcttttggacagagcaccccctgcactcccactccaacatgctggaatttcctgtctcttaggcaaggttggttccaagaatatgctggttacacaacagcatcaaatccgtgttacttctggttctcagctctaatttttgaagggactcctagaattttaagaggtaattaggagtacttcagaatcataagtaaggcaagcagacttcaaagctagaaatacgaaatgacaggatgaaagagacattaaaggctagcacatgattgcacttcttcagagtatgtattgaaagtctgtaagaacaaagtgtcaggcactgtcatacgcaatattactatactgtccaagtttattcctattttaatttctactatcagtaggacttagcaactacttgagtttagggaaaatatactggcatcacatggacagtttattaaaaaaagaaacagacctgaaagcacattattttagtttgtggtcaggaggtcaaaacaactatcaaccactctaaaagatcctcacccccaactgaagtttctaaataactgacttattcaatcactcaaaaaaaaatagtaattaatagtcagctggatacctttttaattcttgaaaaataaactcaaggctagactgccttcccaaagcaagttgagtaaatccttgggaacaaattaaaacttctccaaaagtttccttttttataacagcaaagattatttaactcataattactaacctaaagaaaagctctatatttgatattttcattcttcca

SEQ ID NO: 317013 - DNA, 4001 bp, Homo sapiens
aatttcatggattaaaacaaaagagcatcattttaatcaccagtagtctgcaggaaaattccaaccagaactatagcttccaatcaggttctggagttgccactccaaatcagcaaggaacagtgaaaccaaaagtatgggaacaccctgcctatcagaagttccagaccaatggtcaactgacccttctctgtcactgttgcaaagcagatgatactgcaggagagacttttctgattgactaaaattctgtgagaattttacacgaataaggacccgaaactaagacaatcataacaaaccttaagatctctatgatacttgttaactttaagcaaaactagctttttcttcactttttaaatctaaatggcttttgctgtattttcagttcttctctttatatgtctttatgttccttcccatgtatttccttgctctgttggccacattacttcacacgaaaacaacaggagtttaaaaatttaacctgtattatatcttttttattcatttatttattttttgacaggctggagtgcagtggcagatcatatagctcactataaactggaactcctggtctcaagctatcctctcgcctcggccttccaaaagtgtattgtatcttgatgctttcagtagaatggttcaccttataacctctacatggcaggatgcataatcaccagtttattctgtaatacctgagcaaaaattcagcctagctaatatggcctctttcaccacactgacaagataaggatgacgtccacttagttggccaccaccagtatcataatattagatagtagtttaaaaatatataatggaaactagctggtgaccaccactttacttccagttttgaaattgctgactcatcctatttaagaatctgttgtaagcatcatttaagaattagtttggtttagacatactttgaagtcaacatagtttttaatgcatggaattacataaagtcaaatgaactatatacccttgctacatgcggtcttaataacacttgaaaaaattggctggattttcatttaaaagccaccttgaataatgattttatttcagtgaaattcgctcgtattttttccaagttccttcgacattctagatacactatcgcttctctaagagataactggctggcgcagagttggaaccaatacagacccaggcctgactgccaagcactgaccattcctgcaaatttctctcccagaagacgtgtgcaagcaaagaagagggcgataatttgattttgcaaaggtagggatagacgcgcacgcacagacatctgcaccggcccacaatgagtttgggacgggagcagttaggaagtggggagctgcggtaccttttcttggccttcctgagcttgactgggtgcagaactcagccctcagggctgcgggacagcgtcttctcagaaacccgcagcttggctggggccgccagacgcgcgtccctcaccctcccagcggagcgcggggtgcccggcccgccttgcgctagccagcagcctggaacgccgtaagagcgcagcgcagtagggagtcgcacgccaggggcaaagggacctgcgatctgcgctcctccggaagcgggaggatggctaggagagcctcagaagtgtcattaaaggaaaaaccaaaaattgaagttgcggctaagttttccccatgagaaggcggggcagctcggccagtaggatagaccggagggtaacgctggagctgggaggggccctgggcgtaggctttcggggaaaattccatcgccctttcaaccaccaccactcccctcccaaggcaaagaagccgagctctgtacctccatcgagtcctggctgcagggtggggggcgacagccaccgcagccgggagggtgcggccacccagttccctcccggggggcgccggacttcgaaggcagtgagcgagtcagctgggattcccccgggcgcctgccacccggagtcccaacccctggcgaaaagaaaagtgaaagagaaagagccgggagcataggcgaagacaaacacctcccgcggagactgggggtggggcgggtggcggcggctcctggatgactgactgccccaggtgtcactgcttcccggcctgtttccgtccctgccggggcctggggcgcagaacttgcagggcaagcgcaaggacatcgaggagccccagccccgccctgcaggaacaccagccaccggtctcctcctctacctgccgggacacctgcagagaaggcacaaggatagccgcatcccaagcgacgggcaccatgtgggaagcttccgcagctgaacctggagacccgggctgggctggcgcgcatccaagtcttcctgaggaaagggaaaaggatgtcggatctggatgctgggcggctactctagaccggcctcttggtccccgcacaggctgcaagaaggaaactttgaagtccaactaggggaaatgttggaagaagacacccgggtggcagctttgtgcaagacagttggtacagggagtgaacttagagcaatgagcctctctgcggatcacttttccagcctattgtgtagtccagtgtaaaatatcacacatggtcccatttgatggaagcgtgagatgttgttcttgtagtatttttacattggaggaaggaactgagttgaggctgagtgatttgcatgccataaaggcagtagcaaagatctcacgcttagttttgaaagtactttgcagaatcttgcactcttgtgaatcactgaaaatccctcttgtacggtgctttccaaattttcagagtcatggttcagagaaaatgatgtcttcctggagcgcagtttaatttagtttaaaatttaattatgtttttaattacataaatatgataaatatcaaatagaaaaataatagaaattattcactttccatgtacataaagttccgtataatataatttcatatttttatgaaaaatttgagtttattttcattaactcaattttttgatatcagttttatatttgaaataattactgatggactttttgatgagaattacatcaaactctagatagtctccattaacaaaataagtgaggtataaaaatgcaaaaacagtttttacaaccattcaaaatttcaccatagttggaaattatatttaagaatatgaagccatcatccatttctgttcatgacgatgtcatgttgaattttcttgtgatggtgtcaatggatttcaagaccagtcagaatttttcatagcaatacattgaagctctgatttgcagaatgagcatgcactgggagagcaagactgcagctggtttggatctcaccacaagaatatagcagccacggaaggactgatatgcatatgtgtgaagatagagaatagggatgaacaagtgtatcatgtgtcccaacctcattttggactgttgcagagcttcctggactcctgccatgtaaactcctctagcacctctttcagctcctttaatggatactgtgttctctgcagccggtgaaggaagcaggtgtccacgctcagcaccacctagcagagctcaatatcagatattgctgctgccagaggacatatcatcacatctcagatcctgtctctcttggactgcccacaaactctatagaaagtgctctcagctggtgctcactagcctgtgggcttcagctttgttagctgtctgcaggactcagggccatcagtatctgactgcatacttttaatatattgagaccaccaagaacgttctgagctactagagagttttcacaacactatgaaattgacggaaagtttacttgtagggtgaacttaaggcataatctgagtatataacagtaagaaaattggtctacaactgtttattgggtttcaactatagtaggttctagaacaagatggactaaatgatatataaagcattttgtcagagtagggagataaaaaacata

SEQ ID NO: 317014 - DNA, 4001 bp, Homo sapiens
ttctatattatatataatatttcatatttctatggtatattacaatttaaaagaattttctccaaaataggcccatttacttctcacagtcatcttttgaagtaggcagtgaagtatcatctccactttataaataagcacactaaatctcagaatttgaccacataagtaggtagagccagaattagatttcatttctttctcattatagcattaacatagcatccttggaatcaaatatttttattagtttctaaaatcttttgtaaatgtgcaatgagggttaaatgaacaaatgaatagagtttatcattacttttggtttcaaacttagatttccatgaattctaccaccccctaaattatgcacataatctcatctttctaacactctttagtgggaaaggtaggtcaagacaataccaatcccctgatatgtccatctattgcgctttcaattcaccactacaaattctacaaattcgggtttaagtttttggcatgaacaatgtggagaaattttcttcagaaaacagcatctagtatctttatgttgctggagttgcattatgtggctctgattaaactagagtaacatctgtaagctgtctcctttacatctttcagaagggtagttagaagcagatttctcttgaattaatagaatttgagtcaatgggattgcatctgtgtccccttaaatcctattattttctgggcttggattcaccctggcacaagctctttctggcaccagattttgttcattctctcttaactggcacagctactaggtagctttacacacctaatgtagcctaggagcttggatgattatgcttatgctctatctgaatccaaaaacaacctaatgaagcttttaatcttggaaaataagtcatatagcattataaatctcaagttctattggtaaaaagataaagtccaaaattttactttgtatttctcagtgaaaattttatctttaatactactaataatagctaatgcttgtatggtatttaccttatgccagacacggttctgagtgctttacatttacttactaattctcacaaagccatattaagtatatacagttattcatttaagtagacatgaaactgaatcacaaacagagtaggtaatttgccaaagatcatgaaagctaggacatggcagagctgagatttcacttcagatatctggccccagactctgtgctattagtgttatgctgcctctcacttagaaacctttcctaaaacaagaaaagatttttaaaagtgggctccttggaaatagattttggtattttacatactaaaatgacataatcaaatattttagagttttacatttttaaatgaaaccataaatgaacatttttgtttagaattgtcttatcgataaagtgagaatattatttttatgttttcttcccacccccaccaacacacaaatatatattaaaaatataggtaaaactgttttaatagaggcttcattatcaaacttgggttttcaaaaaaacaaattaaagttactctttacctcagatgagctgctattagtcccatctgtgcaaattttcatattactttgaattttattaaaacagaaattgaacataaaatattgtacttaccttcttgggcatgtaaaacttaaatgtgagcatcctggtgagtttgggattcttgtaattctaagaaagtataatgcattgttattaagaaatgatctccagctagattactaaatgtaataattttagtaagaaaggaaatatacttacattaattccattcaaaatcatctgtaaatccagcagtaaatgctccagttgtagctgtgttttctttgtagaacttgaagtaggtgcactgtttgtgacaagtgcaagacttagtgcaatgcaagacaggagttgcatcctgtacattgtggcaggagttgaggttactgtgagtagtgattaaagagagtgatagggaactcttgaacaagagatgcaatttatactgttaattctggaaaaatattatgggggtgtcaaaatgttttacatattacacatattttcaaagactttacctgtctgaaaaaacattaccttcatttttcctcttctgatgactctttggaatttctttaaacccccaaagactgactgaatggatgtaggtgaaatccctctttgttacattagcccacacttaggtgatagctctaattcatgcaattaacgccttctgtatgaaacagtttttcctcctttctttaagggggtggggatacaaaagtaactcagaaaattttctttgtcataaaactacactgaacatgtgaatagcatattgtggtggacaagagcaagagtaaacagatgaaaagaataaatgtttagatttgttgataaaacaggaagtgtattggtttcctgtttcagaatggttttacctttttatccacacaatgagctaattgcatacaataagatagattgcttcttacatgtcagctagagaaatactaagattagaatacttaaaatgcttattgagcttgaggtactgtttaacgctattttaatttaaaatgattatatatctgtttaagtctcttaatgtctattgtacattttttaaagggtgcgattgttaaatactcagaaaaaggtttgcattcaaggatactgatgctagttttataatagactttgtatgtgttatgtgtaaaccagtccatgtttctcgtttttatgtctttacctctttaatggatttttatttatcctctaaatcacctgggacactatgaatgtaacaataatcgttatgaaatatgatcttgtttttagtcagaagactaggatatttaggataggtgttcattcatcctcagtacagtgcacaaactggctgaacaattgtacggatatatacttctaatttaacctggggacacttgaggagatcctgtctcagagagagtccttgtaaagcttccattctatggccttatttatttcttacctggactttttttttttttttaaagatggtattgtctgtgtttttgtttgtttttttaagacaatattgtctggtctttaaacagacatctagcacctataatgccttcaggtatatagaaagagagaaaagagaacagtgtacaggcaggcacttagtctaatataagtcttacagacttgtgaagtgatggctcctattttgcagattagaaaactgaggctcagagaagttaagtaatttgctctaggtcactcagcccttattgccagtaaggggcagaagaaggatttgaaaagagaatgttctgactccaaaaatccactctcttaccatttgtattttttcaaagaacctgatttgtaatagggaagatatgtacatacacaagtgtagtcctgggtgataggtgattgctgccccaagggaggtggatataaggaatcttgaataaggaacaattaatttaaactggattttgaggagggtgcataggcaggaatgattaaagcagtctaaggaacagtcaaatgtaatattttacaaagaacagagaaaaatggttcaataagagttttctatgcgttaggtaatgttcggagaatataaaacaaatttaaaaataaagattatagtccctcaagtagaaaaaaaaatgaagaaaaggtcagattagggccaaatctcatgaactttttatacgaaaaaatgcaaaatgtctctatacatttcagatcaaaatcacattaacgctgttataaggggcaggctatttggtagtctgtgtgttatttatttaatataataaagtacagctttattatacttgttttgcttctctaaagagtttcagtgtctaatcccagcatcatcactcaggcctttacccttccagaatggaagaattcaagcccacacattttcctatgtgggggcttttccaatgaggtatttgatgttctc

SEQ ID NO: 317015 - DNA, 4001 bp, Homo sapiens
caaaaatcaccaccggttgagaaccactggttatatgattagacggaaagaaaaagagaaaaagaaagatgcctggctaggccaattagagatcttagataattactatatgcatgcaacattagatagttttattttcattaaacttttaaatcttttaaaatctcttacagaccctactttgaagctagcttgatataatgctaatgtgaccttgaacgatttctttcttcctgagtttgcctactagtatagcttaaagatccaagttacactattactcacttatatcatagccagcattgcttgatcagattatcagatagatacagtatcacggagacaaaatcctttcattatgatgtaagataaaaaatatctttcattaacaacacacgtaaaggaagtacccactggaccaactcaggttagaaggtggaatctctttcttatttcttattttgcaagttatagactacagccaggaaactctggaaagaactctaaccataacagttaaacaaggtgcatgagatgctagaaatgtatgttttgataattaggcacattgattaagaagtattttcagttattggaaaagtctttccaataagctgaatgtgctactttcattttagatgctgcttattagaaaaggacctagtaaatgagagtgtttgggttcagagctagagagtgaattttagagaaaagcaatagttgtgactcattcactttctaaacttttacacatagtcatttacgataattgttttctttgcaatgtatcttcttaagtctccccctttgtagtgtcctaattactggtagcacttttagttattctaatttatgcaattaaaggtctgtgacaatgaaaacatttccccaattgcatttatactctcagggtaccagaccagaagatcagatcgtagaagttactggagaaaaagatcagcggacagcactcttgaactacatgccaggcctcttcttcctggaactctaatggatttaaatggcttaagagacgggatgaattgttgaaaatggttctttcaaaagacctcacggaaggccaaagacaagactcactgaggccaaggtatatgtgaattatattctgaaggacagctttgatttccacaccaccatttctccatgctgtccctgtaatctaattctttctttctttcttttttaagtttgttattaaaaggttaattctgcttcctactgtatgtatctatgtttcttcggtaggataacaaagaaggctcaaaagctttcatgcccaagggctcttaaagagtaactagctgtgcattgttcagaaactgatcagagtatagatttcgtttctagttttgttattctgtctcagcaatactacttaggagtactcttagagattcttgaagataaacatagtttatgaggaatataatatagcattttttagttggtttttggtaaatcaatgaatttaaccaaaatataaataaatatttcatcaattattagaccgctaagttcattaaaattcagtatactcctatataatcatgctaatgtctttcttattggatttaaaaacttatgtccaatgtattttcagaaataaattcaactggtcttacctctacatcttctggagctggcagaaattcagggacctagagcaaaagaaaatttgttctgagttatttttataagccaaaccctccttttatattaattgaaaagtatgatttagattttgttgtgacaaatatagtcttaccaagtcattcacataatttttcagctgatcaacaatatctataagttgacgcattctaatcatgtggcgatcttgaccttgggagcttgatttgtggaccagtgtccccaagaagatgaccatcagacagatgacaatcctctccatgttgccaggactggatctcataagtaccaacagtagagctagaccttggtctcgttttcacttcagcttgactgagaacaggttgtcagttaagctacctatttattcatccttcagggagaggtaaagccctcccattgcagcctggaaatctttgtaaaatggatgaatgtgagtaactcttttttcttttccactggctaggtatacgtgtgcatgtgctaatgtgtgggggcagggattgatggagtcaacgaaatgtgccccatctgcatctttgacaggaaaaagagagaatgggtgaattccaattttcagcatgaatcaagaagtatgtataataaacagtaggtactacaagacttcaaaaaagtaaacaaaaacactttgatctctttttctcggcctcccctggcatcttacctgttctctctgacagtcataagggcactttgataatgagtaagatggcaacatgtgctttcatgcaggactttttcttatggtaataactatgtcttttgactaaaatcatccagtattccatcataaaagtaggaggagaggctaccttttaggaaattttaaataaagaggtattttccaaattagcaagaatattttaggttcttaccaagtttcaagggtttaaaatagaatttgcttccaactgttcaccaaagcatctttactaagcatttattttggcttctgtcatgttatttaacaatctgatttattaatatcacaaatgattctaagggagttgatagaaaatctatccttcccaatcaagatctcactctaccatcattttaaaaattatctaatgtccatctcttctatataatacatcaattaaatgagtcaaacttgctaatgctcattcttgtccaaaccaaaaaatgtttccaaacagcaaaataaaatatacccataaatgattcgttttctcttagggtagtgttacttatttctgttagatactatttcctctgggtgtgagcaacacatttctaactgcatctgtgaccgggtagaggttaattaaagatccaaagcccagaaatggttttatcatcctcctttcttctgcttctcttgtccctgagactcttttaacccatttgagaaagttgaatataatattctagctagagagtcatgtactatataagaccataggtcttataagtgaaactcttgactatagattttattcattcattcattcattcattcatttcattacatactttagaataccatactttattctagactgttacgtagccaacataaattggagttttcacttgatttgctctgaagttgactgtaatctttttattatggaatatctattcaagagtatacaggtttggccttatacagtagataagagttcatacaacatgatcaagaattcctccctgtaatagttaaattctatatgacaagattctgtgcaacttatgaatgcatgtggactaagggttgccacttggtgcctccacattgcctgtatggtctttgtacatgcactccttatccacctaaacagatgtgcatctccttgaagacactaaccacggtggttaggaggtcaatttctaaagcttgagttcaaatcaaggtcctaacaattaatagcacatatgatcctgtgtgtgtaattgcaaaaggaaggcaagtacagaatctactcatagggttgtgataaggcttaaatgagacattccaagtaaaagggctaagtacagcacataacatcccgggaggtttgcatgctgatcgtggatgagggtgaaggggagaactttaagaagcctaggggaggctaaactgatcagagaaggaggagaatggacagatcagtgttcagccagaatacacttgtgtggttgtactggtggtttaacaaaaaataaaaaagtcaaatatctttcatactgcctagagagaaccattgctcctggccctggagtgcctcaccactatgttagacaacccagtccctccctgagacatcctagccctctccataatccatccaccagtacatcag

SEQ ID NO: 317016 - DNA, 4001 bp, Homo sapiens
tgaactgtgccagatctgtatgtctgacctcgcagtgtaagcactttctataaactatatgaaaggcacttgaaattaagtatcaaagtttagtttgaaggttgttatttatctaagaaattatgagtgggaacactagaataaaaataaaggttctctaataaccctatcccataataagtacttcaattgtgaaattgttttcttctttatttctcattttataagtttttcagcagttctgaaagtgtctcaagtaggttagaaagaaatttgactgcctatataatttatatcactaaatattgctagaaatattagatccaaaaccagaaaatacttaagcactagtgaagatataaaaaacatgaaatctgaacccaaaatatacataaacataaaactgtgaaagttgagctcagtaaccacgtgcagagtgaaaactagatgagtttttaatcactaatcacaaacttcatagagctaagaatttgtataatctctcaatcttgtaaggcctactatattactaatgttaccagagctattaatacctgacaattatagatgatccgaaagatttccctgtcaacaaattatagtatccctcaccaacttcaaatagcttaactcttgtgaaaggaaacatgtgccttcaaagaaatgtaaaaacctgcaagcttgctgggcgcggtggctcacgcctgtaatcccagcactttcggaggccgaggcgggcgggtcccctgaggtcaggagttcaagaccatcctggccaacatggtgaaactccgtctctactaaaaatacaaaacttagcccggcgtgatggcagttgcctgtaatcccagctactcgggaggctgaggcaggagaatcgcttgaacccgggaggcagaggttgcagggagctaagatcgagccactgcactccagcctaggggacagagcaaggctctgtctaaaacaacaacacaaactacaagctttacaaactttggtgttatctgaaaaactagaaaggttccatatacaattattaagcacgtatcatttttaggttaccattcatgtttgtgctccatatctgtagaaatccccttggacagtttttattaaaacttaaattgtttgaaaacaaagatatgcatctacagtagcaggctctggagccaaatattctacatcgaattaactggacgagttacttgaactctttgtaatctgtaaaagaaatatttatataatggtctggacccagcgcatcagttttaattccctccccaccccctccccaaacacggatcagtcctatgaatcctatggattcagaaaacagaaacaaatttataaactaaaaaacatcagacacttatgtcacccaagaagtggattccttagagacttttaaagtataggattactggcgtgtctacaaaaacagagaatgggtccaggaaattatctttaaagttcgtatggctgtttccatactatgttcaaggtctgttcctcgattcaaggttattaagcgcaacacatttccccttttaaactgccctcctagtagcaccaccgatagtaggtggtaacactgtaaggaaggtcgattctgtcccgggttcccgggtcggccggcaaagggtggtttcgcctccacacttaaagtcggagaaggaggggctcggggacgccaggcggttgcccagtcaaccaacccacttcctcctgaagcccggaagtgacacatgtcccggaacctacgcggagccaggatccgcgacggtccgagctgctgatcgccgtcctgatccattgactgggaaagaggttggaaacatcaccgcaaaacatgctgcaaaccccgattcggactccgctggggccgaaccaacgcccccgcacagccccgactccctccccagcagccagctcgccaccgcccctctcgcgaccagccattttccaggcccgcgggaacgcgcgccgcgcccctcccacgcccctcgtcaagcccgcaggccccgcccccggcgcgggggccctccccgccacacacgcccctctcttcctctcccgcgggggacccctcccctcttaaccattttgccgaaagaactgggctagggctacaacgcggggcgcccgcgaactttcccggggcgagagagcggaacggactgctctcctccgggccggggcaggagcgcggaggaaggccccctcagtccgcctccgcggcctctcgccccctccccccgcacgttccaaagcacccgcactccggggtgggggcgagtgaggtggggaagcgcgccccgcagaccagcgggagcccggccgctcactccctccgacccttgcccggctgcagtcccgggccggggccgcagggtctgcggcacggggcgggccagcgcctgaacaaatgcttgctgcttaaaatggctgattcccctcagcggcagctgcagccgctgggtctgcagcgggggctgacaagcggcccccacccccactctggggaccccagagaagtactcgcccaccgcggggccacggagggccgccaacccggtctccagtcctcccagtcccgctcggcagaccctcggtgcgctcggggagactgtcacgggagaaagggaaggtggcactcccccggacaggctccccgccaccggctcccgaggccggcagccccgcggctcctaccttgatatttgttgtccagctctcgcagcacagacacgttcctctgcatgtcgtggggcagcgactccacgcactcaaggtagtcctgcacgtagcaggtgagcagccggctccgctccccggtcaggagcgcggccgacgagtacagttgctgctgctgctgccctaacatcctgccgatccgcgccgtcgccgccgcctccgcatccagcagccgcacatgcaccggccgcggccgccgcgggccctcagctcagcagcccggcgccgcggggaccccgcagccgctcgagagggcacggccgcgctccccgatctccactccccccagagcagccctcactccccgcccccgcagcaccagcccaggggcggggcgaaaccggggctccctcctttctcccctcccgctccaggaccggagcagtggggatcccctcggcggggccggcgccggggtcccgggcgctgacacttcctgtccccctcggagtccccagatgctacgagtgccgtctcgcagcccggatccccatgacaagcccgtcgccgcccgcctgtccccagtcaccctccgtgcctcacggagagcctcccgctagcctgcccccgcccctccgcccgcggccgcctctgcgcctgcgcagcgctccctgcgaataaggccggggcccgcccctaccgcctaccggagggttcgcattctcccgccttcgctccgccgcccgggcgattggtctgccggctctgggctagcgggggagggtgtggggggcggccaaacggcaggccgcgccccgccccccttaaaggggaagcccggggagccagtctctgcgcctcgcgtctgaatgggacccgggaggggaggcggctcggtccttcgtgccgtcctccccgctgggaggggcagctccagctccgctcggctcgctccgcccggccacaccggctttttccccatcaggcggtccgagtgcggctcctcgcgagcctgcaaaggagcagcaggcggttccttttcggacgacctggagcgaggcctgcgggactgcgcgccccggcgggcggcgtgcggctcccggcatgcgcggcggctgcgttcccgccgcctccgagctcgcctggggctgccgcccgcctcctgccgggccctcgggctcgcccggcaccgcggggcttgatcagggaggtaggcggtgctccctccggcccccggcgtcgtgtgccctgcgggtttcgtggcccttcccctacgctggaatcttctgtgtcatttaggggga

SEQ ID NO: 317017 - DNA, 4001 bp, Homo sapiens
acaattattaagcacgtatcatttttaggttaccattcatgtttgtgctccatatctgtagaaatccccttggacagtttttattaaaacttaaattgtttgaaaacaaagatatgcatctacagtagcaggctctggagccaaatattctacatcgaattaactggacgagttacttgaactctttgtaatctgtaaaagaaatatttatataatggtctggacccagcgcatcagttttaattccctccccaccccctccccaaacacggatcagtcctatgaatcctatggattcagaaaacagaaacaaatttataaactaaaaaacatcagacacttatgtcacccaagaagtggattccttagagacttttaaagtataggattactggcgtgtctacaaaaacagagaatgggtccaggaaattatctttaaagttcgtatggctgtttccatactatgttcaaggtctgttcctcgattcaaggttattaagcgcaacacatttccccttttaaactgccctcctagtagcaccaccgatagtaggtggtaacactgtaaggaaggtcgattctgtcccgggttcccgggtcggccggcaaagggtggtttcgcctccacacttaaagtcggagaaggaggggctcggggacgccaggcggttgcccagtcaaccaacccacttcctcctgaagcccggaagtgacacatgtcccggaacctacgcggagccaggatccgcgacggtccgagctgctgatcgccgtcctgatccattgactgggaaagaggttggaaacatcaccgcaaaacatgctgcaaaccccgattcggactccgctggggccgaaccaacgcccccgcacagccccgactccctccccagcagccagctcgccaccgcccctctcgcgaccagccattttccaggcccgcgggaacgcgcgccgcgcccctcccacgcccctcgtcaagcccgcaggccccgcccccggcgcgggggccctccccgccacacacgcccctctcttcctctcccgcgggggacccctcccctcttaaccattttgccgaaagaactgggctagggctacaacgcggggcgcccgcgaactttcccggggcgagagagcggaacggactgctctcctccgggccggggcaggagcgcggaggaaggccccctcagtccgcctccgcggcctctcgccccctccccccgcacgttccaaagcacccgcactccggggtgggggcgagtgaggtggggaagcgcgccccgcagaccagcgggagcccggccgctcactccctccgacccttgcccggctgcagtcccgggccggggccgcagggtctgcggcacggggcgggccagcgcctgaacaaatgcttgctgcttaaaatggctgattcccctcagcggcagctgcagccgctgggtctgcagcgggggctgacaagcggcccccacccccactctggggaccccagagaagtactcgcccaccgcggggccacggagggccgccaacccggtctccagtcctcccagtcccgctcggcagaccctcggtgcgctcggggagactgtcacgggagaaagggaaggtggcactcccccggacaggctccccgccaccggctcccgaggccggcagccccgcggctcctaccttgatatttgttgtccagctctcgcagcacagacacgttcctctgcatgtcgtggggcagcgactccacgcactcaaggtagtcctgcacgtagcaggtgagcagccggctccgctccccggtcaggagcgcggccgacgagtacagttgctgctgctgctgccctaacatcctgccgatccgcgccgtcgccgccgcctccgcatccagcagccgcacatgcaccggccgcggccgccgcgggccctcagctcagcagcccggcgccgcggggaccccgcagccgctcgagagggcacggccgcgctccccgatctccactccccccagagcagccctcactccccgcccccgcagcaccagcccaggggcggggcgaaaccggggctccctcctttctcccctcccgctccaggaccggagcagtggggatcccctcggcggggccggcgccggggtcccgggcgctgacacttcctgtccccctcggagtccccagatgctacgagtgccgtctcgcagcccggatccccatgacaagcccgtcgccgcccgcctgtccccagtcaccctccgtgcctcacggagagcctcccgctagcctgcccccgcccctccgcccgcggccgcctctgcgcctgcgcagcgctccctgcgaataaggccggggcccgcccctaccgcctaccggagggttcgcattctcccgccttcgctccgccgcccgggcgattggtctgccggctctgggctagcgggggagggtgtggggggcggccaaacggcaggccgcgccccgccccccttaaaggggaagcccggggagccagtctctgcgcctcgcgtctgaatgggacccgggaggggaggcggctcggtccttcgtgccgtcctccccgctgggaggggcagctccagctccgctcggctcgctccgcccggccacaccggctttttccccatcaggcggtccgagtgcggctcctcgcgagcctgcaaaggagcagcaggcggttccttttcggacgacctggagcgaggcctgcgggactgcgcgccccggcgggcggcgtgcggctcccggcatgcgcggcggctgcgttcccgccgcctccgagctcgcctggggctgccgcccgcctcctgccgggccctcgggctcgcccggcaccgcggggcttgatcagggaggtaggcggtgctccctccggcccccggcgtcgtgtgccctgcgggtttcgtggcccttcccctacgctggaatcttctgtgtcatttagggggaggggatgcgggacggcatctgtttgacaacgcattggtcccacagacagcctttaaaaacaactgcttttggggggtgtcagaacatttaagcacaggacgtcggtgaggcttcctggcggagtggggcacacgccagctttacgggactttttgctcagtcctgccccaggactgcaatcggaggggacctggggcatggaggagacgcgagtgaaaacctagtcagcgggcgggccctcggccccataatctacgtgatctcctagtggggtttaatttcggtgtagtgtaaatgagatgtcaggcagaggagctgattttaattacagatggacatttttgaaagaaatgggtgcaaatagaatgaatgcatggataattttaatggaatgcctatgtaaacaaggccaattgtgagtactacctttgagttaaaatgtgagtgagtggtgacaaatttggatcttcttagatccagtttgcagcgttggtacacctgaatggtgacctatttagagcacttttgaaacagctgttaatagtaactagcctttgacttgcaaagagaaatctagatctttatctagaggaaattttaaatttcaaaccaaaataaagcactccaggcaatttgacatcttgggacgtcaactatttcaaaggactgggaaattgtcttgggttattatcctaggacactgaggtttgggccagtattaagcaacccagacagtacagtggatagtatttctgagaacattctgggattttactgttcgtgaaatctttcggccgggtcttgtcaaaaaaccgccactgtgaagaactgaattttactggtttttacttgaaccctgctatttttgttttctcacaagtttgaataagctggtctttatcaaaggcgcaaaataatgtggggtgccttgttacaggtcagacaccgaatgtacctatggattttattcagtctgataagtgatctgcaagtagataagaaatgtgtttagaaactagaaggggaaaaagg

SEQ ID NO: 317018 - DNA, 4001 bp, Homo sapiens
cactgaaaaagcaatccattttgcaatagcattttacattactacaaattcacgaggttcaaccttcaatgcccatgtacctttcacaaaactattgatcatttcctatcaatgctttacaggattatatcacaaaggaacacataatgcatgtatgtgcatcaatgcgtaaaggagaggatgcatttctgtgcatagtatgtgaactgacaatgcccacttgcccagtccttgctttactcaacttcttacacatcatcagccagctgccctgttgatgattccttgcaccttatgcgctgctttatcattgagtcagattactaccatttctggtccagaactcattaagaaaagtcctttttcaagcaaggtctttgaaatgtagttgtacacctataaaagaactatctggagctcatcttgagagagagaagatgaatttatcctctgtctttaggcttttacttacagagccacacctttataaacaagttctgtctgtcatactgacaggaaggagatatgcaaaatgtaacatctggagtcataaaatataatgacctcaaataacattccagaaagagaaaggaaaactagttctggttagggagaagataaaagaggaaaaggagtaaatttacatccttaaaacaagagtaatagaaaaccctaccgggtttttccagtaagttttgtgcagcagcagcaacaacctaatcaatatgtgcttcctcaccctcttgtccccaaagagaaactgctgggcccctctccaccgactccccaggagcagaaactactgcccccaaggaagggagaattcagaagcgtggggagggggaaaaacaggtatatgtggttctagcatcctcatcttcatatcagctaccagcctgaaactacattcaggaaccaggctcccagacattccccggccctgggccctgcctgagcgccagagagcttgaggagcctgcagcatagttctcagacccgaaacaatgacctcccccgtccaaacccaggcactcttgcgccaaggccctaacctctcagcgagacctctttggggaaggacaagagatgctgcctgatggccgagagaagacatgccaggcttctctgccagaatgagttgttgagggtgggatgaaggtggtcaaggagatgggctctttatttttaaaacaaaaaacaaggcaaccgggaccaccaacatcagtcaccctcactccccaccactgcctctattccttaaggacttcttcccaggccggcggcggcggcggcggcggcggcggcagcttgcgatcatcaggattggaagtgagagcgagtgcccgggccaacctcagcgtctctcagggacagcgcaggtgggcgcagccttggaaggtcagcgaggccagagctcagagttccacgggggcccggagagtgtgcgtgtgtgagtgagaatgcgaaaacgcgcgcgcgccgggcagaggggcgctcggcgagagggtaggcgcggtgacaggggtaccccagcagccgaggagagacagcccaccccaccctttaagctaaagagctggaggggtgatggaggctgcaagacggagaaacttgatgcaaaacagacaggctcccccctccaagacgtgccgccacgctctcagacacgctccctcgcctcccggattacccaccatcaaccaccccaccctgcaaaattcccccaccgagccctaggatcccaggcgggtaattacctctcccggaggcggagtggggggcggcagcagcagcagacacttttagcctgactttcctgcgttcgcttgcgagcgtgtgagcgtgtgcgcgcccaggaggagctgtaacctgctatttatagaccgaagcctcagtacccggggctgagaacccggaggaaactagcaggcggcggcgacggcgcagggcgccggccgcggcttcgcgaggctccagcagctcccccagcctctggcttcggccgcgctccctgctcgctcctcgcctaccagccccgcgcgcgccccagagaagttgtcaccagcgcggctggctctccggctgctcacacgccccctggcacaattgctactttcttccaccccaacccccaccctccccgctcctcttcctcctcctctgctctctccaagcggtctcctcccaatgtcaccagcgaccgagtagaggcggccgtggcagcgacagtcgcgcaactggcgctgctcgcttcccgctactgatagagcggagatggtggcccggctgcccaccccgaaattaccacgctggctccgtgtgctcacaccccgtaccccgacccctttctgcggcccctctgcccgctgggtcgcccacccagactgggctgtgggatcaccgctaccgcgacgaggggggacccgaggccgccacgctgctgcgggggcaggagaaaccacagagaaagaacccgcgggaggaagaaagcgccccagaccccggcctatggcagcgcagtccctagaccgagggtttttggaaggggcttgggatccctgctgtcactgcctgcgtctaggcatccattcacgcctgctggaccccagtctgcagccgcgctgggacccctgtctcttgcccctcctcccccttgccccgggcagaggtcgggctgaggagaccagcttagagcagccctcggccacccaccgccagttcccacgtcgcggcgggtgactgaggccgagatgctcccaactagcgtatgacatgcctttgatatcccgggtgcgtggggacaaatccgccctgaatgtgttggggtatcaggaaaacggggtatgtaagcaagcagtctggacggagactaaaactcccccacttcctagcccctaacaagcccacaggggaaagcacgcaccctggttattccgggctgtgtagggtgtggggcaaatgactctccccatctgcgctttacaggtgccacctggcggctctctcggaaaggttttgatggagccgttcaaaggtaaaggtgcccagagccagcccatcaagacaccccagcccttctccctgagggcgctttaaaatcacattttaagtaaagcagtgtacgaatgcttgtacacaagtgttacatttgccatgcaaaaagactggaatctcaaagtcaggacagtgaaatcaatttgggttaagtcggggcttaacagtttcacaaaccaggaagctgtatgtacccccagctgtcacccctgctgtcactgcccgcatctaggcatcctttcactcctcaaacctttgaccaccacattataagccttgccaatgaggacagggactttgggtttgttttgttttgttttgttttgttttgtttggtggggggagttgtttgttcgtttcatttatttttttcatcactctgctcccagagcttgggacaatacctaatattctgtagtttcaataaatgtttatagaatcaaataataaacactataggccagaaactgcttggcgcccccgaagcccttccttttgcttctcttcaagctttttctcctatgctcagcctctaccccaagtgagctgaatgcagagagataggagagtgaggaacaaataatccctgtcaagatgtggatcagctttgagaagccttcacacagttagatttctcctccatggggcagcactgaacacacccatctccaagcaatgggtaagccgtgttcatagagatctgctggaaagatgatacaactttctcactgggcagtttctgatttttctcacaatagagagagattgaaataatatcaggacattaggatgtcagagctttgctactaaattggaaatatggttaacatatctgtcctctaagtggaagagtgtgtgtgtgtgtgtgtctgtgcgtgtgtgtgtttatgaagactacagcagcaatgccagaaataccaaaccatacctcctaaaagactgagttg

SEQ ID NO: 317019 - DNA, 4001 bp, Homo sapiens
tctttccttcactgagtctttccctactccttatattcaaataatcagaattcctgtggattctgacggcaatatttttcacacttgtcctacttttcacttccactgctactactgaaattcaggttttattagcttacttgaactatggcaataacctcgttattttccttgacttcaacattgttgccatatgaattttcctgaaacccagttttcttctttttcattaaaataaaaaaaaaaattcttgctgagaagttagggctttctaccaccttcgaaataaagaccaaatttcttggcctagcatttaagaagattcagtaactggcacaaaaattatcattcatcatccccagatctgccttatagctagctgaccctgccactcttattttttttgtccaggaagctctttacctatttttatatatctacatcctatcaagaccctattcaaatacttctcatgaagatttgactgacagctgctgtgcccctctccattccaaaccctattaatagtctctccattcaaggatatctcatagtgctttttcatggtattgcaactttctcccttgaagcatttttttttttttttggcacaagtgttatgtcccctacaaaactctgagtactttaagggcagagtctatatttatctttttgcctatctctttgccactttgcaaagtacaacaaaataatggctatagaattactggaattaagtgatcaaagtatagtggtcttatctctccttctacacaattgtagccatttccaaggtcccttcagcaaaaatcacaaaagtaactcacccctgcccccacaaaaaaaactccaaacatcaaaaaagcaaaagcaaagcaatcacctctttcacgactggggacttgtagtacaatgttcctatctgtaaaattctcacaatctttcgcctgtcttgcttaattcattaatcccactggtctgtaaacttgatgacagcaggaacttgttttgttcactgttatttccctagtgcttgaaacttaataagggctcaaaaatatttatcgaatgaacgaactaggttttttgcgtaaatgtcaccttataaggcttctgtgatctctccagtctaaattgggcattcatatataaatataagtatgtgctttctcctagatccatttttcaccctacctggcaatctcaaaagaagtccaaagttgatcatatgcacgtgccccagatgaaggaaacagaaactgttcacatagagtgcagtattatcgttgccatttcataatggctctaaaaaactttgttcttcatgacttcgcaagctcttgcaaccccttccaataaacattattttaaagatgctgcctttttcattcctccactgagttcttggttctggataacactgataccttagggacacctggaatcgcaggagaaaaggctccgattccaaaccaatcaagtggctgaaagctgacagcaaacacttagaaaaggaatgtcaatcctttgatcaaagcatcacacatcgaagtcctagaatgggggatggtccttgacaggggagccaaaagatgagagacaatgagggagctacgtagagaagtcactaaaaccctccgacaaagtccgaggcaggattccaagtcccttgtccctagacctagaaatatgctcggtccgcatgtcccggcccgcaactccctcggaggaagcacagtcctcactgaaaggggagagcagtcagtctagggcacgcaaccgcccgtaaattatgattccccttgaggagcgaggaaactaataccccacgtagctactctcccacctcgctcctggcgcgggggtctcgagcctccaggaggccaggagcagagtcgctcagcataactcaccgttccgccccgccctgccgatccgtctgttcccggtggtcccttcggaaacggttcccgcactggccggctccgaaagcaggaaaacaaaggttcccacagtaggggcgggggaaacgtttggcagtgcgacagtaggaagtgacgttacttccctttttccggtccgccggattatgaatgacggccggcgcgagtattttccacataaggtggctgtcgtttttctcctggcgtctgtggaggcgagtggtctgcgggcagcagctcccagaggcagccttggaattccagctcggactgggcgggaaggcgcaggcggcccaggtcgccgacacgctcacgcaccctccctgcctggccgcgcctctgcgaccaggtaaagagggcgctcgggccgccggcttctcagcctccgcgaccccctaagaactggtcttttcttcgggggtctgcagggctgaggatgcgggggaagggtgggaaggacaagggcgtggtatcatcgtcctgatttttctcccgccctggggccgcctcaaactcctttttggccactcctgctgaaggtgcgggttgagggctctgggcttctcggtagtacgcgtttcccagtttccccctagccagtccctcatgtcttcctctgctgatggagaaatggggcagcttccagttggaggcgttggttggggtggtttgatatttgctgttaagtgttacttcaagacctcttgggtcacactaacttctcttctctctttggcattgagttttccattccagcccttcctgattgcagaaagcagttctatgtgaatactacttaacatttactccaaaggacttgcttcatttggggccatttgcttatgttttgtcatcacagcagtatctcttgggtttttaacttctatagaaagtttaatttgcatgaaagttgctttggtttcaaaaacgtttgctaatacacgtacttcccatcccaactttctacctggttttgggatgagatgacttgtttttttcccctttattcttaatgccaggatcccattccttgtcataaattcttgaatatcaagaaaatgccagctttagtaatatattgtgtgctacattattgataaagaaggtggtgtatttctattttacctaagcttatctgtaaaaacaatgtttacaggagaaaatgcaaaagctagcaagaactagtgatgtgataattttaaacatgtaaacatagtcatttaaatccatgataataaactgttataacacaactaagtgattcgctgtcatatttaataaacattaagctatgcgggtttttttttctttttttttaactgcctgatggggagcatacaccactgagaggattgctttaagcacactcattactaaaaattgtgtttgtattacacctgaaagtatcgttttgtgaggtctcacttcaaaaataagactgaaaaggtcaatgagatttgagaatcatcatttctttttattttatatactttgcacttctacgtgtttttgctttaatttaaacacagctcaaacttgagcttctgtagtagtgggcccatcaatttttttttttttttttttttttgagctggagtcctgctctgtcgcctggggatggattgcaatggcaacatccgcctcccgggctcaagcaattctcctgcctcagcctcccgagtagttgggattacaggcgcccacaatcacactcggctccttttttttttttttttttttcagtcgaggaggggtttcaccatgttggccaggctggtctcaaactcctgacctcaaatgatccgcccgcctcggcttcccaaagtggtgggattacaggcgtgagccaccgcgcccggcctgtttttgtttttttaaacttgttttacttgtagcttttgtttcatcatctgtgatttttaaataaaaataaatactgagtatccaattagcttttctaacaaagaataaatacttggaatgcagatattgaaaccatttagattaaaacaagcacaggtattgtttgctgtgaaaattcagtaattttatttcata

SEQ ID NO: 317020 - DNA, 4001 bp, Homo sapiens
aaagagtggttctgtacaagttgggaaggccactgtttgtaatgatgactgcagcttagggaagtaaacatctaccataagggaagaaccgaacataagccttcctggtaagttcagcaaattaaccctcatgtcctacaaatcaagaagggacagacttaaaatttgaaacttggtaggacttgaaatacagaccagcaaaacatcttatgatagggattttctatacttttattattaggaggataaagacactagaacatgtggcgtgattagtgacatgtgaaaagcttaatgatcattttttaaaagctaaaatataacatacatacatgtattttgaatcatgaaatacttttattcttttaagtgacaagttctcctatcacaaggtcctcagattggtcatttcctaggaaacaaagttcactattttaatcccatcaaagtcatggtggcccattaggtatcaggcgtcttgaattctcacactgacaacactcagctgtgcaactatacatgaatcatagattctttctgggctaaaagtatgcgactctaaaatgtggagaagccaagagtttgagtcttacactgtctatggcttcacataccaagaccaaataaggttctatgtaattcatatttccttccagcagccttgtgtaataatcatgaattttaaaattatttttttaatgcctacagcagattacaaaaaaatacgatattttaaaatttgtttaagtcttcaagaatgtattaaacaggtttccccaccatacttttaaaggcaatgataaaaatcttttacatactgataggtaaaaacaattgccaaataacagttgctcctacatacatataaatgatttgtaactgttgttcctaaatacacataaaatgtcatcctaaaactgaccaggtatggttgtccattactgggttagttgacattttggcaccaaaactttttcacgattagtcattctcttcaagctactgctagttgacttttctaaagttcttaatccatagcagtaaggggtagatttttcttaaaaatgaagtagcactgaatactgtgaatcaaaataaccttttcatggcattattaagaaagtgaaacctttaggtatctgtatttttaaaaattaaattatgacgtaaaatggaaaacaagaaaatcatggagatgcataggaaaatacagcagaaatatccagaagtgctgagaggttgtccttgatggtgagactatgggtgggcgttccttctgttatatagctattcatttccataacagaaaaaatctacataaatttaacaactgccttataaaacgcgtagggtgtctctccactccaaatactaaagagattaagccacaaaggtcacaccaaagaatcaagacactgcgatcgaaacagagttttttgaacgctgttacagatatatcctcctatggcctagacagagcccatgaccaaaaagaggagattctcctcatctaagaatcattgaaaaaacaaaacaaaacaaacaaaaaacaacctacagtagcaaagaatggcatcgtcatttctgctcacaccaccatacaatggaacgtggtgcaattaaatcccacttattatagaaccccaaatactcgattccaaccacgccaacacccttgcagttcccccagcccacgtgtatattctctggattgatgggatgggattaattgtccctctttgaaaaccttactcataatcgctactcgctgaggaatatgaacccgagtcgctgacccgatcttcaaaatcatagtcctcatcttcttcttgtgaagaggggtctccagggagctcgtctgagctcggacgcgaatcgcacgaagccacagaggccatcgtcaggaatgcaatagctacgagtggagtaattcaaatctcgcagctatagcttgctaaggccgccatgttgcctctgcttgggaaggggcagaggccatgtgaccaccaatccttagctgcaattggtggcaggtcgcgttgccagggagacggagaagcttcccagaagaaacagggagaacagaaagcagccaatgggctgaaacttccaggagggcttctcagttggaaggatagaaatagctaaaacttcaccgcttacgctctccggaacgcaattccttagagcagcataacctgttaaaacaggcggagatgcactgggcttctcacctttttcttccagtgctggatatccagtttgctctttgtcctgtgtttctaatgcctaacagctgtcggtcagcctggatttccttcgaggtgaaggaaaccgcactttacctttccttaggacctcatccgtgcaagtaatggacgcttttaagcaacgcgatctaggtgttaatgtaaatacgctccattgttttatgggtttcatattgtttcgcaattgcaaacattttcacggttatcccaagtgggtattgtagagtgccacaaatgagtggcaatcctgtggaatcaacttcatgttcattttctaactcaaaattttataatctaattaagtgttctcattattaaagttggaagtgtaaacaggtaaaatctacctgttatttatgaatacctatatcaagtattttttaagtacaaaaataacagctagcattgattgagagtcagccttggctctgctcactttattcatatacaatgctgagcattcacatactatgaagtaaatattttctctatattaaataaggaaactaagctttagagaagttatgcatcttactaatggttacatggctagcagtcaacaaagtcaaccaagaaatgaacctaagtcaataaccattacatgaaatttcctccctcagaacccagtaattcaactattagatatctactctgagaaaggatgcaaatttataaaatttgtaaaagtgaaaagctgaaagcaatcttaaaatgtcaaataatgggggaaaagttaaatatatataaaatatgatgattatgattttaactagaatgtgttcaaagagtaaagcatgggggaaatgttcatgttgcagcgtgtaaaaaaaggatataatgttattttatgatctaaaaggctgggtgctggggattctctaatgggcaattataacatagtgataagtattacaataaatacaaggttctaatggaatatccagaaaaaaccaaagtagtatacgtggggccatgacaaatttcttagaggaagtattaatttatattgttattatggcatggttccaacagagaaagagtaatgggagatgagtcatcacatggccggtatgggtatatgcatggagaactcaaaggaacctgaattgtagctgttgcaggggcagaaaaactctacctccatcttcttagggtcccagctgggcctgagaattaaacttacctaaaatagattaacaaaagaaaagcaactggaacttgttatacagatgttgaggccctgctccacatcaacaggatcagaatctccagtggaggggcctggaaatctctatttcaaacaagtgccccctgtgattcagcaaacttggggaactgccctaaattttctctcagttctgtgcttcatctatacaggccaactggccattccctgaataggctggaacccactcccacctcgcaaatttgagcctggcagacagacctctctccttgctctagaatccaagttttacatggcaggggagccctcataaagaaatgaagacccaaagaagcagttagagtcagttaacttatatactggattggacaaagaatagttagttgtgaagaagcaactaaactaaattgggaagcttaaaagataagttattttaacaaggtctgtacagaattctcttggtttcacttctatgcccttgagaataagaatgttacatttttctagtatagggagggtgtctttcacatgggagcttcatctgt

SEQ ID NO: 317021 - DNA, 4001 bp, Homo sapiens
ggctgaagacgaatgccagcaccacttttcctcatttagaacaactgagttttttccttccataaccaaggacaaggagcaaccggagggaggaggttgaagagggagggggcgggcaatatgtccccaagtttcagacagtagcgggtcagaaacgagcgaaagccacctcgctcttctgagctacctcggccgccagtccccgggatcacatccgcagccgagcgccaagggtccggcctacacagactgacccgggcgtttcacctggtgcccgaccacggctctggcgccctgcccaggctgcccgcctccttcccctcccccgcttcttagggaacaaggaggagagggtggcaaacgcacccagaccgggggccaaggggagacgccggcgcgtgctgggaggggcatgagttacacccgcgacccttggaacttggaacggcttccccagccccggcggacgccggcccccaggccgtgccactgggagcaggcgggcgccgcgattggccgcggccggcttcactcggtgggcgagccctaccggcgaggcggaaaggaagtggcggccgccgcggctttgcaccaaccatgttcggccagcgggcgaatgtcacccggcgcccggagccgggtcggagggcacggggcgggcactcgcgtccccaccccgccgcggcccgcgccccgggaccccgaggggacgccggcccccactgcgccgctcggtccccggaggctccccgcccccacctcgcccgctccgtagccgaggcgggtcaggcccagcgcgcgaggccggccgggggcgcctgcggggacccgggggcgcacggcgctaggccgcggcccgggcggctgacccctcggcacggtgccttcctgggacgcgccgcccgagcccctggcgcgctgggacaagtgcaatgacaaagccccagggcccgaccgggcgctggccggcgggaaggaggacgcggcgtcccttctgagcggcggcggcggcggcccagcccccaggaagcagggcgcgtcggccaggcccggcgcccggcccggctccgagcccgccctcccgccccggccgctggcacccgacgcccgcgacccgaccccgagcccggcaggcaggcgagcccctggaccgccgcggggcgccccagcaagtttcctctggccgtggctggaggcgctcctcccggccggggagcggtgcctgcttatttacgctggaggcagcctggagaggcgccgccgcgggcaccgagaaggacccgctcccctccttcggatccggtggcggcggtggctgcacacacacacacgcgcgcacacacaaacacgcacatacacacaattttgttttaaatgaggcccgactccagctgacctgcacccccacacacaacacctggggcgcagaagcacacacagcaggtctgtgtccatggagccacctctccgcatctgcaaatccaaaagtgaaattaaacctccaccaacctcctcctcctcctccctctctacctcctcctcctcctcctcctcgcagcctcagcagccccagtagcagcagcaacagcagcagaacctgcttcccctaaaatcagatgatccataattgcgccgactgttcctccaaaaatcagtattaatatttatgaaccccggcattttccgtctgcaaaacatcgtgtcaaggcatcaggacacgcatacacacacggccccccacagtccccagaaacatgccctcgagagaaacacacacagtcacaactattatttgaaaaatgttacctctcagtgtgcttttttcacgctaccaatacaattccgcaaggtataagtgttgctagggtatgtgaaatggaaatgaaagcccgtcagttgaataatcgcaggagcaaaactaaaagttactccccggcttgcctgagaacagtccagatcgaaagcaaaacaaggagaggaaactgcgaagagccgcggctggaaatccccccaccccccgccctcctccggccgcgctccctccctcgcctcccctctccgccctcctccctccgcccttcctccccagtgtttgtttcaagcttgtgcaaccgggaggtggaggcggagggagggcgcgagcggcccggccgggaggtgcggaagttcgccgcagcagctcattggcgggcagcgccgctttcatcatttctcggaaaagtcaatttcattttcgcttccccaggtcgcggcggcgggagcaacaagcagcggctcgtgagtccgcggctcgcacccaggggcgcccgcacgtgcggctagaacgtccgagtcggggtccggggcggggggcgcaggcccgcggcggtaggggaggagagcgggcacccgagtctccatcctcagggtggcctgaaggttccaggagggcgtccggcgaaggcacggggctgcgaccatccagttagcagggctggtgtgactgttgagagtaaatgaaaattcgttttgtgacaccgaccacctccaaggaatgaaaggagcagtcagccgaaacgacagcattacttgcgtccttacctaattggaaccttatccgtggctgagggtgccaccattggaggggccgccgccccctctgacaccacctggcgctccgctccatttaggagctagaacgaaaaggaggcccatcccccagtaagtcacagcccacgccaagatgagttctggagcctgtgcgaccgaagtttcttcaccgcagggcgaggtggacaagggtgtgagttactttgacttcaagacgtctcagtggcggctggttctggagagaggctttatgctggagcacttccagcaaagttcggctggggcctccttaactcactggctggtcacccttggcctcggttttcaaccaaagcctaaggcctcagttttcaacgctgtaaatggaaataaatgagagaagaaagtacagcccgtgtgacaagtgcagcaagcaatgcaacttccttgggacctaccctttgtggtcccttgctttaaaagtatagattcacatttagttagacctgtttcttcctcgcatgcaatttcaccagtcttttcccagacttctgtactcaacagaggaagttccttcctgggagaccatagctgtttgtatgtaaagagttgcgaaaaaacaaaagcaaaacaaaaaactccaacacctctctgtcacagaagtattgaattatatagactggaaaaatggaagtatccaagaaaacgcgtgtggtaagaaaatggctaaggtgcaggattctgttttgtggctctggtctcagaaatagacctcacatacacattattccttatcccctctattataatactcacttttttttttttttaagagacagggtaggccgggtgcagtggctcatgcctgtaatcccagcattttgggaggccaaggcaggaggatcacctgaggtcgggagtttgtgaccagcctgaccaacatggagaaactccatctctactaaaaatacaaaattagccaggtttggtggcgcatgcctctaatcccagctacttgggaggctgaggcaggagaattgcttgaacccaggaggcgcaggttgtggtgagccgagattgtgccattgcactccagcctgggcaacaagagcgaaactctgtctcaaaaaaaaaaaaaaaaaaaaaagagagggtcttgctctgtcactcaggttgtgctatcatagcttactgtaaccttgaactcctggccttaagcgatcctcctgcttcaacctcccaagtagctgggactacaggcctgtgacagtgcctggcccaggcactgactttcttatgtcatatagcaatgaccactaagggaaagtctatacaaactatagaatagttgtcattctttacccaacccgggacacaagttaaaaacctagtattcattttttttttcctgtaccaaaacaatcatcttcctt

SEQ ID NO: 317022 - DNA, 4001 bp, Homo sapiens
cgcagctgggaccgttaggtgacgctccggccgcagcggagaagcagcgcctcggccgccgcccgcccccatttccacactgggccgcctctcctcaaacaccagaggcgggctacaaaagttggccccggggccacccagcacctgcccacgtgccgcggaggctcgctcccgagtctcccccggttccctcccccgccgccctcggccgccaggtcacctattaccggtgggaggggagagaggctgctatttaaacgcccgcggaagttgaggcacccccactggcgggtgccgtgcacctgcctcccgccgccgcgctccgccactttgagcagcagccgcgtcctcagccccgcctcctgcccgaaggcgggcgggggggagcgggaaggaggtggaagggatcgaatttctccagcaaatgggaccgttccgacaggattcggttccccggtcaacattccacattccatccctctcccgcatttgcaagccaatgccgagcaacccggaaagcctgctggctaccgaacaacagcccccaactcgcaaacacagactcacaggcacaagacacgtgcactgaagggctctgcaacttgcagtcccggggtacacactacacgttcatttaaggaagcaaggagaccaagagaccccacccccacaatttgcagatggtgccaaaggttgcaatttgcaatcccctttaagttcacgattaatcggtactttgctctaccaacgccaactcctaccccatttcatcgattaaggggttttacactttacaagcagtcgcgctgtaagtaaaagatctgatcactggaagcccagttcggaagaatctaattgccaaactgtccctccacccccacccccacccccctctcactgcccttgaattgatgcaatgaatattttggacatgtggtgacgcggtgacaagagccagggctgcggccaccacacacagatgtacctacgcacacctatgtttggacaaatacagtcccaccacacacacggtctcacacactctggattcatatatgtacgcgaacctgcgttctgccattgccatctgtctaccaagttgctactatgctttccactttcatgcagcctaatgcactttggctttctaaaaaaaaaaaaaaaaaaaaaaaacctataaactaaagccaacttaaactgggcttctgctcctaaacgcgtttaattgatgattcacctgaaaaccgcatgttcttcgcaaatccaaaagaagaaatagctctaagtcttcagccccccaaatttgaaaaaaaaaatcataataaaacttactgatccaacatagatcaattctcaggatccaaaaatcatcctctcctcctcctccggcccccgccccggcaatgcccaagttactggtgggatagtaacgctgcgctcagcggctgcctccctccctcctcgctacagatcgagaacccaatcttttggcgccatattaatgacgtattatattatttccactaggcagcgaccttcggcattaaattactcccgagaactcccgagcaaagcaacaaaaccatcaaatatggctgagcctctcggctcgtcctgcagccgccgccgccgccgccgccgtcgccgccgcgggaccgggacgcgcacacggacccacacgcggacacgcgcggacacacgcgcggcgcgcccaccccgcgcgccccccgcggcccgcgcgcgtacctgctgcggaggggttcggccgaggcgctgggctgggcgccgctcgctcgctcggagctgcatgagttcgggccgcggcgggcggggagccgggcgggcccctgctctcgccggcgcgcacacaccgggcactcgcgcacggaggcactctcggtctggcgtttggcttgttatggaggaaggactatgtgaatcaaactcatttctgggtcactgctgccacaggggggagcactttaatcccttgccaaaacgagagggtggggacgggagggcggagggagcatgcggggagcccgcggcgctggggctcggtccctcgttaactcttcgcagccctagccgcagccggctcagcctgcgccagtgggggctcgcaaagaacggcactgttcagctcttagtctctttccttacttcacccaccttgtgagcctagaaattcttgaggtgtctccaagcaagtgggtttttaaattagccccttcaaactgctgtcccagtttcaactcttgtctgacatctagaaatggattctttcagaatagtttaaaattacgtagattaaaatatggctattaagatgtgtcatttgggtgaaaggttttatttttaggctgagtggcaaaatagttgtttgtagtaacagttttagggagttgcacattaggatgacatttttaaatagagagaatccaattctgaataacatctttacctaaatttgtatggaagtgatcattgcaaatgagcattaattcattagaagatattatttataaattgacaccactttatgttacacattactacagaattggacatcttctcccaaatatgaggagtgagcctaatgctaaaactagaattgcagactagtatcagatcagtcatcggagattcatttgggggtatttatgtgtaaaaaggagtggttactgattttctgcagaagacaagcttgctttttcatatagagggcaacatacttctttcatggattcatctagggaaatagaggggtatatgacattcaacttcaataagaaaaaagtacggattaaaaactcccattcaggccgggcgcggtggctcacgcctgtaatcccagcactttgggaggcctaggtgggcggatcacctgaggtcgggagttcaagaccagcctgaccaacatggataaaccctgtctctactaaaaaatacaaaattagccgggcatggtggtacatgcctgtaaccccagctactggggaggctgaggcaggagaatcgcttgaacccgggaggtggaggttgtgatgagccgataatgcgccattgtggtccagcctgggcaataagagcgaaactccgtctcaaataaataaataaataaataggaacagtgatcactaattacaaaattgaatatcgaacccaaaaggcatatgtgtccaccggaagaatctttctgaatatatcaggtttgatttcatgtaatcccacaccagcccaactacccacatccagacccacatccagaacgttataatctgataaatgcgacaaaacaaaactaattgagcctttcagttatttttcagaaaacaaagtaagccagtggaaatcctaagtactgtatatgtcctctcctgtttcgctaatgaagagtagaaagactccctgccagtcctattcatgtgttcacttaatcctgttcaaagcgatcacacatgtaaagcactgtgttaactatcattattactattcttagtattgcacttgttattgttatttttactggttcacctcgcacatactctctgtagaagttaaagtacacaggctttgtagccagacatggctggatctggctctatcagttagcagtttgtgtgcctgtgggataaaagaactttatctgagcctcagtttcttccctggtaataaaattaagttaacagctggcccctaacctgaagggttgttaagaggaatcaggcaacctcataacagttcaggagtagaggccctggcagtaggaggttgtccactccctcggccatcactcaactccttcttggttttctctccatcaaaaattgcaacttttctaaattccaaacagccttacttcacgcattcatgttaagaaaatttttgtcgaccgggcgcggtggctcatgcctgtaatcccagcactttgggaggcagaggcgggcggatcacgaggtcaggagatccagaccatcctggctaacacggtgaaaccc

SEQ ID NO: 317023 - DNA, 4001 bp, Homo sapiens
cggcggcgaggagctccgagcgggctcggctcccgctcccgctcccgcccccagacagttctggaaactgtgtatcacctctgtcacaggaagccatccggcgaggaaggcggcgcggaaccaacaaacaaacgcctgcggccgcccgccggaaccggcgcggggaccgcgtcgggcttcgggccgttcccggggcgggggcgcagcggccacccccgcgccgcgggctttgtgcggggcgggcgcggcgggccgggcgtccccgcccccgcaaccccccaccccggcccgggcggcgcagctgggaccgttaggtgacgctccggccgcagcggagaagcagcgcctcggccgccgcccgcccccatttccacactgggccgcctctcctcaaacaccagaggcgggctacaaaagttggccccggggccacccagcacctgcccacgtgccgcggaggctcgctcccgagtctcccccggttccctcccccgccgccctcggccgccaggtcacctattaccggtgggaggggagagaggctgctatttaaacgcccgcggaagttgaggcacccccactggcgggtgccgtgcacctgcctcccgccgccgcgctccgccactttgagcagcagccgcgtcctcagccccgcctcctgcccgaaggcgggcgggggggagcgggaaggaggtggaagggatcgaatttctccagcaaatgggaccgttccgacaggattcggttccccggtcaacattccacattccatccctctcccgcatttgcaagccaatgccgagcaacccggaaagcctgctggctaccgaacaacagcccccaactcgcaaacacagactcacaggcacaagacacgtgcactgaagggctctgcaacttgcagtcccggggtacacactacacgttcatttaaggaagcaaggagaccaagagaccccacccccacaatttgcagatggtgccaaaggttgcaatttgcaatcccctttaagttcacgattaatcggtactttgctctaccaacgccaactcctaccccatttcatcgattaaggggttttacactttacaagcagtcgcgctgtaagtaaaagatctgatcactggaagcccagttcggaagaatctaattgccaaactgtccctccacccccacccccacccccctctcactgcccttgaattgatgcaatgaatattttggacatgtggtgacgcggtgacaagagccagggctgcggccaccacacacagatgtacctacgcacacctatgtttggacaaatacagtcccaccacacacacggtctcacacactctggattcatatatgtacgcgaacctgcgttctgccattgccatctgtctaccaagttgctactatgctttccactttcatgcagcctaatgcactttggctttctaaaaaaaaaaaaaaaaaaaaaaaacctataaactaaagccaacttaaactgggcttctgctcctaaacgcgtttaattgatgattcacctgaaaaccgcatgttcttcgcaaatccaaaagaagaaatagctctaagtcttcagccccccaaatttgaaaaaaaaaatcataataaaacttactgatccaacatagatcaattctcaggatccaaaaatcatcctctcctcctcctccggcccccgccccggcaatgcccaagttactggtgggatagtaacgctgcgctcagcggctgcctccctccctcctcgctacagatcgagaacccaatcttttggcgccatattaatgacgtattatattatttccactaggcagcgaccttcggcattaaattactcccgagaactcccgagcaaagcaacaaaaccatcaaatatggctgagcctctcggctcgtcctgcagccgccgccgccgccgccgccgtcgccgccgcgggaccgggacgcgcacacggacccacacgcggacacgcgcggacacacgcgcggcgcgcccaccccgcgcgccccccgcggcccgcgcgcgtacctgctgcggaggggttcggccgaggcgctgggctgggcgccgctcgctcgctcggagctgcatgagttcgggccgcggcgggcggggagccgggcgggcccctgctctcgccggcgcgcacacaccgggcactcgcgcacggaggcactctcggtctggcgtttggcttgttatggaggaaggactatgtgaatcaaactcatttctgggtcactgctgccacaggggggagcactttaatcccttgccaaaacgagagggtggggacgggagggcggagggagcatgcggggagcccgcggcgctggggctcggtccctcgttaactcttcgcagccctagccgcagccggctcagcctgcgccagtgggggctcgcaaagaacggcactgttcagctcttagtctctttccttacttcacccaccttgtgagcctagaaattcttgaggtgtctccaagcaagtgggtttttaaattagccccttcaaactgctgtcccagtttcaactcttgtctgacatctagaaatggattctttcagaatagtttaaaattacgtagattaaaatatggctattaagatgtgtcatttgggtgaaaggttttatttttaggctgagtggcaaaatagttgtttgtagtaacagttttagggagttgcacattaggatgacatttttaaatagagagaatccaattctgaataacatctttacctaaatttgtatggaagtgatcattgcaaatgagcattaattcattagaagatattatttataaattgacaccactttatgttacacattactacagaattggacatcttctcccaaatatgaggagtgagcctaatgctaaaactagaattgcagactagtatcagatcagtcatcggagattcatttgggggtatttatgtgtaaaaaggagtggttactgattttctgcagaagacaagcttgctttttcatatagagggcaacatacttctttcatggattcatctagggaaatagaggggtatatgacattcaacttcaataagaaaaaagtacggattaaaaactcccattcaggccgggcgcggtggctcacgcctgtaatcccagcactttgggaggcctaggtgggcggatcacctgaggtcgggagttcaagaccagcctgaccaacatggataaaccctgtctctactaaaaaatacaaaattagccgggcatggtggtacatgcctgtaaccccagctactggggaggctgaggcaggagaatcgcttgaacccgggaggtggaggttgtgatgagccgataatgcgccattgtggtccagcctgggcaataagagcgaaactccgtctcaaataaataaataaataaataggaacagtgatcactaattacaaaattgaatatcgaacccaaaaggcatatgtgtccaccggaagaatctttctgaatatatcaggtttgatttcatgtaatcccacaccagcccaactacccacatccagacccacatccagaacgttataatctgataaatgcgacaaaacaaaactaattgagcctttcagttatttttcagaaaacaaagtaagccagtggaaatcctaagtactgtatatgtcctctcctgtttcgctaatgaagagtagaaagactccctgccagtcctattcatgtgttcacttaatcctgttcaaagcgatcacacatgtaaagcactgtgttaactatcattattactattcttagtattgcacttgttattgttatttttactggttcacctcgcacatactctctgtagaagttaaagtacacaggctttgtagccagacatggctggatctggctctatcagttagcagtttgtgtgcctgtgggataaaagaactttatctgagcctcagtttcttccctggtaataaaattaagttaacagctggcccctaacc

SEQ ID NO: 317024 - DNA, 4001 bp, Homo sapiens
attattacatcaaaagtgttgactcaatgcaagtatggacatattgaatgcttcctttctccacctttctccacctgtgattaaatcttgatcagttgtgatatgatcaaaatgcaacttactataaaatctgtaaccactggggagtcactacctaaatcagctttcagggaaataatttccctctatcttaaaactagttcattagctttgaaaggtattagccttgagctacaagtagcaagagagctagccttcatggcgggtattataaaaaggaaaaatagttcacctaataaaaaacctttgggaaagaaccccctaagcattcccattaatggaaacctcagatcctctcctactttcctaaaaacgtagctgtctcaggtcattcactgcagctgtcattttacaaaagaaaatttaaattccctcttggccggggcaaatagagggcgacagcccctcgcccctgccgaagtaaggcagggcgccagccctctcgttactagaaggcaagctaaagctccttttaaacggtctccggatgacgacgcattcctaacgggtttcgaaggcatgtttaaatcgcccgcttttttgtttgctctcagcattcaccggcgccgggactgcggccgcccccacccgcttggggtgggaaacctggggccagcggagcctggcgcgggaggaatcctggggcgaggggagacccgggacgcgccaagccggggttgaggactcgagaataaggagctctagtgggagggtggcggagtgagaggggacgtgagaaggctaaggatcccagcaaggggggcaccccggggttgtgggggagctcggccgccgccccgcagcggcgaacgctccgcgcggctcccgccgcccgccggggaatgcgcagggccgcggttccgcgcggcgccgacccctccctctctcccaatcctcctcctcctcctcctcccgaggcgacagaaacaacagcgcgggaggaggggaaagtaactcccggcacctccgccggaattagccccggtgcagtgatgacaccttctcgtggcgcaaccaagccccgctccctccgcagcggcgtccccgccgccgccgccctctccatttgaaagtggccaccccccgccgcggcagctcctcccgccccgccgccgccagctgcaccaatccgctcggccccagttgcaaatcaaacgctccctcgcgtccagaagccacttgcgccgctggaaacggccgcgccgtccccctccccgagtccctccggggcggcaccttcgggctggggcgggcgcgccggcgagaaacggttttaagatgggagcggcagcggcggcgaggagctccgagcgggctcggctcccgctcccgctcccgcccccagacagttctggaaactgtgtatcacctctgtcacaggaagccatccggcgaggaaggcggcgcggaaccaacaaacaaacgcctgcggccgcccgccggaaccggcgcggggaccgcgtcgggcttcgggccgttcccggggcgggggcgcagcggccacccccgcgccgcgggctttgtgcggggcgggcgcggcgggccgggcgtccccgcccccgcaaccccccaccccggcccgggcggcgcagctgggaccgttaggtgacgctccggccgcagcggagaagcagcgcctcggccgccgcccgcccccatttccacactgggccgcctctcctcaaacaccagaggcgggctacaaaagttggccccggggccacccagcacctgcccacgtgccgcggaggctcgctcccgagtctcccccggttccctcccccgccgccctcggccgccaggtcacctattaccggtgggaggggagagaggctgctatttaaacgcccgcggaagttgaggcacccccactggcgggtgccgtgcacctgcctcccgccgccgcgctccgccactttgagcagcagccgcgtcctcagccccgcctcctgcccgaaggcgggcgggggggagcgggaaggaggtggaagggatcgaatttctccagcaaatgggaccgttccgacaggattcggttccccggtcaacattccacattccatccctctcccgcatttgcaagccaatgccgagcaacccggaaagcctgctggctaccgaacaacagcccccaactcgcaaacacagactcacaggcacaagacacgtgcactgaagggctctgcaacttgcagtcccggggtacacactacacgttcatttaaggaagcaaggagaccaagagaccccacccccacaatttgcagatggtgccaaaggttgcaatttgcaatcccctttaagttcacgattaatcggtactttgctctaccaacgccaactcctaccccatttcatcgattaaggggttttacactttacaagcagtcgcgctgtaagtaaaagatctgatcactggaagcccagttcggaagaatctaattgccaaactgtccctccacccccacccccacccccctctcactgcccttgaattgatgcaatgaatattttggacatgtggtgacgcggtgacaagagccagggctgcggccaccacacacagatgtacctacgcacacctatgtttggacaaatacagtcccaccacacacacggtctcacacactctggattcatatatgtacgcgaacctgcgttctgccattgccatctgtctaccaagttgctactatgctttccactttcatgcagcctaatgcactttggctttctaaaaaaaaaaaaaaaaaaaaaaaacctataaactaaagccaacttaaactgggcttctgctcctaaacgcgtttaattgatgattcacctgaaaaccgcatgttcttcgcaaatccaaaagaagaaatagctctaagtcttcagccccccaaatttgaaaaaaaaaatcataataaaacttactgatccaacatagatcaattctcaggatccaaaaatcatcctctcctcctcctccggcccccgccccggcaatgcccaagttactggtgggatagtaacgctgcgctcagcggctgcctccctccctcctcgctacagatcgagaacccaatcttttggcgccatattaatgacgtattatattatttccactaggcagcgaccttcggcattaaattactcccgagaactcccgagcaaagcaacaaaaccatcaaatatggctgagcctctcggctcgtcctgcagccgccgccgccgccgccgccgtcgccgccgcgggaccgggacgcgcacacggacccacacgcggacacgcgcggacacacgcgcggcgcgcccaccccgcgcgccccccgcggcccgcgcgcgtacctgctgcggaggggttcggccgaggcgctgggctgggcgccgctcgctcgctcggagctgcatgagttcgggccgcggcgggcggggagccgggcgggcccctgctctcgccggcgcgcacacaccgggcactcgcgcacggaggcactctcggtctggcgtttggcttgttatggaggaaggactatgtgaatcaaactcatttctgggtcactgctgccacaggggggagcactttaatcccttgccaaaacgagagggtggggacgggagggcggagggagcatgcggggagcccgcggcgctggggctcggtccctcgttaactcttcgcagccctagccgcagccggctcagcctgcgccagtgggggctcgcaaagaacggcactgttcagctcttagtctctttccttacttcacccaccttgtgagcctagaaattcttgaggtgtctccaagcaagtgggtttttaaattagccccttcaaactgctgtcccagtttcaactcttgtctgacatctagaaatggattctttcagaatagtttaaaattacgtagattaaaatatggctattaagatgtgtcatttgggtgaaaggtttt

SEQ ID NO: 317025 - DNA, 4001 bp, Homo sapiens
atatttattctacacattaaaatgacaatgccaagtaaaagacacttatagaagtatccaaactttgaagaagacagcaaaataccaagcagaaagtcatctgatttacaagtgaccgtaagcaggctgggcgtggtggctcacgcctgtaatcccagcactttgagaggccggggcgggcggatcacgaggtcaggagttcgagaccagcctggctaatatggtgaaaccccgtctctactaaaaatacaaaaaaaaattagccagccgtggtggcacgcgcctgtagtcccagctactcagggggctgaggcaggagaatcgcttgaacccaggaggcggaggttgcagtgagctaagatcatgccactgcactccagcctgggtgacagagcgaaagactctgtctcaaggaacaaaaaaaaaaaaaaaaaaaagtgaccgtaagtaaatgagactaagatctttgggataaaaggacaataaaaattctgggttgcatgtacttgctaagagtgttactcacaaaacatcccatttaactccccccacgtatgttgcccacctacaacaaattattacatcaaaagtgttgactcaatgcaagtatggacatattgaatgcttcctttctccacctttctccacctgtgattaaatcttgatcagttgtgatatgatcaaaatgcaacttactataaaatctgtaaccactggggagtcactacctaaatcagctttcagggaaataatttccctctatcttaaaactagttcattagctttgaaaggtattagccttgagctacaagtagcaagagagctagccttcatggcgggtattataaaaaggaaaaatagttcacctaataaaaaacctttgggaaagaaccccctaagcattcccattaatggaaacctcagatcctctcctactttcctaaaaacgtagctgtctcaggtcattcactgcagctgtcattttacaaaagaaaatttaaattccctcttggccggggcaaatagagggcgacagcccctcgcccctgccgaagtaaggcagggcgccagccctctcgttactagaaggcaagctaaagctccttttaaacggtctccggatgacgacgcattcctaacgggtttcgaaggcatgtttaaatcgcccgcttttttgtttgctctcagcattcaccggcgccgggactgcggccgcccccacccgcttggggtgggaaacctggggccagcggagcctggcgcgggaggaatcctggggcgaggggagacccgggacgcgccaagccggggttgaggactcgagaataaggagctctagtgggagggtggcggagtgagaggggacgtgagaaggctaaggatcccagcaaggggggcaccccggggttgtgggggagctcggccgccgccccgcagcggcgaacgctccgcgcggctcccgccgcccgccggggaatgcgcagggccgcggttccgcgcggcgccgacccctccctctctcccaatcctcctcctcctcctcctcccgaggcgacagaaacaacagcgcgggaggaggggaaagtaactcccggcacctccgccggaattagccccggtgcagtgatgacaccttctcgtggcgcaaccaagccccgctccctccgcagcggcgtccccgccgccgccgccctctccatttgaaagtggccaccccccgccgcggcagctcctcccgccccgccgccgccagctgcaccaatccgctcggccccagttgcaaatcaaacgctccctcgcgtccagaagccacttgcgccgctggaaacggccgcgccgtccccctccccgagtccctccggggcggcaccttcgggctggggcgggcgcgccggcgagaaacggttttaagatgggagcggcagcggcggcgaggagctccgagcgggctcggctcccgctcccgctcccgcccccagacagttctggaaactgtgtatcacctctgtcacaggaagccatccggcgaggaaggcggcgcggaaccaacaaacaaacgcctgcggccgcccgccggaaccggcgcggggaccgcgtcgggcttcgggccgttcccggggcgggggcgcagcggccacccccgcgccgcgggctttgtgcggggcgggcgcggcgggccgggcgtccccgcccccgcaaccccccaccccggcccgggcggcgcagctgggaccgttaggtgacgctccggccgcagcggagaagcagcgcctcggccgccgcccgcccccatttccacactgggccgcctctcctcaaacaccagaggcgggctacaaaagttggccccggggccacccagcacctgcccacgtgccgcggaggctcgctcccgagtctcccccggttccctcccccgccgccctcggccgccaggtcacctattaccggtgggaggggagagaggctgctatttaaacgcccgcggaagttgaggcacccccactggcgggtgccgtgcacctgcctcccgccgccgcgctccgccactttgagcagcagccgcgtcctcagccccgcctcctgcccgaaggcgggcgggggggagcgggaaggaggtggaagggatcgaatttctccagcaaatgggaccgttccgacaggattcggttccccggtcaacattccacattccatccctctcccgcatttgcaagccaatgccgagcaacccggaaagcctgctggctaccgaacaacagcccccaactcgcaaacacagactcacaggcacaagacacgtgcactgaagggctctgcaacttgcagtcccggggtacacactacacgttcatttaaggaagcaaggagaccaagagaccccacccccacaatttgcagatggtgccaaaggttgcaatttgcaatcccctttaagttcacgattaatcggtactttgctctaccaacgccaactcctaccccatttcatcgattaaggggttttacactttacaagcagtcgcgctgtaagtaaaagatctgatcactggaagcccagttcggaagaatctaattgccaaactgtccctccacccccacccccacccccctctcactgcccttgaattgatgcaatgaatattttggacatgtggtgacgcggtgacaagagccagggctgcggccaccacacacagatgtacctacgcacacctatgtttggacaaatacagtcccaccacacacacggtctcacacactctggattcatatatgtacgcgaacctgcgttctgccattgccatctgtctaccaagttgctactatgctttccactttcatgcagcctaatgcactttggctttctaaaaaaaaaaaaaaaaaaaaaaaacctataaactaaagccaacttaaactgggcttctgctcctaaacgcgtttaattgatgattcacctgaaaaccgcatgttcttcgcaaatccaaaagaagaaatagctctaagtcttcagccccccaaatttgaaaaaaaaaatcataataaaacttactgatccaacatagatcaattctcaggatccaaaaatcatcctctcctcctcctccggcccccgccccggcaatgcccaagttactggtgggatagtaacgctgcgctcagcggctgcctccctccctcctcgctacagatcgagaacccaatcttttggcgccatattaatgacgtattatattatttccactaggcagcgaccttcggcattaaattactcccgagaactcccgagcaaagcaacaaaaccatcaaatatggctgagcctctcggctcgtcctgcagccgccgccgccgccgccgccgtcgccgccgcgggaccgggacgcgcacacggacccacacgcggacacgcgcggacacacgcgcggcgcgcccaccccgcgcgccccccgcggcccgcgcgcgtacctgctgcggaggggttcggccgaggcgctgggct

SEQ ID NO: 317026 - DNA, 4001 bp, Homo sapiens
gactccagagcagagatgttcagcattacagaccggtacacacctcaacagcaacaaaaatcttgcaacaagccacaagcctccactgtgcgctacaacatcagtctctgcagagctgcaggtctccaggagggtggaaatgccctgctaggaaaggattctaattcccccactctatccccgaatgtgtccctcctccttgcccatcccagctagtggagccaccacccaccagcccagggtgctacaggaagggccagctcctcccatggcctcgccctccacaccagcgggttactctgacttaggggggatggccctgctatgcccaacattcactgtgggtggagccctgggagaggggctgaggctgcccctgccctcctccccacctcctcctctgctctggaaggcagaggccatcagatggtaacagcatcctgggacagcgccacgttccaggaaagctcaggaggggcaaggggatctccctgactacaaggagctggccagctgaagttagggcgttcgcggagagagcacagcactggcaaaggccaaggacagtgtgcctgcgagtgtgcgcagatggggcgggcggcggaggagggctggcggttagatacagtatcgctggagctcagagagccgggcagaggctggcggagagccgaggctggcccagccttcaggagaccggcgagctggggtgtgtgggagcgggatgcttctaaggcgaaaagaagcgccagcctcgtaagcggcctctatctgggctgcccaggccggatgctcaggagcccacagcaggggggatggagcgaaggaccgaggggctgggaggcgaggccgcagcgcactgacgcaggccagcgaggccgctggccccgacgcagggcgcccggcaaggtgtctggcaccacgagagtcaatccttgcgcgccatctccggaggccagtgcgcccagggcgcgccggcccggcaggagggtgggtgccagcctttcttcccatctctcgagcctcctccccggcgcccacgtgggcggagcagcgcgagggtgtgcgtggcaggggccgcggcggcgtgtgccgtgcgtggggtggggtgcgggctgggcggcctcgccttcgggccccgcgccgccggggcgcggcccccagctccatcttctttgccacctgggcggagatctgggggactgtgacctaccctgcggaagacacggaggggacgggccggccacaccccccgcgccactccggcaggcaccgggtgggtccccctcccgctccttggcttgagggcggaatccggagaagagtggaaataggggtggcgtgaaggagagctgggggctgggggcgggaccgggagggggtgttgggggaagcgacgcagcggctgggagattttgcaagggggtctgaagaggagtgggggatgggtatggaagggtgggggaccactgaggtgggatgcgagagtggaagggggacccagagggggcgcgatggccggaggagggggagatggacgatggggcggggcggcaccggtcgccgcgtcccttgccgccaggtccgcccctcggtcgccgggtccacgggttccctctggccagcgctcgcctcccgccccccggcgcacctgtacccacctgctcggcgctcaggcccgagccgggcagcagcagcggacgtagcgagcgcagccccgcgccgcatcctccggccgccccctccccgctgcgagcttacgccgctgtcgccgccgccaccgccttaaaaaggacaaaacggaacagaaaatgaatgcatgcacaaaaaaaatcgtaaaaagcaattgaggaggatggcagtcgcgcgcgcggctcggcggggcgggagtcgagaggccgcggcactggtggccgcgatccgggcaggcggccggcgcgtgccgcacgcgggtggctgcagctccctcggtcgcccgcgcccggctcaggcacggcaccgcccctccccccggggagcccctccgattggtctgtcttcctgccagtcaggcaggagggcgcggcgcccgccccgccccgcccccgcccccgccccgggcagatgccgggagctctcctgccgccgtgggagggggagctgagctgccggagcgtgcgcactgggccagcgggcggccggggcagggctggggtcccggcgctgagcgcccccagccgcgccgggcagcctggcgcctcgctgagtcggagcaacccccggcaggagctttcaggctctggtcaagcctcgggacccgggaagctatccctgccctcgggggctcgagcctggagtggggcttgcaggtaaagcggggctggggccgtcctggccgtcagtggtcaggaagacgcagcgaccccggagatccatgtccccctctgtacgcatgagaggtctgaaggtcagaggttaaagcgcacgctaacggcggcagagccagcaagcggcagagctgggcggatgccagcctagggagcctccccccaccagcccaggctgcccccagcaaagccacatcagcaggtcatagccaaatgaaagatgtgctgtcgagctgagacttgggaggggcaggactcagctgggcaaacattcattcagtgtcattagacaaatatttattgagcacttgctgtgtgccaggtagtcactaagatgtggggacaccacagtgaacagcagagaggaagcggctgcccaccagagcttactttctagcaaggagaaggcagggaagagcacccaccaaagggagcagcatgggggaacaccctgactgctgtgaacgggacatatttgagaatctgataaaagtatctgggccacagaatggtgagagggagtgtgtggaagatggggggcgggggcacagaggggcagcacttgcaaggtcttgcaggctggcgagagtttggagactgtctcacctggaaggtggtcccatggaccattgtcagattgatattttttaaagtgcatcagtcaggataagctatgttagccacagtaacaaccaaacccaaatctccctggtgtgtcttgcccacatcatacatcctgcctcggtcaatggggctctgttcatcagagtggttgggagcccaagctgctggggctgtctgccagccgagcacccacatggtgcagcaatgtgaatgaaaggtgacaattatgctggctttgaaggcttcctccccgaagggactctcgtcacttctgctcacgtttcattggccagagcaggtcacatggccatgcctaacttcagaagaggaggaagtgcagacctctaaggttcagggggtcaggaggaactaggatatctgtgagcagatgtgagactatctttagcagatgccctggctgcccttggggcatgggctgaagtagtcaagagtggggacaaggaggcagtgtgggggcctcctccacgctgatacagtgaagtatcagcgcatcagagcaatctgggtgcagaattggcaggacatgctcacggcttggacgtggacaggagggagggagggacaatcagggacaatgcccaggtatcctgggatgaattgtgttccccccacccaccccctcaaaaaaaaaaactcgtatgttgaagtgctcactcccaggacctcagaatatgaccttacttggaaatagggtcgttgtagatgtaattagctaagatgaggtcacaatggagtaggttggattcctaatccagtctgccttctatccttataaaagggggaaattggatacagagacacaagcaacgggagcatgccgtgtgaacatgaaggtagagatcaggtcgaggcatcagctagccaaggaaatgccaaagatgggagcaaacccccggaagccatgagagcggcctgggacagatccttccccagggcttcatagggagcgtggaccagctgacacctgatttcagacttctagcttacaga

SEQ ID NO: 317027 - DNA, 4001 bp, Homo sapiens
gctagacaggcagaaaactgtacctaaatccagtcagaaacagacagaaccttaggattgccctatcagagaggaaaggacagacaaccatggaaacctcatggaaagctttcttttataaaatatttctctaatttcatagcaaggtaaaagatcacctcttgctcattttcaaatgtgacatgataccataaatggcacatcatccttacttgaatgtttaaagctaatatgcaggtaatgtcaaagtcatagtgatgggactaaacatttgtaatctaaaggtgaagactgcgtgagaaacaccacagagctccgagttggcaaaagtcagatacagactctcaatgattattccttaaagaatatccaaagtcaccacaattcacattacctaaagattaaaatgcggatattaacaggaaattaacattaggatgttaacaatcctcttaatatctattaatatttgatgatgctctctaaaatcatttgattgtcagttactctcttaaaatggttttcccttattacactaacataattgtatatgcagtttagttaattatcgccaagactttactttcttaggtaaaatgttgctcaaattcatctctcagctttatatcagcacaagatcacctcttgctcattgtcaaatgtgacacgatatcataaatggcacatcatccttacatcatccttacttacagtgtgtgagtttctttactctttttttctctttatttagattaaagaaaacaaatataggtcagtatttgaaaaataaagctcacaacagttctttatgaccagaatcaaagtgtgtgtcctgttaaccaagatttgtctctcagaagtttgatgatctgttaaaaaatatatatattatcagtgtcaagtattttagtcccacctgtcactaatttaatgacggcattgcctaggaatttcatgagcaacaaaactgttgatttagcctcataattttggaacatattaaaaatattttcttgctatcaacacttagatttaaatagaatttctatttcaatcatgaaaatttttaaacattgaaatccactgcaatgaaacaaatatgaaacctcacatggacattttactcttcagctgttttcatattttgctcacattttgcaaggaacccagagatccaaaagaaatatccttaactctttcccggccaagccctatgatcaaacacatgggaaataatctatggattacaataatcaaacagttctagagaatttctaaatatctgcaggaagaaaatctgtgtgcttttcaagtaaactgcagcaatcaggaaagaagagaaaaaccccttgcacaatcatgtatttaaaaaaaaaatctttctactctgcagatactgtttcctgaaatttaccaagaacactgccttgaagagataaaaaaaatacatccatagaagtcagttctacccccaaaagagctgcactgcacacatttttagaaacataaatctcagcaaatacagttgcattttattgacaacattaaaaataatcacaacaaagaaatagcctttcctattccatttcaacttcattaccatgctctactagcctctactaaaaaaaaaaaaaaaaaaaaaaaaagtcattacctgtatgaagagaacctgttaatagtctgagaaggtactgggcaaatttcagtatttcacgtttacaccgctttctacagccactcatcttaagcaacaaggtattcctctgaggagagccagaagtctttgccaataataataataataataataaaaagagagtctctgaggagaaacttctgtctcagtttatgcacaggctgccttacaactcctgtggaattagctgttagcgcctcaatcagaaattcctttaaaatgctagagaagccagatacagctacaacagtaacagggaggtgagaaaacacggcttctcagtgtggtgaccaagttcttctgtggcaacagacaggctgccggttcacacttgtagtaacccagctctggttcggctcggcatcccctctccagaagcagttgcaacctcacagaccattcagagggaggcggggcctgcgatgccagctcatcagtgaatcagcatgtaagcaggtgagaagacagatgacaggtcactgggtctgaaacccttccgataccaataaagggaacctgcgagtgcactccagcctgctggggaggaatctcagggcccgaggctgtacaaaatgaatgattcccaaaaaaaggaggtggggagagggaagcatgctgctcaaggtcagacatcagacaactcccttgacacagtgttaatcagattcaggaaggctacatgggggaaaggctcatttgagaagctgaccctgattctaaacagacttgacgatttaccaccaaatggggacaatgctattttgtcagggataaatgtattcttcttcatgggcttagagggagaaaacaagctgtttcttaaaactggctacattttctgcacagcgcgggctcaggtatttggaaattaggatacataattgtctcctttaaaacacagtagcctagaaaccagaaatcttaagccctttacattgcctccaggcaacagagctccaaaactaatttactgcgttgtcctaagagaaagaagtgcctcagtttcttcatatttcaaaaaggcaaacacaaccatctccctaccaatcaacttttttaaagttaatagccagaacaattgcaaggatttgcaattttcacaaagtactttccttttaagacattgggatagaggcagttgctgtgaaagccagaaaactacaggcttgccttctctgaaaaagtggttttcctgaattcttaagtgccttaggcagttttcgggatttgtctacactcttaatttatactcctagagtttgtttatttttgtttattctgaataaatataaatattatatctgtgagatttagcacagatggggccatattttaaatacctagacaggccttttggcttctttttctgacagttgcaataattctagttgaaactgataattcccaacagtactacataagaaattatgttcttctacactaaagaaagaactcctggactcatagactgaaacacattgaatggaaactcattctcttctagaactcttccccattcccaccagtctcagggttctaaccattctaaccatttaaatggaataacaaagcatgcattctaggaattttcagaactttaattgaaattatttaagatataaatagactcatacacaaaaatcagcaacgtgctttctgaagttctttctcctacacatttaccatgagtgatggcatccctaagtttgaaataggcagaagaaatacacaattgtagttcaacagttggtttaattagttgaacaccccatttccttatctacaaaagtgggaatagaatgcatattttatttacttgttggagagtaaaataagatagggaatggacaaccttaagcacagcacttttattcatagatgtagcaattctatactgaacacctattatgttccagacatggttctatgtgctgggaaaacagtggtaactgagaaaggcaaagcctctgttctcatgcagcttacacctaaacaaagaaaacatcaggttatcaaataataaataagaacatatcccatatgagtaagtgctgttgaaccaggagagaacattaaaaccagctggcagaatagaaagtgagtaggttgagaggtcaggaaagaggtctctaagaaaagaagttaagtaggagtttaaattacaagaaggaactgaccgtgagatgtttagggtaaagggcaccttgggtggaggaaacagcttatgcaaatacgccaagctgcgaatgagcttggcatccttaaggaacagagagaagggtgtggctgctgaaacatgctgagc

SEQ ID NO: 317028 - DNA, 4001 bp, Homo sapiens
gttgcatgaagaagaaagttgtaatagcatcaaatatatataaaaatatatatataaatatatggaacacaccaaaagaaacaatcattagtacaagagagagaaatttttacaagaagtaatgaagaagctcttggattcagaatagtgaatctaagtaacaaagaggaataaataatgaatcaaataattacattaaaaattaatttcatgttgaaatgaaacaaagtactaacatttattaaaataacaaaatgcaatacaccaccaaaatgagactatcagaagtaaactgttcaatgaatactgtcaattcaatgatgattttaaattaatgtacaacaaagcttaaaatgtcatgaaatattacaacttacgttactaaaggaaatcaatagacattcccaaatttgacaacaatcctaaaaatgtatataatattacaaataatgaattatgaagtaaaataaagctttcctattgacaataaaaaataaatgtttatcaactctgtgataagcctgaattatttttctatcttctatactaaaagtagtgcaaaatcattcaactttatgcaagcaagaaccaggaaaactatcacacagatctataaggcagctattttattttagaatgttactcttttaattttttcatatgtatatcatttgtcagttttctaaaaactgtaatttcaaaattgatcattcctaatcctaactattcatttttacacttagttttatattttaagcatgtatttttttttcataagagaatcctaaaactgtgtaatctctggaccccatgaaacctaaatttgctctacaatagaggtattagatgatgtaagtaaacttcaaagccaattcaaaaacagggacctaatactgtttatgttgtttgctttgttgtagctaatatgtcagctgtgaaaataagtaattcaaaatttaagctgctggaactttaaaatattttgagcttaaagggaatgtgaactaaatctcataagcagacagttgtaaagtcagcaggtgtaacctttgtttctccgattacagattagccttttccttacctacattgtcttgtaaaatgttgcaaatgactaaagggtgccagggaagaagacctttttccttttaagtgttgattttcattatagattaccttccatctttcttctctcacacatacttcatgactaccgcattgtctacgatggaatgttaaatatactcttaaattggaaaggaaataaaaataacctttatggataagaaaacgaaccataatttattaaattgttgtgactcctaaactagccttgtacaaaaaatgttataatactgttaaattgatttattttctgcctatataagcaagaccttaacttttaacatctgagtactgatcccatttctctggagttcatattttccggatggtctttcccagctttttgcatgaataaactcttcaaacctggattctggtcctttcaattatttcaggctgacatagcattgaaaaatagagtaccactgacctagagtcagcctatgagaaattctctctctgtctctttctctctctctctctctctctcacacacacacacaaacacatacataaaaaatttaagacattgtattaactttatagctccacataacaaattaccaaaaattgagtagtttaaaataagtatctatttattatctcacagttctgtaggttggacgtctggacacacttgactgggttctctgctgagaatctcacaggctgaaatccaagtatagctggctgggctcttatctggaagttccaaggactaatccactttcatgctcattctggttgttggcagaagccaattccttgacattgtaggtctgaggtcacaattgcattgctagctgtcaaaccgggtgctgctctctgcaaccagaggctgccctgcattccttctcacacagagcctccatcttcaaaccttcaagtgcatcaagtcctttgcaaaacccttagttctgggaattgcccacccttttcctggaaaactcatgaataattcacctcttgtttaatgtgtaatcaagaatcataaaaatgggcaaccagcagctgttggggctgttctgcccatggagtagccattcttttattcctttactttcataataaacttgcttcaaatctttctggcttgttcttctgccactggttggagaaagctttatacttttaagttgtcggaggcatttgaactagaacgactccatcttgaataggggctgggtaaaataaggctgagatctgctgggctgcattcccaggaggttaggcattctaagtcacaggatgaaataggaggtcagcacaagatatacatcaaaacccaccaaaagcaagatagcaaggagagtgacctctggtcgtcctcactgctcattatacgctaattataatggattagcatgttaaaagacactcccatgacagtttacaaatgtcatgacaatgtcaggaagttaccctacatggtctaaaaaggggaggaacactcagttctgggaattaaccacccctttcctggaaaactcattaataatccaccccttggataacatgtaatcaagaaccataaaaaagggcaatcagcagccctcggggctgctctgcccatggagtagccattcttttattcctttactttctttttttattattattacactttaagttctgggttacatgtgcagaacgtgcagttttattacatggctatacacgtgccatggtggtttgctgcacccatcaacctgtcacctacattaggtatttgtcctaatgctctccctcccctagcccccaaacccacgacaggcccggtgagagatattcccctccctgtgtccatgtgttctcattgttcaactcccacttatgagggagaacacgtagtgtttggttttctgttcctgtgttagtttgctgagaatgatggtttccagcttcatccatatccctgcaaaggacatgaactcatccttttttatggctgcatagtattccatggtgtatatgtgcccattttctttattcagtctatcactgatggacatttgggttggttccaagtctttgctattgtgaatagtgctgcaataaacatacgtgtgcgtgtgtctttatggtagaatgatttataatctctaaggtatatacccagtaatgggattgctgggtcaaatggtatttctagttctagatccttcaggaattgccacactgtcttccacaatggttgaactaatgtacactcccaccaacacttgctttcactttactctatggacttgccttgaattctttcttatgcgagacctaagaaccctttattggggttttgatcaggatctcttcttggataataaaggaattataggactagatttaatcacaagattagattagacccactcacataattttgctatttgaaggtcaatcattggggacctataatcatagcaatgacatttcaccatattcttaggttctacccacaattattttgcaagggtgaggggttattgggggccattcttagaattcttagaattctcacagactttctatcaggattacaagatttatattgaatgggtagtctaaactaaggaaaagcaaaaagttgactcttcacagggagtttgagccctagttcatataaagcaaagaaaataaatcagagatagcaagagaccaagacagatagatgtaattcgaagagagagaaacagaaactaacttgccatgaaccgaaagattgtatattctttttcctctctgattcactaatgtatgctttctaggagaagacataacatattctaaaatgtttgtttttcttaaaaggtatttgcatttcctaattggcatattatttcataattatactcatactaaatctgaatgtttgagcc

SEQ ID NO: 317029 - DNA, 4001 bp, Homo sapiens
attggcaattttgattccaacctgaaaggagaaaagcaatgactctaataaccaacaatctttgacaaatagtggcaataaaagtgcctgcagcttcaatatcatgtaggattagggctctggcatttttctagattatggtcttccaggttgctgatgatgttatgttttgtgagatggtgtgcatgtgtgtgcaatgaaagaaaaaaatcacagcaatgtatctaaactataattttaatttttgtatgtgcattggcttagtgctaacgaaagttatttagttctgcctcctctccccacagaatataatgtaagctctaatagaagagctttctttgttttgttttgttttggtttggtttttaatctgttttagtcactgctccatctcccagcacaagaagcaggcagtgacatacaataaatatttgttgaatgaataagcaaattaattaaatcttattatgatgatatatcacctttggtcagtgccattgaaacaaattgctattctattctgggacttttcactgaatgtattatgttgtttgtggttctttccatattttctcatttgtgttgtggagacccatgacattttagtgcattcatatttttaaatcactaattgaatccatgagttcctacaaaatggtgtagcagtataaaaagcgagtaggtggagctgtgggttatagccccaatactcagggaattccacctagatttttaatgttgcattttctcactagcaaataacaccaccttctctgtctgattctaagagttgtttgatgcttgaaaaaaattgtgtataaaagaaagtttgtacacagagaatatttgtcaatgtatattctaagttatatagcatctttataaaataagctgaggatttcctttagatattcctctattttctactctttaagaatgccacaaaatagagaaaaagaagatggagaatgtgatggttaacctcacttgtcaagttcggcaggctatagtacacagtgatttaatcaaaccctaatctaagtgttgctgtgaaggtattttgtcgatgtgcttaacatctataatcagttgacattaagttaagcatagattaccctgaataatgtgggtgggcctcatctaatcagttgaggcttcctgaagaagaaatcctgcctcaagactgtgacatcaaatccttcctgaacttccagctgccagcatattctatgaatttcagacatgccagtccccataatggtgtgagccaattccttcaaataagtctctttacatatatgcatatgtacatgtgtgtatatgcatgtgtatgtatgtatatgatatgtatatgcttatgtgtatgcacatgagtatgtattggttctgtttttctagagaatcttgactgatacagggaaagaatcaacaaagaagaaaagtcacgtttatttaaatgacactttgtaatcttttttctaatctagtgatatttctgaatttgggcagtgtccactgggattatagacccagtggatgagagtcaaacaatgtacaaggtcatatgttaaagtgtccagctgctctgctaacaaggcaagcaataggaattcctacagttacttgagtccagtccccatcccttacatcaaacaaaaatgtcccagtgttttgcaggacaggctcctgtcactaagactgtgctgtcagtctgcaaaatggaaaatgactcctaattgcccaaatgttctcctgggtatttaggtaaacatgagtacatcaatagattgcttttgtagaatatactgattctttgtagagaacggcaatgcatgcaggcctaaagaaacgaaacaagagtttcggaggaaaaaaaaaaacaaaaaaacaaacttgctttgaatagcaggagacgacgttttggcagctgagcagggcaagagcttcatgagccgctctttaatgctgcgcttggtgctgttctgagcgtacaggaaacctagaagatacaggatcagttctgttaatgctgtctgcagagagaaaagggacgtgctgcagggtttatcagagaagccaggcaggaaggatcagggacgcagccatccactcaggcaatcacaggcagtgggttgggacccccgaaaggaaaaaaaaagtttgttttcttcttatttagttttgtttttatttctaaatgttgttttgaagataatgacgaacaagtgaaagcagaatcgtaaaatatatctattgaacggcaaaagattaaaaaaagccaccaaaaaaatctggtggtttttttttttttttttttggcccttagatcagggataaaacaagtatcactagaagagttaactggattgaaatttcaatattcaaaccagcgctaagggcccacatgacaattttctgctattgctccccatctttgattatagcagagatagatgcttcacataaatcattcacaccacaatcacctgttagtacctttgccttcctgaaaatgagaaaataaatgtccttaatatgcagcttcattagcatatactgacatgcccagagatgtgacaatctttcccattttttacatgtggacgctaatgaatggaactttttcaaacagactaattctggaagaagccagacaagcttgtcaaacattaacccaggaatagacggagcagtatgtgtgacagcagatacctggagatgactcaagaaaaatcaaaagtggctggacgggtgagcttgcaaactgctgaaacaacttttgatgtcaggagccaactatccaagtcagcatcaatttacccaccctgaggtctcagacacttggatgtcatgttaataggtaactagcctccccgagatcagcatgcaaggtgtcaaatataaagcatcagcgcagaaaacaatttaaatcgaggttctaccatctttataacaggaatctggcaaatgtatcacttgttccttttctagttcttatcttggaattataaaaaaattcctgaccacaagcctactgatttagtttcctaaatcatatgttgcacccaccaacagtatccactggctaaaactcatgtgtgtgtgtagagtaggatgacaaaatgaagtagtaaatacacaaattaaataagatcattcctctgattaaaagccctctaaaagcttcatgttgtttttctatcgaggacgccaagtatgatctggccctgtctgagtctctggcagcatttgcagccactctctctgctttctgggccatccactattggccacactaccctttttgcctttggtagaactcacaaagcaggccgtcctctggccttgacacttatgtggtatgaaatgtctcattcaactgctggttgagggtctggcatgtaacagaaggtcaataaatgcctggcaaatgagtaaataaattcactttggatatctaaagaagacttgattcatttcctagattagtatctaagtaagctttttaaaaattttactttaagttctgggatacatgtgaagaacgtgcaggtttgttacataggtatacatgtgccctggtggtttcctgcacctatcagcccatcatctaggttttaagctccgcatgtatgtgtagagtggggtgacaaaatgttataaatgtccttaatatttccctccccttgacccccaccccctgacagacccccgtgtgtgatgttccccttcttttaaacttgcaaaataaatctggtttacataaaacacaccctatattttgcttctgatttccatttctggaaggatgcaacgatttaactaccctctcctttgcaaactcctccaggacatgagggtcttactttagctccctacacaggcactctgctcctcccctttatgccatttcaaacctccgtgccaggatatgtgctgttccctcagttttgtcagctgttcaccaactctcaacttctgtatcccagtgcagccttttt

SEQ ID NO: 317030 - DNA, 4001 bp, Homo sapiens
acagagaaaccctacggggatggcattggaataataacatagcagcagtcgaggaatacagggatgctgagagattggattcagttctcctgtgttcaacaaacattctgtatctgatgtacaatccaatgttaaaaagaaaaaaaaagtctgcttattactagatctctgaattatagcaaagaagtttaggtgttcacatgaacacatttgaagttttattctgtgattcacctcctctgagcactgacttttggcccagattggtcttttacacctcctttcctttctgtccttgctgctcagtgtttttctgctgccagtggtcaataccactgtttcattgcaaatacctgctgtctctgaagcctggaaccactgcagaataggcataactactcatcctctttcctggttgtcaaaacccttttccctttatgcatgtttatttgtatgtattgtcttgatatattacctatcagattcctttaatcagtggtctgtgtgtgtggtgagcactcatctccattataatctcctctgcccccacctattgccacgaagtcctaggtctttgcagatgatcaaattttggagaagaaacaaatttactctgcataatagagggagaaaaacttagaaagcccagggcaaggagaaggggctgaggagcagaaatgggagaaagacagactccattcattcagacagatggtggaaacttgtgtgcaatgcgcatgcagaaaccctataaaaatattctgcagtgtcaactaccggtatgaattctctgagtaaattgctgttgtggattccaaagaagaggtagagattcatatctagtctgcataaggttggacaaaggcagcagttgtggtggtcagatgtgaagaggatggcattagaagaaatccttggacatcacagacttctacacgcactggaactggggttcttaggggctgggtttcaaaaggatcaaagcaatttaatttggatctccaggggtgcctgtagctactttggtttccatatgtataagaacaaactatatgttgggatgtgtatgctatttgatacataaacatttgatgcctttaaggatgaactgttttcagatagattcatgacagcaagttttctctccctattcagaccataagctccttaaggatagaagtgtatcttctctggcttttgaataacctgcagcatctagtttaacccttagcacatacaaagtatttggtaagagactgtgtctcatagtcagcctggatccactcactttctctcaccccaccctctggggttttctgggctctcattcccttttgaagatggttcacccaggagggagggtcatctgcacacctggattgcagagaaccaggtacagtgatgacctacagacacctgtggtttacagacattggcagcatggttttttaaactataaaagttacagtaattatcctccaattccaggaatggaatcccttgataggcctcaatctacattcaagattcaagtcaagcaccagcctgtatttaaaaactaaggaaacaatggaagtttaatgaaattatgtcattatagttgatgaagagaaaatatttcaaccaagaactgaattgaataaaactttctcagaaactctttgtttaatgggcaatcacagtatgccagcatgggtgtgccacagagaatcaaagtccacagatactgattatattcctatctgggaaggatcagtatgaaatatacatatgatggggctctcatagaatgggatattttcccccttttcctctcatttctcaatgctcctctgggaattgtgtgaaggtaaagtcaaaaagaaagttcttacattcttaaatcctctgtaaaggatctgaagctctttcttggtaaatttgctctgggcttccagaagctcaagggcttcaggccgatgcctgacggtggccatctccagttcatcttccacgctgtctgtggaggaaaacaagaaagagtcttaggaccagccactgctcaccgatgcttacacagagcaacaaaggaaaacggaagaacatgtctgctaatgtctgtgactgtccacagaggaaggaccctcacaatgcctataaggcctttacatttcccagtttaagcgtattaagctaaaacacttgtatatgatttttttgcatattcttgtcattaatgtagatattacaaccctagcattgttttaagacaacaaaaaagagcacaggaatttatttcagataatcagtggattatatgattacgtcaaacaaaaagtttaagtagcaatatatattactctataaatctaacagtaacatatatttcttttttccccaacgtttaagttcagaggtacatgtgcaggatgtgcaggtttgttacatgggtaaacatgtgccatggtggtttgctgcacagatcatcccatcgcccaggtatgaagcccagcatccattagctgttcttcctgatcctctccctcccccaacaggtgcccagcatgtgttgttccctggcagtgtccatgtgttctcatcaatcagctcccacttacaagtgagaacatgcagtgtttggttttctgttcctgcattagtttgctgtagagaatggcttccaactccatctatgtgcctgcaaataaaatgatctctgtcctttttatggctgcatagtattccatggtgtatatgtaccacattttctttatccagtctatcattggtgggcggttaggttgattctgtgactttcctattgtgaatagtgctgcaatgaacatatgcaggcatgtatctttataatagaatgaattatattcctttgggtatatacccggtaatgagattgctgggtcaaatggtatttctgcctctaggtctttgaggaatcaccacactaccttccacaatggttgaactaattcacactcccaccaacagtgtaaaagtttccctttttctctacaacctcaccagcatctctagcatttttaaggtatagttagaaaaacatagaagatcacaaatagtccaacctggaatttgtttctatataacaaccactagttataaacaatggaattgtcatttaataataatcagttttgtgccctatgtaaaatgcaactacaagatagcctctgataatgttcactaaggattccaatgaaatcagatattttgcacagctacttgggaggcggaggtgggaggactgcttgagcccaggaggctgaggctgcagtgagcagtgatggcaccactgcagtccagtttgggtgacagcatgagaccctgtctcaaacaaacaatcaaacaaacaaaaaaaatagaaccttagactctcagaatggaaggacatctgaagaaagatataaggagatagagaaagaaggaaacctccctaattcattctatgaagcatcaccctaataacaaaaccagcaaatgacataaccaaaagagaacactacagactgatatccttgatgaacatagatgttaaaatccttaacaaaatactcactagctgaatccaacaacatatcaaaaagataatccaccatgatcaagtgggtttcaaaccaggaatgcagggatggtttaacatacgcaagtcaataaatgtgatataccacataaacagaattaaaaacaaaaatcacacgatcatctcagtagatgctgaaaaccattcaacaaaatccaacattcctttatgattaaaactctcagcaaaattggcatacaaggcacataccttaatgtaataaaagccatctatgacacacccacagccaacataatattgagtggggaaaagttgaaagcattccctctgagaatggaaacaagataaggatgcccactctcaccactcctcttcaacatagtattagaaatcctagccagagcaatcagacaagagaaagaaaacaagggcatccaaattggta

SEQ ID NO: 317031 - DNA, 4001 bp, Homo sapiens
gaaaactcatcactttggtctcaccttagccaaggtataaaacaacatatttctgttctctaaataaacagtgaacacatgctgattctggagatagcagtaaaaggtttgcttttttaaatgtatagtactccccaggtgtgacttcatcttcatttcccatttatagtgattatggccacccatgaccctgtgcatagtctagacatgctgattcaatccccatccggttgatggaagaacaggtacagtcaaagagctgtggtcactgaggagccaagcaatgcaagccatccagatcctgagacgacattcctgccatctgctccagccttgagttccctgggctgccgtgtgtgaatgtgtctctaataggacagcgctagccctctaccctgtttattctaaagaactgcaaagacagagaccctacgaactcaactcaacaccccaaaactactcagccctctacattaaacacgccactcaggaaacatttgatctcttaaagattgtaagcatttctcacaagagataatctacttatgcttggctcgtaatgagtgggcatctccaggcataagtgaaaacagaactaaacacagttacaagtcaaatgtggggctttacaggtgatgttcatattattttttccagtccaaaaggattaagactgttctctttaaaatttcatattcaagtgagactagtgtcctcccggttacgatgaccttaactattggagtgaggaaaagaaagggagggtgtccatttccatttctcatggccataaattcgaatgattgactcaagttgttgaggtgactccatttccctgagtactaaagaaggcagcaagtggaaacacctctttgcttgcaagtttacagccctcgagtccaagtttttcaccctctaaacccaaactatgctatagccatatgtgaccccttagcttatgtaatcagggagaggtccagccctttatcactctcatgtgccccaaaatcacttccattctctttccggctcctgtaaaatactctgtacacatcaaaaccacctaataacaaatcgatgcaacccaagacgctttgtggaagggcatcgtctcctatttctctatggatcccaccaaacagcaaaacatttctccctgctttcgcagaacgcacgtttctctgaaagccaagctcctaacacagtgcccgataccttaacaaggctgtactgtatataaattatttgcaagtgtcactgaggaccattttctctgaacacactaaactgaagctagccataaaacaagccatacgctcctgctttagaatctgacatgggcaagatgccgccagtatattaccaggggacaaaaatacagttgtaatgaagaaacgtgtgggggcatgaaggaaaagtggaaggcgaggatcaatactatttcagctcattaatccccaggtgttaggggaaggaagcgtgcggtctggagtcatctggcagatgcataaacaacctcggaaattttcagagaaggcaaaagtacgcacaggatcgcaggggaccctgccaccggcgagtttcaaacacacttcaaacatcttttcttccccgacctggatcttgcatgcacccccctctcctttgcaccccattcctgccgctcccacctccccttcccagtcccgccaggtgactgtgtctcatgcagcgaaggcaacaagcgtccccagccgaggaagggaaggggcagccgtcttggctcgcgagggaaggagggcggaagcgggcgcccgctcgcaagcttattgcatcctaccgcctgtagagctggcctcctccagctgagccgaaatgctttccaccctcctcacattcatgtctagggacgcagggtgcagaagcgagactcgagagtccaccggccaggggcgtctgtccacgggtctgcacgggagcgcaccgccgctcggcccgggggcgtccgtggcgctgggagcgagagcttcggcggcggctgcgggcagggcgcgcggagcgggctgcaggtgcgggcggaggccggcggggggcgccgggggcgctgcgcggcccttggcggcgggggcgcgcggggtggcgggggaggccgaggcgccggcagcttcgcgccggcggctggaagcgggcgggctgcacgggcggctcgagtgcggggaccccagcccctcgccctcgtgagcgccgcccctgccacctgctgccaagtcaccggactggggatgcggggggcggggtgcggggagaggaaagcgccgcgggtggcacggtgcctctggcgacagagtagatggacccgaaagagacccgaggtgacttcgggctgggcaggacacccccgggagttgccagcggctctcagcgggcgcctctaggaccccttgtcactgcgagcagcgcctgctctggggaggggctcgaaggcgccgcgccttctcaacgcgccgctgcgtcccccaggggctccaacttggacagctagactggaaatactgctgcacaaagttaggctgagttcgaaggacaccagagaggaagcgcaaggagatgcccttctccggagccgggcagagcgccagaactcctagacgggaaactttcccccattgaagctagaaccggtcatgcgactcggctaagtgtggggaaacactggctctagactccaggtgaacatcgcagggccgaggtgcagaataccaccttggagagagggggtggcatagactggtggcattttggagaagcatccatgtggggggtttcatttgagatctcccaggcaggtcaaccaggaggtatcgctcaccacccgcaaggtcatttgcccttctaaagcacagtaaggccgggaatagttgggaaggtaaagagaaaccaatagaccacttgtggccatggttactgtttgagaagtcaaaattaaaatgcagatttctgtgtccccaagagtcaagtgcatgaagcctctcttttcagaagaaaggtcaagttgacccgttctccaggcaaactgaattaaaattccctctcactctcagctgcaaggtcagttggccatgacttgggtggaagccatttctaagtgtttgtgaaactatttgccttccctatggctgctggattatttatacacactgtcaccaagtgaaatcttccccctttctccaagtaggtctcaattgacaccttattgcccttctccccacccccaaacgcacgagcgatttacttagtcctttgagcccttgtagcatgtatttgtatatttcttgagagccttttactcttttagttcattgttaaggagacagatgctgacaccccattgtctgggttcaaatcctagttccactacttcataatcctgtggcctggtacaaatatcagctataactggtacctacattattgttttgttgtgaggatttaagaaaatcaatagatgcaaagggcttagagccgtgactggcatgtagcaatcactgtataaagacaggcaaccctgattcttgaagttgagaacaatgttatattgacaaagcaattagaaaagttccttgcacatagttggtcttcactaaacatttgttttttcattattcagcaaacatctagtaactactgtgtacaagacacaattataggcactgggataccacagtgaatacaacaaagaccctcagttattggctgactatctagaaggcagagagactgacaataaatcaaggaatcagaagtgatctgctagggagatcacttttatatagggggtccataagggctttatgaaagaggcaacatttaattggaatcctgatgaaagcgaggagctagccatgggcatctcaagggaaaaagaacttccaagcagagagaagagcaagagctaacataagaatagcatgtttgcagggcagccaggaggttgacagggctgaagtacattgagagaagga

SEQ ID NO: 317032 - DNA, 4001 bp, Homo sapiens
acactattgctttctatctctgtcaacttttattcattaaatatttcttccttaatgtggttatcaacattttactatttataattacttcctaacaatcactggaaatcatatatgaagtttatattaaagtttctgagatagtgcattctctccatagtattagtccaagattgtcctggagaatgctgatattgtaaaacgtaaagtacaagagagaaattgttcatacaaatcagtacagctttgaattcaagcaataataaaaaggaaagacttcatagaggttagcagctcttagaggaaggaaacacaagttctcatttgggagagggaatatttgtgctcctgaaacaagcagaaccaatactagagtaggtgtcatcaccaaatccagattcaaagccttccacacaagagctgaaagaatggccacacaacatccatgaaatgagatgaaacaagtccctcaacagagctaggaattctgagattgttccatgaattgtcagtctcacagagaataaaaaccagttcattaaaatgggacatcccaatcacatttgccaactaaaataacacacacaaatgaacagagaagccaaaccaagttactggtttcatgagagtgtacaacatgaagtcagttttaaagagcaatggccacttctagattttagaacttatcctctttctagaactacagatatttccatcagagagggctaccaaaagcattctgcaacttattttaaaattaaataaacaaacccagctctccaccatcccccgcctcctgcgccctgcatcccccgccccatgagttataaatgtaggtttctggtaacctacatcagagtgacacacttattttaatttgatgtttgctatttgtaaatgcaatctcatttatgttacactgtggcagccattctctggagggctggattagttgtggatgtaaatacatttataatgtattttcctttttacttaagtttaaaatttgaagcaaggaaaatatctaaacataactacgtcaaacatcatctagagcttcttttaaaaattgctctgccaactttagagaaacaatgactggctgtatgcaaacacactctcaaaatgtgttctgagcagttagaaaattataatgtaaatttactcagattcccagagaaacatttaatttaggaaacaataaggacaaatacaaaatgtattgtttaaacaaagaggtgattgataaggagaacaggagaacaagcctctaatgaacataaacagcaatacttgaaaaacaattggctacctggaatctatgttaaagtctgttatatgagttagagtcttttccccttagaatctctgttagcatgtaaaataggtaacattataaacacttctccagaagactttatgaaaagcctgtcattctcaggctccaaccttagaccataagaaattatgtctatttatttccatttgatcaatgtatttgcatagcaagaaatgagtgatctcacaatatacccaaataaaatttgccgatacaataaaaggaggtactagataaaataatcaagcatcagtatggactaaatactctcaaaataagcaggtagatccattacaaacccttaattacttcagtttttgttctgacatttttgatccaaagtgtttctcctagttttaacattctcttgtgaaaacattactgcaacttacaaaaagtttatttcattaatctttcctaccctgaaaaacctggcttccttcatgtccatcccagagtaacatttctctgatctcatttcaggtgcctcttacattcacctaagacattttcattgcaaaacagagaatttttagaagtcactaaaaagcactcccttaccttctaaacctgcttcaatcagcccaaactgttccaataatttaacaaaaagcacaatgacgatcagaactgctatcatttcaagcccttccaagttcatggtcagctaggtcatggtccgaccacagccactgagaagtgctcctctgcctggctttctttgtaaagccattaaactacattaagaaggctactgctggagaaaggggaggaggagagcgtatgagagagagagagagagagagagagagagagagagagacagagagagagagagagacagagagagagagagagagagacagaggagagagagggagagagagagagaagggaaaagagactagatggagatggagaggctgagaaaaagggcgtgagtgacagaaaatgcattcatcctgtctgctgtagcagaggccagaagtagcagccggataaagtcgggcctgtcggaattatcggcttcctcattatcactcttgcacagagagacagccacgcatgaagtcgcggcgcagatcacccgaggacccaggaggtcaccaggaacgtcccgaggaaacatgaggcccggcgcggaggagatggctctgcgccccgggactctgcgcgccgcgccgccgccaccagtggctttgttgggccggccagttgccttggaaacaagagaacccaaggaagggctggactcctgctgcagacagggagcagagcaccgcaccttgaaatacggagaaaaacctgaaaacgctgagaggtggagtgacaacttgcattcagctgtttcagaaacattgttgaccagtaaggaaaatccaaatgtgtattttgtcccaactagctgagtgcagattgcaacgaggcttaagggagtccttcaatattgactttctttcccatgagtcaccttatccgaaagctcagtcactgagcactaatattctggtttgagtagtaactatcatatctttttgaagcatgggaataataaactaataagtattcatcatatttgcatagtatcttagagtttagcagctacctcctctgcactacttcataccattcaatacaccaaaatatatacagtatttaatgtgtccttctatcctttataaataatgatgtaagtaaatttggagccaggaaaagtttgagaataaaaaaaaaaaatctgaaaaaaagcggaagtttttgtctctctcttgcacaaactgtttcatctttttctttcctcctaacactgcccaaatagattagctccacaatgaaatacagaatttaaaaaaactacaagagagagacagcatcttagaaagccaattaaagtctcctatttcatagatgaacaagctgaggactgaagagagcaaaagaaatgaggcaaaaaggcagagcaggatagaatgaaggcatccttcacttggggttggcttttgaggcagtggagtataagtttagaatataaactccagggacagactgctgggatctcttactagctgtgtgaccttaggtaagttacttaacatctcagtgtcttaatgtcctcatctatgaagagaggcataatagcacctagctcatcactctgttgagggaattaatgagtgacacttttagaaaagagtgagtgctcaatcactaccacctcgggtgcttttcacaagtgtctccatgctctactcagactttgctgggttgccagaggaatcaatctggaggaagtgcagtcctcctcttatcattctcttaatcagaaaccttccatggctccctatttgcctacagaacaaagttgaagctcctttgaagagcatccttttctctccgtgatccggtacctccttgaggattgcacctcagtggtcttactcctgtcgatacactctacctgacagctcagcttccttcacccaaactcattctgggcttttccatttctaggactttgctaaaattgctctatctatttagaaaaaccttcttacaccatctctgcctgtcaagctcttaaaactctttcatggaaacttcaaccagaattggatcaaatctctcttttttgtgtttttacggtacttttcctacttatgat

SEQ ID NO: 317033 - DNA, 4001 bp, Homo sapiens
cctcctaatctccaaccctaagagcagcactcagacatgcaaactttctaattccttccaccctcccctgtcccaaacactgggcaattagactggagataacagacgcagggaaatctgggtttccatctgtcaaggagtcccctttccccacacccgctctcatgcccccgccccctcgaggggctctgggggcacctttatcgcttctcccctgccctctagaaaaccacccgtaactggaggctcccgcgcggcagctgcaccaacagcaggtgatccaggtggtgcgaggcgatgccttgttatggcatcctgccctctgcagggacaccactgagggccacatgaaatgacccccagcagtcctgcaaaagcaaaggggtggaggagggtctatgcaccctgccctgtgccccagtctctcccaccctgtcctccgcaaccgaggagaccctggcatctgggagcgggctgggccgagaaggcaagatcaataaagttcagcaagtagacagctgggagctgggtgctactgagttctagaaagggggagtagagacggaaatatccgaatcggtgaaatgtaaatcgtgtctactgcataagggaatcgtgcagggagagccgctctctataaggagttaaccagcgcctgccccggacacccccgcggggcctccagcggggctcaaactggcggcggctcagcagggggcgaggggtgctgggaaacgccggggctgcgaacttacggaagaaaatgtactcggtgtagctgctccagatcttgtcgtcgcggtactggttgacgaaggcggcggtgcccgaggagttacacgccaccatgtggaagccggcctcggacaggcgatcaaaggcctgctccaagtaggtgaacttgaggtagaagcgggacgtgtacttctccggctgccggtcggggtcgcggctctcgttgagcgtgtccccgaagacctccttggccagcgcgatgcgcccgcacaccatgatgcgcgccacacgccggaatttggcgtcggcctggttgtcgcgcacggtggtgtaggagccccggtagcccagcgtgaggaagcccgagcgcttgtcctgcgcgccgccgccgccgccaccaccgtgcgctcccgggcccgagggcacggcggccgccgccccgcgcagcagcagcgcgtcgctgctaccctgcgagacgttgtcctccaggtcgctctggcagccctcgtcgttgagagagttctgcttggtgaccttgggcgacagcagcttgaccaagtcggtgagctggaaatactcggcctcgcgcagcagccgctccttctcggggaagtgctccggcagcgcgagttgcttgtcccgcagataatccagcacgtacctgaaaaggaagccgtcccggtcgatgaagaagcgcgcccggctgtccctgggcagctcgccccggcgccgggcgccgccacggggactagagggcgagaacatgctggccaaagtactgtccgggacgctgagcagcgtcgagtgcttggtcacataaacctggccgcctacgttcagctccactacttcagggaagggcgagggtgcgcagggccccggggcggcggcggccgacgcgccgggcgagctggacgaggaaaccatctcgctaatgggcaggatggtgctgccgccgctgcccgtgtccttcagagccatagtccccccgccgccggcccagtgacccgagagagctgcactttctcgttcccggagcccgcgccccagccctccgcgtgctcctggcgctctgcgccctcggactgggcggcgcgttcctccgaccggggcggccccgctcagggttcggggcagcggcggcgtcggcggcgcccgagctccatcggaggagagacgcgcgagagaggagctccgccggtgcggcggcggcaatggagaggcaagaaggagctgctgctcctttggggcgagggcggggaagtgtgagagagacttgcgagaggctctagggctgctgctcggctctccgtggggagggcgggaggaggggccgaagcaaagaaaactcgccgccccggcagcttgcaagcgtgccgcgaggccggagcgccgacggtggcgctaactactcctggcagcacgggaggaggcactgacgtcaagccccggactgggacccgagcctcagctgtcatttaaagagataggctgcagccgcggctcccgggctccgacgctagggggcggggccgagagccgagcctgcaagaggtgcagctccccgacccgcggggacaggcaggcagggagctcctaaagcaaaagcgagaaaaagggacagcgctctcattccttcatttcactccctccttgggtctgtgccaccccctttcctccctcctttccttcttctcttccttccttccttgcctccctccccagtaaaactagttttttgcactttcattaaggtaaggagtggaggagcggagaggggagaataaggttttgattatagcaaagatgccaggctcctaatctgaaatcaccacaaatgttggcttgccagcagtgattgcaaaaagattacgtgagggtgggaaggtacatctcttgtagtggctttatgatacagtttaagtgaagggctaaatgcgcgtacctctcttggaatcaaatttcacgactgcgtgcactgaatatccttgaataatttttaaaactttgtaatctgctttcagttcacaataataaaggagtgtatgtaacaactgtttccttccgacatttttacaatttttagttttaaattagatgcttaataaatgtttatagagggagagacggagcccgagaggaaatttactcgatttgttcattctttctaatcctgatcagtctcattaatctctccatttccctttcagctccatcaaacaagagaagtggctgatatttttattagtcttctaaccccaagagtaaggtcacaaataaaaattatatgaatttaagctcaccttaatttccatgtgtacatagtacaggtacagtctgcaaaatgagcattacttgtgataaagactgaaaataggaaagcaaatgagaaatatttcttctaccctggggcatacatctgtgttcagaaacataaagaatcattgatttatgaagtacaaaagagaaaagggtgtattgtggcacaaagtagtttgcttcaattatcataacaatattacagatgaactttatccattagcagtcgatatacagattttaatattttttaaaaagttaaatgcctactaacaactccttttcttcaaaccacccaaaaaagtatcaaatttcagatacggttgtaaattaatacattatttttggaacattacaaattatgtttaaatcattgatccttataagctgcatccatagacaatgttataccaattttgaagttgcattatatgaagcagagagaacctaatggaccaatgaaagaacagaatatatttgccaaaggactgagacttaaaacgggggtttcggtatgcatcatcatgcaatccttttactcaaaactattgtgtcctgccaaatttataaactgattgatcaaattaactaatttaattgatttagccttcatttaaaagttaaaaccaagtattaaaataacagaaaaaatacactattttctgcctcattagaagaatattcgggatttaaagtaatcgttcctggataaatgaattaatagatgctttataatcttcatagatgaatatataataatgcctcaaaccactactagtgaagcccatttatcataaggtaagtgtccctaatgataagtaaggtgcagactgtagaactgtaatgaagtggatatataataaatatgcatgtgaatatgaagtcgctaatatcaggttgaaatccatctttacttttgaattaaataaattatgtctataagataa

SEQ ID NO: 317034 - DNA, 4001 bp, Homo sapiens
atagttttttgttttttgtttttgctccattaaatgtcattcgttttcattggcaagcttgagctggactcttcagaaagttctaaagaaataactgtaagaggtacacatgctactactcaataaaaagcccttctatgttcaaatcccataaccaatattaattaatttgtgcactgttacccttccagctcaaagacgggaaggaaaaacaacagtgcctctgtctctagaatttgatggcaccaattacagcccaatccaattaagcaagtaatgcactccaaaagggcaagttcaccattatattcagggcgaccggcctgccgttactactacgctaggaaacaccccaggcttaaaagcaactcacttctttgtggaatacagagcaaccacatgttccagaccttcattctctgcccagaaagggggagagagagggcttgtctgggacaaatgagtgtccatggtggactggacccgttgaaccaagtcattataaagaaaattcagtaaccatggacagatgatcctggtactgtatgtgggtgtgagtgtcttctaagacatgtgattcttgtcttagggagtaagaaatttttttccctgaattattcgactttttttttttctttctctgaccctttcccctttctcaccctgcaaagggtggaaatctggatatcagcaaactggctgcaggaaagaaatattatctaaggggttgagagagaaaggaaagtgaggaagaaaagacagacagctattgcatgaagaacgtgtgtgttcctaattgaaggagacggaaattttaggcggcagggagaggaaggaatggcactaaagctaggtaccaaggcccacaggaaaggttttcggagcttgaacttctgactatgcgcttacaccaaggaccacagcgctttgaaagatgtgcaatgctttacgcaggacagttggctgttacttggagacccttggggaagctgtcaaagcccccaggacaagtccctattcccccccttcttcgctctgcaaggagagcggcgtcctgcaccaaggaaggaaaaaaagtttctctccgctccagaccccacttcacacagtggtgtgcaagtgtgttcgagcatgaagacaacaacgggccgggtcccgcaaagaggcagaaccgagtgtaccgtccgatccgggagacccggcctgagattccggcaaggttttcttccccgggcccggactaggatgttgcgcgcagccagacaacttttcaccgcctgttctcgcctgcggaggcacctcctgcctgccaaccccaggcgccttcccaccccagcctcccaagagcctgagggtgtgtcggcatctcaggacatgctccagccgaggtccctgtcgcaaaccagagtcctagaaaaggaactgggctagagcacaggcgaccacagactcgctgggtaatcttgggccagtctctgagcctcagtttccccactggtaaatgaaagatcgcaaaatgtcaagtcctgtccaactctccagctctacgattccgagttagatctggctttcaggtcctctccgccctcacccgacctgtctgccttcctcctccagagtgggctccttacccacagaggcggcccgggtctccacgcagagccacagggcgacggccagcagcaccttgctctgcatcctgcacctcgagccgggcgaaatgcccagaactcgggagccggttctttctcccagcgcctgtctagagaaggaggcgcggaggtggaactcgcggcaccccgcagcgcaggacagttgagcgcacagggctagggagcccgggcgccgaccgcggctgcaggggcgtctgcgggtgccggtaggagaggatatccaggctgccagacggactttctgcggcgcgcaagtgatgcccggcgcaggcagaggaaacgcagcgaccacacattgaccgctctcccggggtcccgggactcagtgcagggtgggagctggtgccgaaactctagagcgcggaggcggggccatgcggggcggggccggagcggaggaggggctctcccgtgcggccagccccgcccctcacccgggtacccggcggcgatctccagctccccaagcccatttacatctccccatttccccacacaactggactgcgctgggccccaagtcgcccaggagagaacatcccagagcaacaactttgtttctggtgtaaataaaaagtactcggtaacgggcgctgagcaactccaagatttaatcgcttgccggtccccgaaatttggggagcatcaccaggagcgctgcgaagagcagcgctccctcaccaggcgcgtcaaagtgcaggaccctcttcgccatcgcgcgcgtctgaagtggccgagaatctgcagcagtttggagccacaagggagaagcggatactcagccaagtatgccgggtcgcaagctggcagcgactcctgccagtagttttggtttttgtataagggtattttgtttggccagtataattgtagtttaaaaagctgaatctggttgctcttaatcagaaaacgcacttgcccagttcgccaacattcccgctatttcccaaaatatttggcggctccaagtttgaagtgacctgcctagccccaagaaggcttttgtccatcgtgctccccaacgaagagccctagtgaaagtttggccatgccccttttcagagcagagcttccagccaagatatccttagtcccaggggaaggaggccagctgccagcgtgcttcagtggaggagcaatgaagcaaaagcacctaggacactctgtgaccaaattgcacaactgtctccacgtgtgtggacttcttgtggcagctgtttggaggggaactccaattccttcctgaccacattcgttccttctggttttctgtccatatctccccacacctggggagtgacatcaaatgtcccctaacttcattaaatatgaatcttccagatgcctatgtcttttacctcccagaggtgctttttaatgacaacctaaaggaccattcttcaccaagataaacacacagaattattatatctacacctaattcaaactagattgattgtatacaattaatgtaacctgttacttatcttcatctgtttttaaatatttactgtattcacgcttttacttttccaagttgacaggtgaaatattttaatgctgaaatataatgaatgtatatggcaaaaaaaaattttggaaaaacacaaaaaggcttagagtgaaaagacttttcttttggcagaggcatttttatgtttccttttttttccaagcagattcttaaacacaagtatgtagacatgtcacccttctcttcccacaattgcttggtataaatgctatttgagccttggcttttttccctttaaatttgatttatttatttgagacaaggtctcactatgttgcccaggctggtctccaatgcctggactcagtccatcctcctgcctcagtctcccaaagtgctgggattacaagcacgagccaccctgcccagccttcactttataatatacactggagattcgttctacatcaacctttaaagctccatcttttatttatttatttatttatttatttatttatttatttttatatagaggcagggtctcactatgttgcctaagctggctgcgaacaaagctccatccttccatcttttcaatgttggcatagtgctctactatatagatgtactcatatttatctgggaggtatttatttggggaggggagagaatctttaaagaaactcctctcttcctgctagtaaactcagcaaataaaataggatggactctggcaaagttggataaaggggtgggagatggaacctggtttggagagggcagtttttctccatccccatcaccaaacaattccctatcagccttatttacagttcatgacacttcctctt

SEQ ID NO: 317035 - DNA, 4001 bp, Homo sapiens
gatgtaacgggcttacataaaaaccattatacccaaggaagctgtaaaccactttttgaatgattaaaaatgcattatttagcaagtacagcaattgaatctgagttataagatatattaagtgaaaggagcttctatagatatgcaaaggcacactctcggaaataggttctgtcataaggaagcgacatagagatcctgagacctatttaagaatggttcaatccaaaataactgatggaagaatatttgaccttgaggatgcagagtgatagaatccgctcctcctccccccccgccctcacccgcctttaaattctaagtccacgaaatggtcaaagtgttctggaacgggtcttattttgcataggaagaatctagcttgggcattttaccgcacagttttatccacagcatcgcctattaccaaaactgcttgtccctaccccctcacgagctttctaacagtttttaaaacaagacccagaaatgtaaaatcccttcttaggaacttgaacagtaagtcaaagtatccaacccaggtaattattagcaagaactacatttatataattttttccaaagaatctcgcatgcctcctctccgctgaatctccctcctgtttttaactgggttaaatctttatagcttgcctatagaggacaaaaacggaaaggtggcaaaaaagaaatcaagacagttctgccatgatttaggggtctgtaccaagagttcggcaggtcctgtcacctgcgcaccacaagacgcaagctgaattctagggcaagacgaagcattccaacacgacacacactggtttctccagcgggaagaagcagagagctctagaaatgccggctgcagacgcgtattgttggaaaggagccggatcaggccccgcagcaactcggggcgccctcgcgacagggtttgccgcgcagcgcacggatgactgtgggcctgtcactcctagctccagctgtaaccttcgccaaaccttgcgccgcaccggccccgcccgccaggcccgccccccgcgccgcgccccgcgccataggccggcgcgccagtcgctcagccggcctcccggccccgcccgcctgcggccctcctcccccgcccggcggttttcccttcccggggccccaaaaggacaatgctggaggggaggggaacggagggaacgcgagcgagcggcccaggctgccggcctgaccccgctgccggggacgccgggcgcctcccaccggccgaagccttcctcccgcgcccactttcggggctctacgtcctatcaagtctaagcacccccgcctcgtctcccctagaagagccgccccggcgcggcgacacctgccccaggcaggaggcagccaacggcaacccattgtgcggactcatcgtccacagcccacccgggcgcaagagccgcaagctggtgtcccggcgtcctggggtcggggcgggggtcccagggcccacagctcacccgcacgcccgggcaccaccaggatcggggccggtcaggcctccctcggctggccccggagccatcaacagcggcccggtctcccttaggctggccccggagccatcagcggcggcccggcctccctcaggctggccccggagcccccggcggcggcccggtctccctcaggctggccccggagccctcggcggcggctcggcctcccttaggctggccccagagcccacggcggcggccctgtctcccttgggctgaccccgaagccttcggctgcggcccggcctccctcgggctggccccggagccccacggcggcgagcgtccggcctccccggcccgcgcccacccggccgaggggctgctccgcgccctccctccccgccgcctgcccgcagtacctgccgaggctgccgggcggcgcggcggccggcgggggcgcctctcctctggctccgaggggctgcgggcggctgccgagcgccgggcggccctggcctgcgccttacgtaaagcggcggcggcggccccagcgccactccgcggagggcgggaggcggcgcgccgggagccgctccgctccgttacccggcaactggcctcagcgccccgccaaccaggggcgcgctccatatccttccgcccgggtgccgggattacatcagcgccggccggtccccgcccctgcccctccctccggctgggctgcgggcgcgcgcgggcggtgggccgcgggctgacggcgcgaggggacaggccggggctggtgcctggcgggtgggggtctagggcccgggacgcgccgtgcagcttggccggggcggcggaagccgctgggaggtgagagggcaagcagtagagagggcaggcaggaagcgggagccccccagcgtgctgggcgtcggagaggagacgtctcccgcggaggggcacgtgggactgccctcggcagaagcccccgaactctgccgccgcgccccgcccccggcccgcgctggggaagtggggctcggcgtgcacggccccgcccgcggcccggtgcagcccccgccttcccgggctcgcgcgccacctgtccgcgccccctcctcgccgcgtcctgggatggctggagtaggcggcttaaaataaagactttaattttttgttgttgttgttaaggaacccagaagacaagctaaagaaatgtgacatggctctttttttattaactaggcaaaaataaattctggaagcttcgaaagtggaaaccaaaaatgtgcattaaccttttaatcaaagtgtcttcacagccacctaccttccctaaatgtgactcctaggcctgttctaaaaaagcaaataagtatcatggacctggaaaaggaagggagattacttagaagaaagaggtccaatgggaggagtgacttacctggggtcatttgttcatttatgcagcacccactaggtgccaggcactatgcttttctgttcagaacctgttggagaatttcctgcaccagctcacgggcttgtgggagaagcagatgctgaaacactggagaggggtcatctgctgagttggctagatgctccatgcatccatggaaggacaaaccgaggaactgtcgcttacgtactatctacagagtgttttttctgcgaacatatctttttgttctttacaaaaatcgtgggacaaatctttgtcatccgcatttaactggtgaggaagctgaggctgaaagaaagtgatttcacccaagcctggctgctaccgagtggacagggccttctgaccttgctaaaccacctcttgcaggagacagaatgtgaacccaggctcctggctctgaaatatggggtttcgtttcctttacactactgtctcccttaaccagtttgcttctaattgtattctctgagcattcgctcaggtgaatgtatatcgtcataaatcacacgttcattcagtcagtttcttctgagtgcttgttgtggacctggctcagtgccgggaacgcacagtccctgtgctcctggaactcaaactctaaaaacagtgtcgagaatggaaagggtatgggaaatccagggccacttgggagtagaggaggggagagtagcagagcttcagagcctagttcacaggtgcctccaggctccaggatttcacagaccaaagtatgggggatttgcaaaggatggtcagcttttgatttttgctacattggtgacatatctgtcatctacatcatattttacaaaagagtattaacagcaaaattttttgaaaagtaataacagtatatctcagttctgaagaaaggaaacacggttggcacctgtatagtgacacacacacacacacacacacacacagagtttattgacctttttttttattactttgccacagaccagtttttatactagttctaccatgaactagtagaacctgaagacttcttggaagaagaggtttttaagtaggaattatcttgtattaataggatttggagctggtgg

SEQ ID NO: 317036 - DNA, 4001 bp, Homo sapiens
gctggccttcaaggagggtccaggaaaattctcctctaaaatcacctctctgccttgaagctgttattcattagccctgatcaaaatgaatattctaaatatctcaaaaccagcactctgaatgtttcacataggagggagaaaactgaaatgtaaaactggacagcctctccggtaaagttatagctagacatcctgtttttctaaacagccgcaagacacaacacagaattaagtgctgccaccaccgtgggaagtaatgaacatcttaaaaagtactgcacacaagctaaatatttccttataattcaagccactcccacccaaaaaatgcattttggatcactaccgttactggtgaaaggcagtcaacaacattatatttaaatgtgcacacttcacagtcaatgggaatttcttgtaaaagttaaaagctttgcagtactgtatctgttgcagcaataaaccctctatgatgctacagattcccaataaaacgtcagtaattatttttctacacgcaatcatcatatcatcatacagagaaaaaaaccagaaattcaagttcttaagtgggtgtattttaacaggaattaagggcacttggagaaaatccaagatgacaatccttgagagtcacatctccatcccaaagctacttaacgctaatggcaaataccactctaacatttatgaaatcaatactcctgttgtcctcaacctcttagccacttgccatccacacagcaccagctcacttagggaacagtgtgcacccaggacacccacggccgaacagaccgctggccgcttccctgctgaggtggcctgggttcccaccttctgaacttggggccggcctgcctcaggccctgtcacatggcgtgggaggagccgggaaggccaccgttgccaggtgttcaggctcggcccctaacgtttatttgccttgcaaagtggcccgaacgcctgtgccgcttggacagggggtggggaggaccgggggcctccccgcctctcctccctcgtacacccacagccgccctgtcacctggtcgtcctcacctgagtgggcagcaggagttccccttcttctgcctgccacagctccaccacgttcggcaacggctcaatcgctgcaggaacaccaaaaaatacaccacgtttttaatgcacgctaaagaaacgcttcctgtttcccctaccgtccctccgtgccccccgcctcaccaaaacacgtctctttttcctcctgggaacagaggccatcccaggggcgagccaaggataaaaatacaatgggtggggtgtgagccggcggcccctcggacgcgaaggcgacagcgtgcaggcaggctcggggtgctcgtgctgggggtggggggacgaagtgggagtgaagacaccccacgaggcactccgggctccgcagcccgagcatctggagtgtggaccctgggcggccaggctcgggggaacaaagctgcaggaagccgggccgctgcggggcacccgcgcgcgccacacaaagcgggggctgcgcccggggcgcaggggcccgcgcacaaaggctccagggcgcgagcggctagcggtccccaagccccgcgactgccccgctctccagctgtacggggcagagaggcgcgggacgggacgctgtggtcagaaaatgttatcagcggagaatcgcaacagctttccttcctcctcctgcccctttccctttcctcccctcgccctcttatagatttcagcagttccctaaaagaaagagcgggggcggggtggagaggcagagcgagcccagcggcgcaaggctgaccttgtccctgagcccctcccgggcgacagcagggcagcaggacctggaagacgcccagcaggaggttcacggccgccgcggtgcggcagtagcagccgggctgcgggcgtcggagccccgccatgctgctgctcgcgctcctctccgttgctcgccgcgctcgccgctagctcgctggcgccccagctgcctcgccccgggcccgcccccgtgccgccccgccccgccccgccccgccccgccccgccccgcgccgcaccacccccgccgctgccgcagctgctgcagctccagacccgggcgcgccgcttgctctgagcgcgtgtgcgccgcagatagggagggacggaacgcggcggggtgcgggggaaagtggacaatgcgaacccgcgggtgccccgccccggcgcggagcacatggccgcgggcccgccccgcagcgcgcactctgcggggcccgggcgctttcctcggctgggacggggtcgcttagagctgtccgcggggactagcggcccacttttgccaagtgcattttcatgaacttttgggtggttgccgctttgtcgaggcgcttgggccacggtcgagagattaccctcgagggaagaggtggcggtggaggtgggaacgaggagtcgccaagcgagaggccttggacacaggatattagtggaaataatgcagtggttgtcaggaaacgcgagtgcagccacatggccactgccagttatgcagcgaggatatccggtggctgcaaagtctgtaatttagaataaaaagagctctcccaaaacccgagaggcagacctcagcgccgcgtggcggtagtgcgcccggcaccctctgtggacactgtccaggtcctgacaggtggggaagactcttcctaggggatttatagcttcaaagaccctgcaaatactcccttttggaatcatattgcaaaattcagccagcctctcctgaaatatggttggggtcgaggatgtggttagttgcctgtttctaacattagtaggataatggaagtaatacgtggaaatacatttcctagttccaggttttgatgcctataactaacaagtccaaaatctggcatctctttaagttaacatcctgcctttaccagcgatgtcgcaaacaagggcttattcagaaatcaatttgcataacctagaagtatgggcaatcttatgattttttaaagttaacttactgcttccactgtagcttgtatgaaattcagagaatatgaacaatatagtatgaagaggggaagtgatgggacacacctgtttaccttaatcctctgtttaattgctccttgtgccttacaagccagactatagaaaaccagtgcttgcatagcagacacaatcctgagaaggacaaaatgaaatctagatcctctttcctaaagacgtaatacagtactgtgaacacagtctcacacactgtctgcatttaactccaaacaaggttaaatagtctaattgcttggccagacttaacatttaagtagattagcataaacgtaagttgttgatgtgaaaaaaaaaaagggacactttgcattttccaacttgaatacctccagtagtctctgtttcatacttttttctgtattccttgccaacatcttcctttatttagcaaggatctccagtgccatctcaatgtgccctttttttctcttcacttctccaagtttctatttgccccttggattctgaaggtcccccacgcagttaaagggacctccagtgacaggaatatttgcacagcccacttaagcagtaactgcaccttcaaagtttgcttctaaatgaaagttctctcatgggcctatttatttacagaatgtaattttaagtcctcatatgagtataatacgtataaaggaaagcaagcaaacattaacagcctaaccggttttgttaaacagattcaaagttgtgatacaaaacttttttgctaacatttaaattactttactcttttactaataaagtctttcccacattaacgagtatcacagcatcaatggaaatgacttaaaagatagactaacattgctatggaccatatgtaaatactgctatagctttttctagactttgtaaggccagcttgatttttcaagttgtggtcttgtggactttacaaaatgggt

SEQ ID NO: 317037 - DNA, 4001 bp, Homo sapiens
aaaaaccttctgctttttaaagctgtgctttaagtaaaagaagtcggaatttagtataaaggcatatcaaataggccacctgtaactagatattttgctgtgatgggtaagacaataagttatgatgtcattgaatatgctacagtaaatgatattctaaatttatttttttaatgaaagtatatggttacttataaaattcatattctcaaaaaatctagttcatgaatatacaaaaggcaaaacaggaaaacattgttttgataatcaatttgctcttacttatccttttcaaaagtattacttctaaattatgagaaagttatagaaaagcaacttaacctgtataaccctttagtaacatcatattaagtccttaacttttaaacaattatgtattatggataaagcaaaacaatcactgagagtcaacataaaatacaattcccagggcagcttagattgatggtaatagctttgacatagcaagtgctatgatttgccattttaaaaaaaaaaattctagaaaaaatattttgtaaagttattttgatgatatgccattatatctcaagtttaaagtcattttgtataaatttttactataaatcactgtgtcaacagtaggttgttatatgagtccttcagaatggcaacaggcatttgctgagaaaatatgctttcaatattaaacaagccaggaatcgtagtcttttcattatatcacgcccccctatgctcatagtaaaacagagggattaaacaattgctcaatgtttttctgcttgttattgttgtttttttcttaaagaaaggaggtgtttataacaggaaaaagtctgaaaaattctaggtgataggaaagggaacagacacttcatctctacttatattcctacccacatccttgggtgtcatgaaagaagcataagcatcccctcagaaaaaaaaaaaaaaaaaaacctgtgtaacccatataaattacttaatctttatgggcctcaattccccaacagggaattaaaaggaaaagaataaaaacctaccttcataaagctactctgagcattaagtgagacaacatatgtacaacctggcatctagcacacagaagatgcttaacatattatcattaccctttgtttcctctctttcccttcctcatttcctctgtttccaattcttatgccaaaattaaagtcaaataccattctcccatgaaaacttccagagcagaaacaacctacaataatttctcccttccctgtattatttttgtatttctccctctcattcattcatattcactcattcattcactcatatttcctttctccctctgctatttagtttaagctatttctatatacctagaaaacttctagattataccaaaaaattattaatagcagatctcactgccaagtgcacaaggaatgaggaaagagattaaaagattaggcatataattctattttactataaaaatagaattatttttacagtaaaattatatttgaggatttattatttctgtaacaaaacaaaagtgtttgggtgtgtgttgagtcgagaagttggggaggtgacctgaaaccagaaagataagctaagtgcagtgttcttcttctctttccacttcccctaagtcagatgagaatgcagcctaagaaaaagtagagcatttcagagcagtttccagaacaaatgttcaagaaatataaataacaatcttccttcctaaaaataaataaatggtagtgttagtgttccaacttcagtcaaccactgtttaaaatctggcagctgttaatccatacttaaaacacaataaaatagaagaaaaatattccacttaccaacaaggagccaaacaacattggaattgtgttctgtaagaaaatcttctaattgagttatactaggaacaatactctcattcttcctttgatccattactaaagtttttccagaacaacatctaaaggcctaaaagatttcaaaggttaaatttagaatcagagatttataaaattgcaacagaaatcattaagggaaaaaaagggtgaatttaataaacgaagttgattaaatcacctttctgtttccttcaatgatgagaatgcaaaaatacaacaaaaatgcccacatttctactaaaatgtaagagaatggatcatacttgtaatgtcctgatttcaccattctaaatgtaagcactaactaaggttcaattactatactctggctcaaaataacaggaatgtgattattctttttttttttttttttttttttgagaaggagttttgctgttgttgcccaggctggagtgcaatggcatgatctcggctcaggcaacctccacctcccagtttcaagcgattctcctgcctcagcctacctcgtagctgggattacaggcatgcgtcaccacgcctggctaattttgtatttttagtagagatggggtttctccatgttggtcaggctggtcttgaactcctgacatcaggtgatccgcctgcctcgacctcccaaagtgctgggattacatgcgtgagccaccgcgcccagcgtgattattctttaatcaaaaacatctcaacaatcagaaatactagccatctacattaaacaaattcatccagacttgtcccaaagccaccacttaatattatcatattaagctagataaatccctcttaccctccatcacctctatgtattctccattattccatggggaaacaatcttcctagttcagattcactctaggtagtctgaacagtaaagagacctcctgctatcagatacttaggataaagaaaaattcactgtagaactgtgacccaacttctgacaaatatttgtatgcatacacatatgtgtgcatatacatatgtatgtatatagatatgtgtgtatatgtatatatgcacacacagtaggatgaatatgaatattgagatgtaccaacaataagaaaaaaggaacaaagttcatattttatgatccaagaaacaagaaaatattccttcataataccatagtaacatatgactaacccaacctaccgataacaaaactatctcataataaaccagaaagagcaaaaaaaaagctagacttaatcacaaagagacctacacagttaatactactttaagactaaacagcagaggagatttttacagataactacaaaaacagcaaattttttctgcagtaaagaataaggaaagataactttctaattgaaatttggtacatctgacttaactttctaaacctgttttctgtttattcaccacaactcttatctttggacatcacaaaacaagtttaaaaattggatgaggccaagaacctataatcccagtgctttgggaggcaaaggtaggaagaactcttgaggccagaagttggaatccagcctgggcaacacagtgagaccccatctctgccaaaaaaataaaaataaaaaactagccaggcatggtggtgtgcacctgtagtcctagctactcagggcatgggggcaggaggattgcttgagcctaggagttcaaggttacggtgagctatgatcatgctactgcactccagcccagttgagagagggagaccccttctaaaataaataaataaataaaaattgaatgagataacattgccagacacaatctacaacacattatgtttcatatttctacactgttgaaatcttataatttacagaggcaaattaaacatctcttaagaaaataatacagagctcaataacagaaggtttattattaacagtgatatgaaaacctaaacgcaggagctagagaagattaagaaaatgttttcagtttacaataatccttttttttcctacagtgtagaaactgagtaaaaaatgttctcgtatttttcaaagctttgaaaaatccctgtcagcaccttaaaatttgacggctaactttataacatgagctttctctttcttccc

SEQ ID NO: 317038 - DNA, 4001 bp, Homo sapiens
cggttttagtggacagtgggacctaaatagtgatactatcttccttttattcctctgcgactccccaactaacagaaggatactgcaggaatgatctgaactttgggacaggagacccatttccagccttggctagatttaaagttatactgtaaagttgaaaaaaaaaaaaaaagagaaaccctcaaaagatacctccacgcaccagcaggagtacagaaattctgttcctccatctcctgccttccccagcctcttccccaacagaacttctgggaacatgcaggttcaacagacctccttaaagctgtgtgtttggagctataaaggtggaaaatctgaaaccatgagcacatggaaacatattcacaggtgccttacccacaggacggaggcaggcatatggttgaaattccccaccaccgcccctagatcttataattttctactatttgtctgcacagggaacatttcttagctaagctacaatgttgatagtctgtaagcttaccactattcattattatttatcatcctccttttgttgtgaaacttcagtggcaaattgtccatacttgttatctccaccatctcagcattgttcactcctttaccccccaccttaccttgatctgatcattctactcaaattgcacttttcaaagtcaccaataacctgtgaatcccaaaataaaaactgttgctcaatttgcttttgtcttgacacccaccagtctctgatctacagcccccctaatctatgatgctgctaactggacaacactacttgaaactgttcctttagtttcttcgatactgtgtcttcctggttgtttttacatactcttttgctcctccactgataactattcacagtaagtatctgttcctcgtcagctataatgaccatagtctttctttttttttttttattatactttaagttctagggtaaatgtgcacaacgtgcaggtttgttacatatttatacatgtgcagtgttggtgtgctacacccattaactcgtcatataatgatcatggtctttctaagacgatctctgtcattctgctttttcattctctgtcattttccatgcccgattagtttttttaaaaatcttatttgtttctttctttgaatgtccctttaatctgttatttctgtcaccaccatgatgcagaatcccacctactcatgcatgacttgctgcagcatcctattatttagtttgtctgcctctgttgaaccctaaacattactgccagattaattcagccaattatccttgtgttaaattactccctatttacaaaacacatgatgactccccattattcatgtaatagttttttaagagatagggtctcatcctgctgctcagtctggagtgcagtggcacaatcacagatcactgtaacctcgagctcctgggctcaagcgatcctcccgcctcagcctcaagctgggactactacaggcacacaccaccatgcctggctaatttttaattttttgtagagatagggtcttgctatgttgtcaaggctagtctcaaactcctggcctcaagcaaccctcctttctctccctccctgaagtgctgagattacaggtgcaaaccactgcgcccagtctattcacagaataaatgtctgagtctgccattcaagttcccccaaaatccagcccctctttacctagccaagatttgctatacccaataccaaaagtatataaaatgactataccaaaagtatccaaaatgatacccagatctctaagcctccctattttcaatgagcagcacagagaactcttggtttttccctggaccttccacttaacattgccactaccactgtgattcatggttcccactcccaacagagcaactgaacatgtatcatcccctcaaagaacctgcgctcttcagaatacccactcttcagagctacgtggattctaccaggattactccagtcaaaccagaaggcatgtgacaggcagggagtggcaagccaagaagtgaagggtcctctgtgtttgtgatgtcggcattcgaatgttattccattacaggggatggaggaggaagaggaggaaggaaaaaggagggttttttgttgtggttgttgttgttgttgttgttgttctgctactcagtgaaagtacaaacagaacctaagtatcataaactgaactcattcaattcttttcagtaaagtagctcaccagataaatacccctgctggttgtttgaattacatatgagtaaactgatctgcttctttattttcaacttctcaaaggcaactgttcacaagcacatcttaggaaacaaactcatctccctgatacttggctgcagaacaaatggttaaagattaacaatactcttaacgggccagtcgtggtgcctgtaatctcagcactttgggacgccaaggcaggtgaatggcttgagctcaggagttcgagacgagcctgagcaacatggcaaaaccccgtctctacaaaaaaatacaaaaattagctgggtgtggtggtgtgcacctgtagtcccagctacttgggaggctgcggtgggaagattgcttgagcctaggaggtagaggtgccatcagcgaagatagcaccactgcactccagcctgggtgacagagccagatcctgtctcaaaacaaaaccaatacacttaaaggaaactctaaagttcaggcatgaaaagataggcctggcaagggttcatgaacctgttctctgggcatgggaggtaaacggaccaccaaggagcctttccttttgagagtactattccctgagctaatgctagaaactcaaagctcctgattagatgataaaaattatttatactttagatatgatgcttgttcccaaaactgtaaccatatggccttccatatggaactgtcttgaatttccattctcatattttcatttcctctaaatcagctcatccctaggctcctttgttgggatttcagaatatagtagagattcttcctgatttagctacgaagaaacaacttactccctatttgtttgttctctggcagtgggaacagatttccactgatccctccacacctcagcccctaatgaatcttacccacttcaggaatgcctttgtagtgagccccatcaacaaaggtagtctgtaaccttaaataatttgacttgtttaatatattggcttgtgaagtttgttgctgaactactgatgacgtttttctatggaagccatgtgataaacggtcattaggttctcaggctagctctcatgcccattcacctactcatccatagtatcacagcagtagtatgatgggggaaaatctttctgcattcctgaatccccttgacctaaaggtaggaaaggaatgaatggttccaatttctttgtgtctttgtgtctttctagggatcctttgcatatacaactatagttttatatatataaatttatattatatatgtagttacatagttatatataattatatatatagttgaatatgcagataatattatatatatccatcagtggacaaaaagataaataaaatgacatatatatgtgaatactgttaagcctttattcttatttttttcaatgagactcattttatgagaccagcataatcctaataccaaaaacaaatacatggtaagaaagctagagagcaatattccttatggacataaatgcaagcattaagttaaaaattggtaatttgaattctgcaatatggtaaaaggataatatattatgtccaagtgatgcttatcccaggaatgcaaggtcggttcacaatcagtgtaatttacaatattaacagacaaaaagaagaaaaatcttaaagagtttcagaaaaaacatttaacaaaaaacaacatccttttctaataaaaatgatttaaaaactgggaatacaagacagtttcctcaccctgataaagagcatctatgaaaaact

SEQ ID NO: 317039 - DNA, 4001 bp, Homo sapiens
cccaggggacagagcaaggctttgtcgttacaccacactgcccccccaggagacagaccttaaaattccctttgccaaaaatctattggggagaagaaaaccattgattcttttaattttttaaaagggagatattcgatgtggtctttctagtctcctactaggttctagttcacatagcttaactgatattaaaaaggtcaaggcacaaaaacataaagaccagatgtgttgttttaagctaggtgatcaaatcctccagagaatccgaacactccctcgtgacccctgctgacccctcctgctgcacaggggtccagatgcaaggcctctctgccccccacaggaaagccctcacaatagttacaagtccaggacgctgcagactgcgcctggagactttatagagaaactgaccggtagtcgacagtctcaaaaccgttcattgcgccgcttcctttcaagcgcttgattccagctaagactcactttctatccttacatcatcagggtaaccttaaaggtttgttttaaaaaatgacctgggagatagcagggcttcaggggtgagctgggcgacctgcactcgcccgcaccagcgacacctggaaaaaagggaacgggaggcaggaatctgaccaaggggctccagcaacctgcaaatccttcacctaagacccagttcccgcgcggatatacctggatttctgttatagctttaagaactgagtaggatttgcagaaagttccacgccatctcccaccccacccccaggcagccctgaagtatagaagtcccgggggcggggaggcgggcggtcacgaatctcaaaaatttccgaagaaaacaggacctgcgaatacaggtcgcagacaccgggaactaggggctttcagaacccgccaggcaggccgggcactctggccggcgtgctaggcggttggagtcagggaacgcagagtcccagcacgctgtcccttgccttcccggagcaggcggcaaacacagcctccagccgccccggggcgcgcggcaggaatgaaacggcgccgcggcagaaaggggcgagcacgggatgtacgaaagcaaaaagtctgcaacctagcggctgctttccacacgccctgcccaagttgtccctgtcgccaccacctccaggctcgcgggagtccggccccacaacagccccacgccgcgcactcccagcgcaaaagcctaacccggaggcggggaaacgccgcagccttcgattggtctccacgggtggcgccgcgagcagaggcggcagcgggtcggtccccagctctgggcacaaagagcgcctgcggttggaaggcagtagccgcagagcagagaaagggctctctaactttgccctcagcgcggcggagaacctgcaggcaggtcctcccgggcgccggtcacacacacgcaacttttaacaaaaggaagctgcggccgcgcctcgcacggcaagagaaggcgctcggtgcaaacccctgagccccccgcctccgccccccgcgcaacgtcggcacaaaagccaccccaaactcgcacggagcctgcagcctcgctcacgcctaaccccctcttgctgtccccattcccgaagaaccccggattcgcgtcccccaccaccagcagctggggtctcctcgcgcaggtgagcgaggcagggcgccggagagtccgagggccacctggagtctccccggaggctggaacgcacgggcactgagggcccgcagtcctctctccggatgcaccctggcgggtaccaccctcccaggcacaggcttcgccgagtagtcgcacggtcggggtgccagccgcggtgtcccacctgtctggacgcgaagcagtaggagcagaacgcagagaaaatcccaggcgccgcgagcgcctctcatcgcggtagctgcgatgggatccgagctctggtccacgttccagctctcgcccaagtgcagcgagcgcggcaaagccgagcccccagagccgcgagcggcgagcagcagcccctcctcccagcgccctccctctgcgcgccggccacgcccctcctcgcctcccctccctcgcgcccgcccgggtctcgcttcttcccggcggcgtctggcccctgctctttcgacgtgttaatgccggggggccgtgcccgccgggaggaggagggcgcgcgcgccctctctccccgctcttgactccggagcccctttctctctccacctttccacccctgggatgtggacggccaggctgaggccgttcccggaccaaggaggtgctgcccgctcgctttgtgaagctgggcaccacgcacacgttagggcacgggcccgccacctgccaggtgctccccagacaataaaggtcgactgcccgcccctcgagcacgttcgggcgggaggaggctggacgccgctgctcgtggaggtggcatggggatggggaggggagcgttaggaaattgagccccgacattcccctccaggcctgttaggagctcctggcaccgcggtaaaggctgagcccggtttcgctaattgtttctgctcaatttctccacctgcttcgtaacctgtaggaacacagtgggttcctattggtcggcgtggcctccgcccaagaagcccctgccgggacttgtgtggagacaggggcgatggagggcgcgtggcgaagtttgctctgggagcccaggttttcatacacgttttcccccctccccccaacgctgccaaccccagtaatgatttctctgcctctgtaacagacgacagttttagggctagggctcttaactgcccttgccggtcccaggagcaaaataaaagtacaatgattctcttaagcccgatttcactgcccagaaagtgccttacccacagtctcatggtggatccttgaacggaaagcaacaacagtatctgtataggggttaatagttcttccccacagcgactcgtcttttcatgctcacgataacagctttgtgaggagggtagagcaggtatgtttattattgtagtgagggaagacccagggcttgaacacttattggaagacctactccaagaaagatgagctttccctatgcattctgataaactaataagacatccctcctgagagcttaagaatggaaaaataaatggcagatgcccatcagaaaaagggatagaacagatacacctagactcttctctgaagtatcatccaaaatttacagttgcccagctgccccacttcatttaatattgaaagctctcctgttgtttaatagtgtgaggacccaggttgatgtaagaaaaatgatttttaaagctaatcacttaaaaattatcagtgctagagggtgatcaaatgatcaatgtgtataattgcctctctttaaatgtaagtatttactcactcagcaagcatttgtttagtgtctgctgtgaagcaaggaggagctaggtaccaggagtactattattaatagacagatatgcagatgtggcccctgccctcacagtccttataatcaagtatggggacctacatcccaatctcccagcaaaaggttcgagtcatgcggctgtaggagaactgaaataccaaaggtctctgtgctctgggccatcagatctcatgtttttcttaggatgacagataaaagataccactcaaagcaatcataagtttctgggatcttgatttatttctaaaattcattttgtattgagaaaaaatcactatgagttaaaatatcaacattatgcctgagagagaaaatttacaattttcttcttcaatcagctgatattggagaggataacatcttcaaaagagtgggtgaaaagagaccatattgcaatttaattctaggcacggaacttctatcaggaaaaaaaaaaactgaatagggagttataccatgttggaccgtcattcctgtttttcattcagcaaatatcttttgagcacctaggtaggcataagacccacataa

SEQ ID NO: 317040 - DNA, 4001 bp, Homo sapiens
atgtaacaggtgtgcagaataatttatttttcctaagtaaactatttgactcaaaaagttaaattcgattctagatattagcctcaatgtgaggctaaatctcttgcaaattcctgagtcttcttttcaaagcattcttaatgaagacagttagtgttaattatgttgtcatttaaaaaatccatgtccacaacagctgtattttactccttaaccttgggaaaattatttaatctcattaagcttcagtttcctcatcttttaaatgggaagaataataaaactagttcaaaaggctgttaagaggatcaactgtaacgatgcatgtaaaatacttaatgtagtctgtggtacataataagtactcagtaattattacctattattttgcttgtattttcactattgttttactaattttaacatttctcaacattatctctagcttttgaaatatattgcttgaaaattgctttagtagagcacattcttcccagttcttatgggaagaaatgtgtttagctcccataacaattaatcttctcttttttgctatgtaacacaaataaaatcaaaagtgaagtatatttaaatttctgtatttaatatgcatgagttagctaacatttatttggcttacttatttacttactttatttacttattagctaagttagctatacttaacaacaaatacatatttgaaatggttgtgccttaagataattctgaaatgattgcatgttgtcagaaaagggttccaacaattaaatttatgaagcactgttttcccacagaatgaaagtaagctcatatattcacactgtagtgtataatggtagatttaaaaatagcctcaaagtgcaacttttgaaaaaactaattggattaatacattaaaaataccttagataaataaaacatacactaacttaaatgcaaaatttgaggatagatcttttgaattagcttaaaatcagttgccttgatttcagtgaagagaattactgaggcagaaggtaaattcttaaattcttagtgttttctgaagctataagaagaagctagctgtacagtaccttgatcaagttgtgtcccacagtgtagacagctgctaaatttcccttctctccaggggcatgcatacctgtcccatacccatgccaagccactagatatgggttgtgaattgtaatccaatatttgacacggtccccaaacatctggaaacagtatgtggcatagtcattgaagatatctattatggtatcatttttccaccccccatatttttcttgtagtgccaaaggcaaatcccagtggtataaagtaactataggttcaatgtttctaagcactagagcgtccagaagagtactgtagtactgcagaccttttgcgttggcaactgttactattccatcggggaaaagccttggccaggaaattgaaaattgataaaaagaaactcctataaaatccagggctgataagtctttttccagaaaaatataactgtcactggaaccattcgtgctgctgacatttttaaggtgtgtgtggatgaaatgatcccatatagaaggtccttttccatccttcttccaactcccttccacttgcaatgctccagtcccaataccccagaaaaagtttttagggaaagtgtcatagagaaacagctgactttcatttaccggagtaaaattaggatttttagaccatatagctcttccatctccagagaatccagtaacagctcgtagcagaataagtgctgacaggatgacagatctttgcaatcccccgttggacattgtattcctatagcgtgtggttatttcatcagtgctgaagaaaatccattcattccctggagatcctgccgcacagcctggcttcatttgccaccaactgctggactgtcttatcaaagcttcagtaaaagcttgtgattgtaaagctctgtcaatgattagcttgaactgggagactgaggatgggtcatagagagcaacgtaatttgagggaggtggccctattgcagtcaccaacgcgtctccttctctctcattatggaaaaaattagatgaaaatgcatcggtgacaagagtttgaatgtgtaactaacacatatgtaaacactggattaaaatcacattattttccgtgtagcctttcatattgacccaaatcttttctgaatgttttgaacattattgaataaggtatatagcttttctatttttagagtttttgtgtggtaattttataatctcatatatcaagaaaaataacatatacaagtatatagcattcctacataccaatagtaaagaattagaaaacacaataagaaattacacttctccacaaaattataacgcatctaagaacaatcttaataaatgttacctattttaggaaaattgcaaaaatgtattggtagatttgagagaagacttgaatgagaaaatatagcactttgtggatggaaaaatgaaatacttttcaatttaatacatttaacttaactaaaatcctctaatctctaattttattttttattttatttatttaacttaactaaaattctctaatctctaattttttaattaattaattaatttttaataagagtcttgctttgtagcctaggctggagtgcagtggtgtcatcacagctcaccgcagcctcaacttcccaggcttaagcaatcctccctcctcagcctccaagtagctgggacaacaggcacatgccaccatgcccagctgatttttgattttttggtagaggtggggtctagctatgtcccccaggctggtcctgaactcctgggctcaaacagcccttctgcctcggcctcctaaagtgcttgggattataggtgtgagccaccatgcctggcctaatcccaaattttagttcaagaaaattattacgaaaggccaggcacagtgattcatggctataatcccaccactttgggaggccaaggcaggcagatcacttggggtcaggagtttgagaccagcctagccaacatgttgaaaccccgtctctattaaaaatacaattagctgggcacggtggtgggcacctgtaatcccagctacctgggaggctgaggcaggagaatctcttgaacctgggacgtggaggttgtagtgagctgagatcgcaccaccgcactccagcctgggcaacagagcaagactcggtctcaaaataaaaaaaaaaaaaaaaagagaaaattattatgaaagttcccttgaagaataggcaatatttatttttaaaaaggaaagaaaaacctgaaaaagaaaatagcaaaggcatagactaccttcagcatgattctggaataaagataaacatacagaaagaaatacatgcacatacagaaagaaatattgtaccaaatcgatagcctccaaataacctgtaaaaaatttaatgttttacagcctggggaacataataaggccccatctctacaaaaaaaattaaaaactaaccgggtgtggttgtgcatgcctgtagtcccagcactttagaaggccaaggtgggaggattgctttgagcccaagaggtcaagactgtagtgagccatgattgcaccactgcactccagcctgggtgacagaatgagactctgtctcaaaaaataataaataaataaataaataaatgttttaaatatttgaagtatcacatatgaatgagaagcagagtggttaatagtttggtctctgtgccagatgaggtggctcacacctataatcccagctacttaggaggctaagtggggaggactgcttgaggccaggagttttgagaccagcctgggcaatatagtgagactatcctcacctctaaaaaaagatgattgaggcccggcacagtggttcgcacctgtaatcccagcactttgggagtccgaggcggctggatcacctgagatcaggagttcgagaccagcctgaccaacatggt

SEQ ID NO: 317041 - DNA, 4001 bp, Homo sapiens
tttacaatgtatcatcattgaacttaccgatagtacattaggtttttttcttctaataaatagttctgcagcaaagcccactgactgcagaaatgaagataccagtttctctagggagtttaatttaatcgaacatctaatttcaggtttctattaacagcctaaggtcaactaacatacctcttttcaaaccagaagaaatcactcgtggacactttccttaaacactattactaactccaaaaaatttgtagatattaatgctagcagattgttttttcccctaaaagcaagtcttcttccctagggtgaggcagatcatccagatgaatttctcttataaaaatgctcctcaaattcgtacagaaaaggatagcacaaaactgctgtgtggaaaaacctataatgaacaactggcctattccccacttgattttgctggcacatttcaggtacttgtcagaataccacttcatactttttcccatataccagactcttgtgagaatataatcaatatatttaaaatgtcttgggtgatattaatggaaacataaattctgagtaagaaattcagtggttaagtgtaaaatgtttattttagtgaaatacaagaaggtgagcaatttccaatttccgtttaacttgacttattaaaaataagtctcattcacattcttctagtattattgtatactgctataaaatttaaaccagaaaagtgcttctccttgtcagtagctatctgcccaaaaaaatgaatatgacaattccagatctcatctgccatctctaagaaagccacttggaaatgttaggtaggtcccatgggtcctgatccagggatctgtccctgggtccccatcaggctcggctgcaggcagttgcctaaggcgtcttccgccttcagccacgctgcaatccttgctccaggcactgcggcaggttctctccatgcccccaggaagactctccaaacccgaccagctcatttctcctgccccggaggatccagacgccctggcagctcctgggctccagaaccgagaatgggatgctgcctccaatcccaattgccctaagtttctttccagagggccgggagactgctccaagtttgctgtggcgggcgagcggccgcgcgccgtgtcctgggaggggggcggcggggggcgcgggcggagggaggggaggggaaggacgcgggagcctgggttgtggtggtggtgggggggcaccgggagggggaggagcaggagcgcgcggccgcggcgctacctttctccaaacaacgttgccacacgcggagagcacggagatttctggggctttggagggaatcgtgagcgggcgggaggaggccggggaccacacaggtgagcccccgcccgcgccctgcccgggacggcggcgggcgctgccagccccgctcccccgcacccggggtccgcacggtgcctcgcctcaacccctcacttttcaccgcgaacccgtgaccccctcctccttgcttgctctccgcccccaccccggctaagtgtagccgccacactttcccaagcccgcaggcgccccccccaacaccagcgctgcacccccgacccattccccgcggccccctccaggagaaaaaatgaaaccagactggccgaggaggggggcggcagggaccagggtgcggagcagaggtgagggagacgggacttactttgcgaggcgcggtgcagggcgccgccgacgagaaataaaggccccgatacgggctgcctggagccccccgagcgcagcaatgtcagggctccagtccgggcggcgttggcggccgcaggggacggggacgggcgcgcgtgcggcgggcgctctcgctgcgctccggctcgggccccggctccgcgcggctccgctcctggctcccctctggctcctggcaccaactccgggcagtcacatgacgccggcgccgctcgctctgcgagcctcccggggctggcggggtaagtagaggctgggacccggggtgggagggtcagggaggggagagggagccgccgcggccgcccgggctgggcgggtccccacccacttgggtggaggcagccgccggaggggtcggccgagtcactcgcgcaaacacgcaccccgccctgcgcccttcccccgccacccccgcctcccgcgccgcctccgccccgccccgcccagtcacccggggacggcctgacagacactcattattccccggagccgggcgccgccccgccggcccaacctgtcccacgaggcgcggcgcggccgtggggctgggcgtgcgcggcgcggcctccgccccccgcccgcgtccccgcccgcgtcccctccccgcgccctcctccccggagtccgcgccccgccagccctcccgcccggcccagccgccgcgccgccgcccgagcccggggggaaggaagggcggcgctgcccgctccgggcgtcacacggctgcggcccgctgcgctgcttccaaaacacacagccgggctcgcgggcgagccgaggcggggggcgcgggctgccagggccatcgatcagccggctccagcgggaagggcggccccgggcgcggcgggaagggctgggccccgcggccggcgcggcgcggcgcggcccctcctcggctgagcgcactcagctcactgcaagagaaaagccgagccgaggcggccgcggtgcaggagcgagtgggccgggcgggttcgggaggggaagagcggccgctggggcgcgccgagcctccctggccccgagtcgccggggtcaggggacaccctgtaggcgcgctctttctttgtgccctggggcgacgggtccccctggccggcggcccaggcggcgccccccacctcgtgggacttttctttgaaggcccggagacccctggggcaaaactcccacgggccaggcctgccgctggagctaaaaagcggcatttgcgcagttgggcttgcctggaaacttggcaaactttggtcggatcctcccctgcagagcgagggcctggcctggcgaccccctcatttcaagtcgcttctagggacctagcgccctaagctcagtggccttcagggtgctgcgagcgagcggggcggcacaaaagcgcgttcggtccaagccaggccccttcgaggactttgtgtagattggtacctaagtttaatgccttttgagtttctttttaaacagtattaatgtaataattaatgtaataaaaagaacaaaggacgaattcgttcgattgttttaagttctgtgtaatgtttaaaaccgcccctgcttcagtgtatggcttattattgcttcaagatgttttaaaggccctttaagttgacccatctcgctttgatgcttcatccagacatcgtgctgcttaaaacggagtgataatagtatatttcgagccgcttcatgtagctacacagtattgtaaaattagtactcggtaacctcaagtagtgaaatcgcatattttaaataacgcaagtccaggaaaggccacgtggaggatacccagaaccgacgccggctcatgggacgtcgtgctgtcccataagcttcatctttaaaatgtaaagggtgtgagttttttttttcttcataatgaataaaagacattccagaaaaaaaaagagttggattcgtgtcaattactaattgccatttattgatcactgacatcattaaatggctgattggctgccttaaggtttgcattagcggaacaccgtgctaggaatggctggtgaaactggctcatagtaggtgctcaaaaaagtacgtttttttctccagggacacagtgacgagaacttgaagcacataaaccatgttttttaccttgttcatgtgggtgtggacgcaaaggggaagagcgaaataggcctgtcggagaaaagtgtgacccaagataagaagggagtggttttgatatggaaggggcaggcggcaaaggagaagaaaagccattt

SEQ ID NO: 317042 - DNA, 4001 bp, Homo sapiens
acctgcctgatcttaagaaagaagttcagtggtcttcataagcactactagtgtaaatccgtaacagccatagatgagtaaacttacagtcaccttcagaaaagcacatttactaatagttactgcatgcctaccatgtacatcagaaacaaaaggtttggggcattttgcagggagtaggtggagtgatttcccagcatcagaaattttttaaactactacataaatgctacctatttccagaattcacttctcaagttcccaaatgcacctcaaagttgtctctatatgtaacacttccttcaacacacattgatccacatgtcttctttcaccattaccttgtttgtgggccattattactcctaaatattttaaatgtctttgtctatcactggggagattcacctgtgatatgagagatgcccaatgtacatttagttaaacaaaaataagaatacactccaatgcactataacagacaaacaaatgaatactgggtatcctgtagcaaggttccaaattcacagcaattgaatcttagaaagaacattaaaggtcatccggtccagcggactgcaaatgtcaggcttcagtgaactttttactgatctatgtcaaaatgaggacaatgtaataagttttcataaggctaagttttttaaatttaaagacaatcctttagtcagattatattcttccttatatttgaggaaggatactaaaatgtttttttctttcataaaaagatggtgatagttgatcattgttgtttcataaataattcttttacttagcaaaacaaaaaacttagcaattgttagacttcaattgtttttttctttttttaattttacaggtcagttaaattcaaaaatgtgagaacctctgctctaatccaaccaattttctgctgcctaaatgccttagaacatggtcaacaagttgtttttctgcctatgcatgaccacctctgacgacaagtctctagtaatgtggaaccatcaactgaaaaaagatatggttctatctgagggatgtttgcttagttttgtgaaggaaaagcaaaaaaatcaaggcttacagagagtaagccgacttgtgaaaatggagccagtaaaaaaacaagtgccaagaagactgatcagtaagagaagatcagagggatgcactcaggcctatacctcacagtcttccttcaacttattatgaaaatcctttatacaaataactataaaagccagactgtaaaatacattcctgaggtcagggctggtcaatttacatttccttttgcacatctcagtttaccatctgaaattcctttactaatctacatctaaactacatctctcaatttactacctgaaattcctttactaagctacatcttttagttacacatctttcaggtttgatcagaagcaaatgtaacacagtctcaatatcacccagacccagaatgcaacagaatctaaatgccacatatactcaagtatgcaaaaaacaataagcacaaatatatagtccaacgacaatttttaattatatgagaattaaaaaggatgaaagttggaggcaaggaatagaaaaagcacaaaagatcaaaagctaatttcaaggagtccatcctgaaggaaccaggaatggtgggtacagatgcctgacctccctccaagacaatgtgccaacaggccagtggagaacaaggtgggatctgagaacaatgtaaatttggatgttaaaagagaacacaagcaaaagcaccacgcacagtgccaggcagagacaggcattcaaatatttgcacattgaatgaattaataaacagacacttacacaaagagaatctggggccgtgcttccaaccataccataaggcactttaagtccaggtcatctttctttgacttaaagctcaggctaaaaatctaacttcatgaaaagctgagtcttcctaatagtttccactggcctctgttctagcccagctctggcagtgaggcccggtaaagttccttcctaaagacactgcctgcaagtctcaaatccggcacacgggatccatggtggagggatgttaatgggagtggaggcaaacaggccaaggggtggcaaggaaaaaaactatttctgatccacagaatggcaaataacaccataacgagttcttgaattaggtttaatcctggacagaaccaaatgaaaataaaaacctacttgtatttataattaaatagacagaaacaatgaaaaagtctcaccaactttagccacccctgattgaaaggagttttaacaattctttcatccatgctggcattccaagttttccattatatctcagcctctcattgttccagcactattgatggaatctcaatgccaaaaatggcgctggtcatcaaaattatgattagctgatctaccctagagtcagtttatcaatgtttcaatgcatacatcaattctattttttattatttcaatttaaatcatctgtgtctctattccctccctccctccagaggctgctttcccacacccttcttttcacctgcattctaagtattcccttgttctttcctttagctccctctgttccaaaagtaaaaacgaactgcaggaacttatgtagaaggcaggtttactacagatagcatacctacatgttacatattatataccatatgttggctaaatacagctagcatatcctgctttaagtgcttctgagcctgggcagacccccgtgtgctcatgctgctgatgtgaaccatccaccatcatatttcctaggggttcaggtgccttcctccagcctgctgaagaacatgaccaaatctcagagccctcaaagccacagctatcgagaggtgactaagcccctgcttctgtcagcccaggaaggccaattcaagagtcttatctaccccctagatttccacgacctgttccactcaagctaaaaattctgaaacgcacttttagaaactgtcgttccagaatcccattagctctcctaaaagggctgaacatcaaaaaattattcaacccaagccaagtatccttattttggctggaattctgccaaataaccacaagagactggtgcggtacaatcggcatggagtgaagcttgccaaatttgaccggagaacgacaagcctccatgaataagctctcatgaaaaggtaaaccattcttcaggatgaggtttgtctgcgatttgaaaagtcagattcaaaggactcttgttccttcctaagagaagagggaaccaaaattgaaattttcgaaactcctgggtatttacagttcacttttaccaagatgtttttaaaactaaaaactaaaatttaaaaaaaaaacccttgttctgaataatgcaataatgtcttctacataatgtttcagctattatttctagaaagtaattctgttgccagtgatcttgaatgtacttgggtaccaaagaaaaaagacacctgtgcctggcaggtcgatacgctactaatttgcccgaggtacgaacgaaacagaagatgctgatttctggataaaacgttctgcagtgccaggtaaaagaggtcacatgccctgaacggccgccgctcatttagagtgatgcaaaagctcctcagatattaattttgttagaaattcggggaatcaagcaacctaagatcaattcatttagacagcgggtgactggtactttccagtttccttttttcaacggactcagtgcatcctagcctgatctcttataaaggggtaggcaaactcggcaccaggtgcccatgcatttcagggaggtacacacaggacctgcagggtcacccatgcacagccccaccccgaatcttctatccgcccgagatggggaagacccttccccagaaatcctgggcagcgttttaagtcaccgcctggccaggctgagtttccgtccgcgtccgctcaggactgcgggcacagcgcctcgtcacgccccgcat

SEQ ID NO: 317043 - DNA, 4001 bp, Homo sapiens
tcatcaaaattatgattagctgatctaccctagagtcagtttatcaatgtttcaatgcatacatcaattctattttttattatttcaatttaaatcatctgtgtctctattccctccctccctccagaggctgctttcccacacccttcttttcacctgcattctaagtattcccttgttctttcctttagctccctctgttccaaaagtaaaaacgaactgcaggaacttatgtagaaggcaggtttactacagatagcatacctacatgttacatattatataccatatgttggctaaatacagctagcatatcctgctttaagtgcttctgagcctgggcagacccccgtgtgctcatgctgctgatgtgaaccatccaccatcatatttcctaggggttcaggtgccttcctccagcctgctgaagaacatgaccaaatctcagagccctcaaagccacagctatcgagaggtgactaagcccctgcttctgtcagcccaggaaggccaattcaagagtcttatctaccccctagatttccacgacctgttccactcaagctaaaaattctgaaacgcacttttagaaactgtcgttccagaatcccattagctctcctaaaagggctgaacatcaaaaaattattcaacccaagccaagtatccttattttggctggaattctgccaaataaccacaagagactggtgcggtacaatcggcatggagtgaagcttgccaaatttgaccggagaacgacaagcctccatgaataagctctcatgaaaaggtaaaccattcttcaggatgaggtttgtctgcgatttgaaaagtcagattcaaaggactcttgttccttcctaagagaagagggaaccaaaattgaaattttcgaaactcctgggtatttacagttcacttttaccaagatgtttttaaaactaaaaactaaaatttaaaaaaaaaacccttgttctgaataatgcaataatgtcttctacataatgtttcagctattatttctagaaagtaattctgttgccagtgatcttgaatgtacttgggtaccaaagaaaaaagacacctgtgcctggcaggtcgatacgctactaatttgcccgaggtacgaacgaaacagaagatgctgatttctggataaaacgttctgcagtgccaggtaaaagaggtcacatgccctgaacggccgccgctcatttagagtgatgcaaaagctcctcagatattaattttgttagaaattcggggaatcaagcaacctaagatcaattcatttagacagcgggtgactggtactttccagtttccttttttcaacggactcagtgcatcctagcctgatctcttataaaggggtaggcaaactcggcaccaggtgcccatgcatttcagggaggtacacacaggacctgcagggtcacccatgcacagccccaccccgaatcttctatccgcccgagatggggaagacccttccccagaaatcctgggcagcgttttaagtcaccgcctggccaggctgagtttccgtccgcgtccgctcaggactgcgggcacagcgcctcgtcacgccccgcatctcccacctcccgccggccccggcggctgtccccagagctgcgcccgcggccggcgacacgcgccgcagcggcgcgcttatccgcagcggcgcagcccgcccgcccgctcactcacgcgggaggcagcggcggcgtctccattgtggctcctctcgggcttcagaacgcaggcaccgaccaacacagccagcaccattccagccgcggacgccggcactgcccgcccgccgagccgcgttccatccgccccggagggggcgccgcgctctcctcaccgcgcgccaccacctgcggcggcggcccccgcggccatggcccgctcggccgggcgcgctccgtctactgcgcggctcccgcgctcgcccgagtgcggggcggcggcgacgggaccggcgggcgcgcgggctcggccacttccgggttcggccccggccggcgccgacgctgtgacgggactgcgatgcggcctcccgcggcggccgagtacccctccctcggcgcctccccttcctcctgctgctgctgctgccgctgccgctgccgcttctgcttctggaggcgggcgggcgggcgccagccgggtgcggggcgggcgtgcccagacgctggcccgcaggccgggacgcgggcggcggccgcccacagcgggtctctggatcgccgggacgggggcgctggaaaatgggagcggagggggttctccgtgcagaaaaagggcggccgaacgcacggcgtaataatgctcggtatccacttgctgctctgcttcgcgggcgtgtacacgttattcttttcatttgtgcctgtacccagggagatgggaagggtaggcataaccaaccagtgtccttacaaagggtggcactgaggcaagaagaagtgatttgcctgtccagtgtcccaggcaggaagcaggctctccctcctcagtatgctagccattccttggacaagtgaagtgagcacctgctaagcaaggttttagtgctgcggctgtgacagcaaaaccaagtctttctgcttgtggagctgtccatctagacggggtgacggaaacagtaagtgatgcttaccatgaagaaacataaatgaggatgaggagagggaaagagattttagaaagagtggtcagagaaggcctctcaaaaggcatgagttaaagagatggaataacaggggctttgagtaatgcaaagaatgcctagggcagagggaagagcagcgtggagactgctaagcaagatcctgcctgccttgttgaggaacgggaaggagaacagtgcagctggtggttctccaagtatgcccgctggaagcagtagcacctgcgaacttgttagagatgcgaattttccagtcccactttagccctactgaaccagaaactctgggggtggggcccagcagcgtgtgctttaacaagctttccagatgatgcttgctggggccgcgagggtgggagaccctctaatgaagcagagtgaggtcaggaggacggcggcaggaatgggtgtggcgaggagtaatcacagatcacccaggccttgcaggccgtgataaaggacttggcttttactgagattagaagcaattagaaagtggtgagtagcttgatctgatcattaaaaggatgacttttctgggatttgtttgaaaatatcccacaaaaagaaggacagaggtcgggcgccgtggctcacgcctgtaatcccagcactttgggaggccgaggcgggccgatcacctgaggtcgggagttcgagatccgcctgaccaacatggagaaaccccgtctctactaaaaatacaaaaaattagccgggcatggtggtgcatgcctgtaattccagctactcgggaggctgaggcaggagaatcgcttgaactagggaggcagaggttgcgatgagccgagatcgtgccattgcactccagcccggtcaacaagagcgaaacaaactccgtctcaaaaaaaaaaaaaaaaaggacagagaagtgaatagatgaatatttgcaaaatgttaatttttgaggctaagtgttgggtgcataggggtggtcatcatttatgtgtgtttatgtgtatgttttaaaagataataatgggccgggcgcggtggctcacgcctgtaatcccagcactttttgggaggccgaggcgggcggatcatctgaggtcaggagttcaagaccagcctgtccaacatggcgaaatcccgtctcttctaaaaatagccgggtgtggtggtgggtgcctgtaatcccagctactgaggaggctgaggcaggagaatcactcgaacccaggaggcggaggttgcagtgagccgagatcgggccactgcactccagcccaggcaacagagcgagactccgtctcaaaattcataaataaataaa

SEQ ID NO: 317044 - DNA, 4001 bp, Homo sapiens
cttattaacagttttatcactctcctatattgaaaaacactgtcgtgcaaaattcactattttccttaggggcgttttaaagatattgtcaactgcatcccatatctccttttttcattagggcccaggaggaaaatacgcctctcaggcctcattactggaaaacgccttggttagggcagaactggtttgtttctaatcttggaattagaaacaaaatgaaactttgttattttattttatcttttcaagcaggggtctcactatgttgcccaggctggtcttgaacccctgagctcaagcgatccgctcgccacggcctcccaaagggctggaatcacaagcgttagtcaccgcgcccagacaaaacaggctgaaacttatgttgttcctttttctctttttacctagctcccaggaagcccaaggcccaaactgtgactcatctctagtacaggatcttttaaataggaacttggtattatcttttttcttgactttgtgttcttcttttcctgctctacctcaattttcccatttagtttgttttatcctatggtactacatggtcgctagattgcttcaaatatatagtttctggaactatatattgtacatattgcatcttcttacaatttcatgttgattctgccctccctgcccaattacccaacaacgtcagtgtattcatctttgtgtaaaagtattcacataagtcataacaagccaataggacatacacattcacaatgcagtcaaatctgtaaatgctgaaaaccagaaaaaaaaaaaaaagtcatgattggttttttgccgccagaggtctaataaccaaaaagagttattaaactgtttcctaacaggaaggagaatcaacatttatttagcaccagcagatgccaggcacataacagcagctcatttttcaaagcaagcaggaggggcatccgcacatctaacctctggaagaagacaccagaaacagaatattgggagggtgcaggggtgggtggggtgagcctgtctgccccttttgtaccttttgaattctgtgaacttgtcgactactgaagaatatttttgaaaatgaaatgaagcgataaaaaacgacagtaacgctttactctctgacatagcaaacttttaccgccagcttctgatcccagagcatgcactgaaataaatgcctaaatgcaaaagtttcaccaggcacgccgggtctcgggaaaatgaagtccccgtcttattctccacactccgggggcgagggtattatttaaaagaaaagcttaaaaacttaggtcaaaattgcctgcaagtaataaggagaggaaaaaaaaaatccgaaatggtttccagtttgttttattggcagggacagtccgggaaagcagcaacgggtgcaccgcagtccgctcctcactgccggccaccagcaccgcgtccacaactttccacaactccagggcggcccgggcgccggctccggcgctcgggggtgcgcagcggggaggccgggccggggttcgagccccgggcgcggtgtgcggaggcccccgcccggcccagcccctccggacccgagggcctcgcagccgcctccgggaggggcagcgtcttcgcgccccgcgcgctccgggaggccgcagcggggcgtgagagtcgcgtgggggcgggaagcgggccctgcccgaggcggccccctccccgatgccgagaaggaagtcgcacttaccgcgtcgggctccggaggcggccgtgggtcacggcgggccggggcggccaggcgggaggagcgggggaggcgggggccggggccggcgagctgagtgggatgctcggcccctcgcgcgcccctagaccctgtccgggcagcctcatccccggcgccggccggcccggagcgagccactcccgctccgtcaggcggcgccaggccggggggtcagagtccccgggtggccccggagggggcgggcgagtaggtgggggtaggggaccggttagcccgtcagtcccggcgcggcgcagtcggctgcccgccccgccccctcccgccaggccccgccccctcgccgggtcgcgcgcccggagaggccgcggccgccactgccccgccgggggtttctttgctctcctgcgcggcgtggggacggcccgagccggggaagggggtgggggaacgggagcgtctgtggcaagaggagctagtgggggaaggggacgtcaggctgggcggggctctggcgaggagggggcgtggcgtagaggacctgacaaagattctggttgttccccgccccttgaaactggggttaggggaattcctgggggtggaagttaggaagaggtccctctgcagggctggaaggccgtgagagaggcggcctctgttgtctcagagcttaaagggaactcactaagactcgcctcccttctccagcctcagtaaccattccccttgcaataatctgataattagtgtgctctaggtggtgggtttgtggcatcgaaattatgatcctcagcactgtgaccataatcattgttttccagtggtggaataataagaatcagaaaaagtaggttctttattcattcctctacccaacattgaactcctatatgctaggtcgtgagaataacaactaatttatttggcgccttatgaaaacactaaagtactttacatattaattcatcatcaggtttgagcaaaacagctatggtccctgccccccgtagctcatgatgcattaggaagggagggatttccttactttgtctctgagtgatgtgtaaaccaaatgcccacgtgctttcttttggttcttaaaataatgcctatgttcattattcgtagattagtgtttgctactctgagttagctgtatgctctccgtccgtgatggttgaatgtggtcattcccccccagatgacatttgttcaggagctcttcagtttgtctccgtaataaaaacccaatgcaagcaaagcaagtggtccagaagactgataatcaaataacataaccaaattgtggtagcctggggtggctgggagatctatttagggatgttttgtgcacttccacttggggaagtggttaggaaaaaacaatatgatgtaaaagaatgaagtactcacatggacagctagttcaaagggaagcggatgggacaatttaagattgttacagtcaggaagaagatacatcacaaactctcccaaggagggttccaaccacaaagtacaggatacattttttatcggagctatgtggaagagacaccctccacctcctgtgccatgacacctacgcccatagataaaaatgacctcagtaactttgtttttaaacacaaaagacaattgtgtaaacaaacccactgcttgaatttttggaatttggtactacgtttcagcccttattggatttttcagtgtttacctttgtgtacattaaccgcaatgacattcttctcatagttgttttttttttcttccctgctcatagttacttgttcagtcttggatttttagttcagcatttttctttcaggtttataatgagaaagactagaaaagcattgcaatctaatcagataacaattgcagtaaaaattcctgatttaagaaataggcattcccggccaggcgtggtgactaatgcctgtaatcccagcactttgggaggccaaggcaggtggatcacgaggtcaggagatccgagaccattctggccaacatggtgaaaccccgtctctactaaaaatataaaaattagctggttatggtggcacgtgcctgtaatcccagctactcgggaggctgaggcaggggaatcacttgaaccagggaggtggagactgcggtgagccaagattgtgccattgcactccagcctggtgacagagtgagactccatctaaataataataataataataataaagaaagaaagaaataggcattcccatacatgatcttttatttttcc

SEQ ID NO: 317045 - DNA, 4001 bp, Homo sapiens
ctctccattacacagaagatgacagatgactagagtaaacattttttatccttccaagtccacattcttaaggttagaagaggaaaaggtggtaaatatcctcaagtaagagacacttaaatatataaattcattttgtctcaatccatatgacacctacatcattaataaccaacttacaaattacaagtgttatcaaaagctgcacagaaattttaagagaaaaatataataatcaaattagacaaatgataagctatttgtgcctttaaatatttagaaatattttcgaatgaagattaatcagaaagatgactttcatgctctaagttgttatataatcttattgtagtttaaactgatgaataagaaaatccatttcaaagataaaggcagattccaagataaaggtagataaagtcactatgaaattacctatttttttccttattttctttcttctaactgatttccccttcttcctgtccccttttcaccagataatcacatctagcccctctacattcccttaaactctcctggaggaatgtccttcatttccctaaatagcacacatttcagtgaaagtgaaggtaacaggaattagtagctgtcatcttagagacatgttacttagtattctctatattagtctggagagctgtaacacagacaggacaaagagaaataaccataagaaaaatattattgacaactacaattgtgtcaaaaaattggtgactataatgtgcatctctttgcaaaacctttccttttcattaaattaaaaaatgactctatcatctgttataaactaaaatgtcacataaaatttcatactatagaaatatcttctatagttttgatatgaatatagaaggttaatgaatgaagcaaaccacaggcaatgatacatgaaattgctactatatattattttcaaagctgagccagatctatatatagaacacaagatatttcaaaatgaatgctatttgttgtctttgtaattttacagactattagaacattaaaaaaaccctagcagaagtatcacatgttcataccaagatattatatatatgtatgcagatgtacatatataatcagattttaaataataaatactaaattatttaaaaacattatagagccatacccccacaccccttttctaacagtaagaaaataatcaacctgcatgaactggaatcagattcattttcttcttcactagtgccatcatccacttctggtctatccagccaatgtgcaccgccacaatcttctgctgtaaactcaaatgcagggacttcagaggtggatgccattggccaagaaggtgaattctgaaaatccagttggctggaccttcggtaaccaattgaagccaaaggcaattgtaggctacatggatctaaaaactttctcccaccgtttgctccagtctgtcctcggttccaaaattctccctgctggctgtcaactgtagaattaggagatgatgcttgatgaccaaaccacctccatctgattttcaaaatctgtttcacatcaaactctttacgagaaccagacatcctcagagaaaccaagtgatcgtctaggcaacgggcaaaaagcactgcacacagatttgtgcatccaaccaagacaagagaagtatatgccctgctgtacacaacaaaaatatgtaaaggaaaataaatcacattcatatatatatctacaattacttttatgccaatatatcagattttaaagaacaaaggataatgaataaagatgaaacacggtggaacattccgttcaatcagagcaaactctcatccacctatcctgaagcagctagaccactttcccggctctcctttcccatactgaccattaggtctcacaaacactgacagcattcattaaagtcctttcaaatgcagaacaccaccccctttttcttaaaccacaaatgacagagacagaaaacactatccccgttgcagtatctcagtctctgctgcttagtatattaactctttcattgctgaaacaataaatgtattctatagcatttccctttgtacttaaaaataatcactttaaaactaaaatgtttctatttctaaactaagtccctaagtgaaataccacaaaacaagtttttaaaaaagcatttgtaaaattagatgagttatggtgattttccaggtgtgctctttggatggggaatgaggaggaaagcggagtacaaaggtggggctccagactattgccttcacctctatcttctcccttcagaaaacaaatggatctaattaatacagtaagatcctgggtaagatttcacttggataaagaataatgaggagaataaaaagtttgaaaactacaaaggatcaaaatgtaacaaatactctttttcaaataaactgaggccaggatttctctataagtagaaatgggccactgccagttagtgtaacatccaaatttctatgacattacttaggaaaaggaaaagtgcggctcaaaaaagctaccagggactgggataggactattgggtgtacaagtgccctaatggtgccctctgttgttagcaaaacaaacaatggtttgaacatggttacagttaaggcaaattgataaagcaaatacaaataaactcaaaaatactgagtagttattgtgaacaatgcaatctactaggcattgtcagggacacagagatatatatatcttggttcctaacccccaaaataattaaatctagctattgaaccaaatacaaaatatttgataaggtaaaataagaaacattaaaatgctgcaatattaaagtgtgatctatcaatgcagaatttgagttttcagggtgctcagtatttactcctttatcaactaattccatacaaaaggcaatgcctatctaagctgaccaaaaaacaaaaacaaaaactactttggaggcttacaaaaatattgtgaggtgtctatcttaatacaaattattcagagaaacaagaatgagaagcataaaaagccaagtatgatttcatgctaaataatacgggaaaaaccatacaaactgtaagaaagaaaggagatatcaggatggcaatggagtggtatgggccagtttcattagggagaaggctgctaagaatagtaaaacattgtttaggtagaatgatagatttctacagaaaaagattctaataaaagcatgaagtgggcatatctacaaggaagaagtgggaaataatcagtttgatcagccagccataccaaattaattttaaggtgtagtaagagataaagttagatgaatacgatgagataaaatgccttgagcaagcagcaaagacattattgaatggactgttgaacaggacaatgttttaggaaattaacttggcagtactgtgcaggacgcattagagagtgaaatgacactttcccctctcctctcacctttgtcagactccttctgatcaacatccttctaacttcactctagctatccaactttatttctaaccattttccaacatagacacaccacttcattggtcaaggcagtctacattatggtgttccctcttttataacactgtttgcctcccagagaaactctggtttaaaaaacacacttcatccttcaagatttagctcaggcactatcatctttgtaaacacttcagttactctaagtagctggttctcaacaagggaagcatcaacctgctcctaaaggcttctggaaaataggtggtggtggtggtggtggtggtagatttttagttgttggaatgaccagagtgctataggcattgagtgtgcaggggccagagacagcaaacatctggcaatgaaaaatgatacctttattttgccaatcctcctccactcattcccatggtaatcattgctgacgccaagcttggtacatatagcctttcacacctctctccatgtttataaatcatggacaaacttatata

SEQ ID NO: 317046 - DNA, 4001 bp, Homo sapiens
cgttctattgccaggctggagtgcagctgcgtgatctcagctcacttccacctcccaggttcaagtgattctcgtgtctctgggactacaggcatgcgccaccatgcccagctaatttttttgtatttttagtagagatggggtttcaccatgttggccaggatggtcttgatctcctgacctcttgatccgcccgcctcggcctcccaaagtgttgggattacaggcgtgagccaccgcgcccggccctaactttcttcttaatgaatgaagaaatactgtttttaaaaaataaccctcactgaatgtgaactgagtttcttgtcaaaaaatgtgcaattattacagaatatatcatcttaaccaattatcagtaatcttatcaaatgctaaaagaattggcagctttaaaaattaaaatgatgaagctaagtgctcatatgtagttgaatagagtatccttagactttttttttctttttttgagatggagtctcactctgtcgcccaggctggagcgcagtggcatgatctcggttcactgcaacctccgcctcccgggttcaagccattctcctgtcttagcctctcgagtagctgagactacaggcatgtgccaccacgctcagctaatttttgttatttttagtagagatggggtttcaccatgttggccagactggtctcgaaaatcctgacctcaagtgatccccccgcctcaatctcccaaagtgctgggattacaggcgtgagccactgcacccggcccctgagacacctctttttatatttaggcttacgcaattttggtatcttgaaagcaatttttttaaaaagtgacgaaataaataaagtgactaaaagtttgaagtttgaactgggtcagtttgacaaattaagaagggtgccaggaggaagtctgaggaaaagcagcagcttaatgccaccgccatctccaagcagcgttccaggcgccagcactgttagcagcagtcctctgcgtacccaagagtaccgcagggccagaacacgagaaagatgcgcgaagaggatttccttctagagagagaataaagaacaccaagagtccaacaattaccatcttgtataggagaaaaacaatgcaaaggaaaaaacgtgcaaccagcagataaaatacttatgtcaacccaggttctaaggaccttttcccaaagtatccctctaaactggtaacattagcttagggcagagtcaagaagaaagttatgccattaacacagatgaaaatactgaacgttttctatgaaaagtcacccgattaaacactgccaagagggaaaaacagtgcaagtccagtaaagcacgagacacgtagaaaattcaagctatgtagccaaatcgctctctctgaagaaaacagcaagccaactgaacccagcacggagtggaaggcgtaaagagctgtcatcgtggcggtaacaactccaccgggcggctgagcgtctagaaagaggctgcggttcctggttccacatcaggaggcactctccacaaggtctacaccgccgctcccgggaaggcacctccagggcggccagcaagccccccgagtggggacaggcagtgccttcctcgcctcgtccccgcgcggcgtggcccggaggtggcccactcgccccgcccccgcaggccgcggctccagggggcgtccggccgccctcccggggccccgaacccgcgccagccgcaccgcgcctgccctcttcctggaccccgcgaagcacctgcctgggcccctcttcgaaagactgggaggaaggagtcaaggagctgccggggaggctgacagagccagaggctggagctcccctacgggagccgggagcataaccctgctcctcccgccaatgggggcgacaaaagccgtggaaggttgctcaggggctggatctcctgctgtccgggccccaagccctctcagctgtggagtttcggttggtgcacgagggctcgaatttcctccgcacaccggagacccaagacgggacggtgttgcgacttgggggctggggtgagggagggctcggcgcgagcggacggcaccgcacaaaggaagaggggactgaggggagacgaggggactgaggggagacgagcgtcccgttacctcgatcctcgaccctgttcttcctgatgtcgctaaggttgcagccacgttaccacgctcccagagccccggccgccctcagcggaacctcaccaaccccgcgcgagcacccggcggacgcgcgctctcctgcgcggccccgcggagccccggcgggcgcttggcgtcctctcgcctcagcccccgcgagccgcggcctctgggggcggggcgggctgggcggggctgcgcacggcactctgggaagtgtggttctcgggacctcctccccgaggccacccccacggcctcgcccccgcggctccctagtgggcggccgggtctcagggactgggcagtgttgcccggcctggtgaaggcggaccagggcgtggcggaggtccccataacaaatcttgaaataaaacactgcctaaatacctttgagcttatccatgcttcacttctgcggcggtacaaaatttagtttctttgtatgtccatcaaatccccttctgcggttgtgagtgttcctgggatttatgtctttgaaaaaagaaggggaaaaaaaggtttgcatttattcctgtgtcactttcaccacgtgctctacaaaggatatacaaaacaactgtgtttataaatacacacccacagtttgtaaacctaaggaagcagttgattgacctgagagctcgctgctaaaaagcagtgcaagtggccatgcgcggtggctcacgcctgtaatcccagcactttgggaggctgaggcgggcgcatcacgaggtcaggagtcgagaccatcctggccaacatggtgaaactccgtctgtactaaaaatacaaaaattagctgggcgtggttgtgcgtgccaccaatcccagctattcgcaaggctgaggcaggagaattgcttgaacccgggagtcggaggttgcagtgagctgagattgtgccattgcactccagcctggcgacagagcaagactccgtctaaaaaaaaaaaaaaaaaaaaaaaaagcaatgcaagtaaaagtgctgttgaaatgaattaatttttctataatgtcaataaagtggaatgtgtgaggcgggagatcaagagacagcaaaaaaacaaaattttttttaaagaaagatattcccctaaatgtgtcttttgccagactaacctcaaactttcacaatcctaggagtctatttcagaataaatttaatcctaggacctttattaatattaacacatatgaacattagcacattgattttaatagaaatgaacatatatatatctgtatatatatatgcatcttctataaaaaccccaaagcaactatttgaatttgaaattttatttctagaaaaaaaatcacattttttacattgaaatataaataattcttaatatttcaaaatattcctctttagagcattagtattttgcacatttaatgcaaatacctttagaaaaatagagtaagatgagttttaaagaagtatgcagtgaagaaaagtcataaaatgtgtctggaacgtgatgtaaaaattgttgggactcagaaatcgataccccaaaatatggtgctttgccgcgctgaactgaggaagcagcttcaaggtgtctcttaccttccccattacccctcctgcctctcaattctttgtctctcccaaagcaccaaatgatgtcgttctctgaatttcccttatctgcctagaaactagacctgccaaagaggaacatatttgccttacctgatttttcatttacttaactcatattggaggaagaaagactgaagtctgtcaacactcttggacagacttttgtcacaaactattgtctgctgtatgggctcaacacactttttc

SEQ ID NO: 317047 - DNA, 4001 bp, Homo sapiens
tattacagaatatatcatcttaaccaattatcagtaatcttatcaaatgctaaaagaattggcagctttaaaaattaaaatgatgaagctaagtgctcatatgtagttgaatagagtatccttagactttttttttctttttttgagatggagtctcactctgtcgcccaggctggagcgcagtggcatgatctcggttcactgcaacctccgcctcccgggttcaagccattctcctgtcttagcctctcgagtagctgagactacaggcatgtgccaccacgctcagctaatttttgttatttttagtagagatggggtttcaccatgttggccagactggtctcgaaaatcctgacctcaagtgatccccccgcctcaatctcccaaagtgctgggattacaggcgtgagccactgcacccggcccctgagacacctctttttatatttaggcttacgcaattttggtatcttgaaagcaatttttttaaaaagtgacgaaataaataaagtgactaaaagtttgaagtttgaactgggtcagtttgacaaattaagaagggtgccaggaggaagtctgaggaaaagcagcagcttaatgccaccgccatctccaagcagcgttccaggcgccagcactgttagcagcagtcctctgcgtacccaagagtaccgcagggccagaacacgagaaagatgcgcgaagaggatttccttctagagagagaataaagaacaccaagagtccaacaattaccatcttgtataggagaaaaacaatgcaaaggaaaaaacgtgcaaccagcagataaaatacttatgtcaacccaggttctaaggaccttttcccaaagtatccctctaaactggtaacattagcttagggcagagtcaagaagaaagttatgccattaacacagatgaaaatactgaacgttttctatgaaaagtcacccgattaaacactgccaagagggaaaaacagtgcaagtccagtaaagcacgagacacgtagaaaattcaagctatgtagccaaatcgctctctctgaagaaaacagcaagccaactgaacccagcacggagtggaaggcgtaaagagctgtcatcgtggcggtaacaactccaccgggcggctgagcgtctagaaagaggctgcggttcctggttccacatcaggaggcactctccacaaggtctacaccgccgctcccgggaaggcacctccagggcggccagcaagccccccgagtggggacaggcagtgccttcctcgcctcgtccccgcgcggcgtggcccggaggtggcccactcgccccgcccccgcaggccgcggctccagggggcgtccggccgccctcccggggccccgaacccgcgccagccgcaccgcgcctgccctcttcctggaccccgcgaagcacctgcctgggcccctcttcgaaagactgggaggaaggagtcaaggagctgccggggaggctgacagagccagaggctggagctcccctacgggagccgggagcataaccctgctcctcccgccaatgggggcgacaaaagccgtggaaggttgctcaggggctggatctcctgctgtccgggccccaagccctctcagctgtggagtttcggttggtgcacgagggctcgaatttcctccgcacaccggagacccaagacgggacggtgttgcgacttgggggctggggtgagggagggctcggcgcgagcggacggcaccgcacaaaggaagaggggactgaggggagacgaggggactgaggggagacgagcgtcccgttacctcgatcctcgaccctgttcttcctgatgtcgctaaggttgcagccacgttaccacgctcccagagccccggccgccctcagcggaacctcaccaaccccgcgcgagcacccggcggacgcgcgctctcctgcgcggccccgcggagccccggcgggcgcttggcgtcctctcgcctcagcccccgcgagccgcggcctctgggggcggggcgggctgggcggggctgcgcacggcactctgggaagtgtggttctcgggacctcctccccgaggccacccccacggcctcgcccccgcggctccctagtgggcggccgggtctcagggactgggcagtgttgcccggcctggtgaaggcggaccagggcgtggcggaggtccccataacaaatcttgaaataaaacactgcctaaatacctttgagcttatccatgcttcacttctgcggcggtacaaaatttagtttctttgtatgtccatcaaatccccttctgcggttgtgagtgttcctgggatttatgtctttgaaaaaagaaggggaaaaaaaggtttgcatttattcctgtgtcactttcaccacgtgctctacaaaggatatacaaaacaactgtgtttataaatacacacccacagtttgtaaacctaaggaagcagttgattgacctgagagctcgctgctaaaaagcagtgcaagtggccatgcgcggtggctcacgcctgtaatcccagcactttgggaggctgaggcgggcgcatcacgaggtcaggagtcgagaccatcctggccaacatggtgaaactccgtctgtactaaaaatacaaaaattagctgggcgtggttgtgcgtgccaccaatcccagctattcgcaaggctgaggcaggagaattgcttgaacccgggagtcggaggttgcagtgagctgagattgtgccattgcactccagcctggcgacagagcaagactccgtctaaaaaaaaaaaaaaaaaaaaaaaaagcaatgcaagtaaaagtgctgttgaaatgaattaatttttctataatgtcaataaagtggaatgtgtgaggcgggagatcaagagacagcaaaaaaacaaaattttttttaaagaaagatattcccctaaatgtgtcttttgccagactaacctcaaactttcacaatcctaggagtctatttcagaataaatttaatcctaggacctttattaatattaacacatatgaacattagcacattgattttaatagaaatgaacatatatatatctgtatatatatatgcatcttctataaaaaccccaaagcaactatttgaatttgaaattttatttctagaaaaaaaatcacattttttacattgaaatataaataattcttaatatttcaaaatattcctctttagagcattagtattttgcacatttaatgcaaatacctttagaaaaatagagtaagatgagttttaaagaagtatgcagtgaagaaaagtcataaaatgtgtctggaacgtgatgtaaaaattgttgggactcagaaatcgataccccaaaatatggtgctttgccgcgctgaactgaggaagcagcttcaaggtgtctcttaccttccccattacccctcctgcctctcaattctttgtctctcccaaagcaccaaatgatgtcgttctctgaatttcccttatctgcctagaaactagacctgccaaagaggaacatatttgccttacctgatttttcatttacttaactcatattggaggaagaaagactgaagtctgtcaacactcttggacagacttttgtcacaaactattgtctgctgtatgggctcaacacactttttcccaggccattgtatgttccccattttcccctaaaagtcctttactataccttaagttgccacatttccccaatctccctttcccccataaagaagagtatataaacgtctctaccccattgagtcattgggtaatcattctcctgaaatctccctgtgttatgcacattaaaataaattttgtatgtcttttttcctattagtctgccatttgacagttgatttttcagtgaaccttccaagggaaaagggaaagcttccctgtattccctttattaaacataaaacacaatatgtattttatttatttatttattttattttatttttttgagacggag

SEQ ID NO: 317048 - DNA, 4001 bp, Homo sapiens
tgtgcacacaaaaataccataaaaagagaagaatagcaagctccaaaatatattacttatttgcaccaaaagatagctataagtggaaaatgcaagtcaaagagtgtccacagttaataactcttttttgtgaaatgtgcaaataggtatatgtagaaaaatatctgaaagactaaataaaagatgtttaacgatgactgtttctgaatttggggactacatgcaatatgtagtttctaaatttttgcttacttacatccctgattttcctagccataatcatgatttattttgccaaaaaacaaaacaaaacaaaaaaatgaaaaaccccctgtagttggctgtggttcccagtgtctctggcttatgctccttctcacctttcagtgggtttgcacatgggtttgtaaattacggtttagaagagaaatcagggttgagggacagacacaggggagttgtgatttagggggaataaaagtcttttttcctggaaaaaaaaaggtctctttatgaatgtaaaccttacctatagatgtttattgtagccatacatctgaggaaaattaaatactcattgttgtgtggccctcttaagtcaccatagacccagaatcatgccttgtggggacacagagaaaactccctctgtaatgattaatgaaatgtccagaatcatttttattctccaaaaattaatgaaattaatagagaaatgagatctaaatctggtgttgaaagctattcacctagaactatccaaatgcatggtttgctaagttaaatttaaaccagttactttcatttttgaaatggttccctagcggtccagagtaaaactatgtatggtgttcctaacagatacttggattggacccagacactataaaatgcctagcactcttttgaattttcagataaagtttaattttttactgttgataataaaaatagaggactaatttttttttgtttcaagttttgctttgcagagtgtcatctgcgaacagaagtttttgttaacacaagtcccaagacattcctacttctgagctccttcctctggtctgcaacatatgtctacagcaatatacctgacaagtggtccttgttgtggaacattaaatagacacgtgtcctgaatcatcagggacaatctccacccccgaagctgtatgttcaatagctttctccaggggtggtgccacttgcttggctactcctgtcttagcctgaattccatgttttatagataattcacttaccacaggaaactgtagcaaacaaggaaatgaaataagttgcttgcttgaataaaatcattctaaaaaagaaaacaatacataactctgctggttttagaccacatttaacataaatcttaatttaaggtgatttagattttcttgtaaatgtctgaattgcaagacaaagcacacaattactggtatagaaaacaagggtttttttttggtacatttgtgtctagggagttggaaaatttataatgcttcccaagatacaaattgagacctccagactactgttgtgtttattgttcattggccaactctgtggctagtaatgttggaaagggaattggtagagagagagtaaacaattatgaaacctcttgatttgggcaaaaacaaaattaataaataatggcaataatgtcagtccaaaaatccctaagtaaagaaaacctctgaaaatattaaagcccatttaaaaattttaaatcaatcaaatattctttctgatttaaaatcatcttacatttaaatatttctacataaaggaacattatctatactctctacatactcaggaaattagaatataaatgattaattttctcataaagtaaaaaattatacttaaaaattatagtttatttggaaacaatcagaataataaaaatttgctacctgaaaacacaattgcttcttggaggtgagtctcttgtcacttaaaaatgaacggtcttcaagctgttctaatgtggcactgcaggcaatattttgcttggcttcaatattgactttgggtttctgccaacagtttcaactttttgtcctgtcaacatattccatgaacatcctatccgtgttcagctgttaagtatattaactatttcagggagtgatgtcagcaagaataggaataggagtttgtcagaacaggagtttctagcgctcatcccttgcagaaacatcaattcgaacaagtatccatgcacgaaaataacttcactagagctaaggaatcaggtgagaggttatgccacctggttgcagcacagaaataagaaaagacacatagaagtgtataggaaggacaatttcacattaccggtgtcatctcaccttcaagcctgggcagcacagtatggagagagatgccctcttgcatggaggagggacagttaagatagaacctaacttcaccacagatcccaagcaccaagcccactccagtaaaccccagcaccaggattcaggcctgccacaggccagaccagcctctgtggcctcagccccatgctcaccccagaccaggtcagcccctggggcttcaggctccaagatggccacacaaaacctagacttcaggcctgctccagctctagcctggcccccaagactctatctagcctccacgttagccccagcaaccccaggctccaagttggcacccatgggcctagaatccaggccatcccctgcagatccagcaccaggtcagcctccagagatcttggctccatgctgggccatgtggacccagatgctgggctcaccccagtggaccttgttcccaggacagcctgaataaactcaggaacaggcctatccccatgaactcaggtgccaggtgatccccatgttaggctggcccctgcagacgcaggcttaaggctcatttcagtgccaagtcagcccccaaggatccatgcttcaagccagtccttgtgcacagaatacagacaaccacagtgaatgaacccagaatccagcccttcccaccttagaactccagcagaaatcctgtgcatagaccccaacagacagcccaccaacaatctctggtcaatctgactagtgaatggctttctctgctgaagctagtatgtaaagactgaaataggtgcctacttcagtgcaaggccacactgatcacaaataatcggggaaacaagaaaccaccaaaggaaggaaataaagcagcaggaggtgaccctaaagaaatggagatctttactgcatgacaagagctaaaaataattgccttaagaaagctcaataagctacaaaacaatatagatagacagtaaacaaaatcaggaaaacaatacatgagcaaaattagaagttcaacaaaaagatagataggaaccataaaaaagaatgaaacagaaattctggagctaaagaacaaaatgactgaattgaaaaaattcacaaacagcttcagcagcagactagatcaagcaggagaaagaatcagcatgctcagatacaggtcatttgaaattacccagtcagagtaataaaaggaatgataaaaattgcagaaagctgacaagacttataggacactgttaagaaaattaatatgcattagaagagttccagaagaagtagagaaagagaaagttgcagaaacttatttaaaaaaataagaatagaaaactctcaaaatttggagacataaatgaaataaacatccagatttatgaagcccaaaagaactccaaatagattaaatataaagagatcctcggccaggtgcagtggctcatgcctgtaatcccagcactttgggaggccaagatgggtggatcatgaggtcaggagatcgagaccatcctggctaacacagtgaaaccccatctctactaaaaatacaaaaaaaatttagccaggcgtggtggtgggcacctgtagtctcagctactccagaggctgagacaggaaaatggtgtgaacccaggagac

SEQ ID NO: 317049 - DNA, 4001 bp, Homo sapiens
attgtttcattatttgttgaactcacctactcaacaaataatgaaacagtgtaaggcatattattataacgtaatttttaaaatattttgtttaaggacctaaaataaattctatatgactatgtgaggcaacatttttttttttttttgagacggagtttcgctcttgttgtccaggctggagtgcaatggcgcgatctcggctcactgcgacctctgcctcccaggttcaaacgattctcctgcctcaacctcccgagtagctgggattacaagcacctgccaccatgcccagctaattttttgtatttttagaaaagacaacgttttaccatgttggccaggctggtctcgaactcctgacctcaggtgatccacccgccttggcctcccaaagtgctgggattacagacgtgagccaccgcgcccagcccagtgttacagaatataaaataaatgacaatgtgtgtcaagtgtttaacacgaaacacagttaagactaaagaagtagaagactattttatttttctaagctggggctcactgcaacttccaacttctgggctcaagcaatcgtctcgcctcacttccagcatagctgtgactacagaggtatcaatgcgcctggctgatttttaaatttctttttgtagaacggggtcttgctatgttgcccaggctgatcttgaactcccggcctcaagtgatccttccatctcggcctcccaaagtgctgagattacagactaagcaaccgcattggccagaagactatcttattttgtctcattacactctcttatcccaggaatttcactgacaatttaggtatcaattttgacctcacatggattaatcaggtatctcttgttttgagcatccagcacttactattctccaaacccgactgatcattttatcctcctacacacacacacacacacgttaccatgtttctaaagaggcatgggttagaaatcatcgtaaattgctacaataaaccaaatgagatattgttatcacttactggaaaaaagtattgtgggtacatgtcctactgaccaaattctgacaggaaaagcagcaaaccatcattcagaatttcaaatggtaaatatacagagcctctcttatgccccagctggactggggagtagggagaacctaattttctcagtctcaagcaccttagtgtcctacacccccattcgaggcagaaactcaggatcctgcaaattcattcatattagtctcccacttcagatatcagagaaaataattaactgggatgggtggggctgggaggatcaaaacaaatttctgtttgggaagttctacctctccccgctcagtatgcccctcaaaattccccactctccccttcctcttatgtaggggtgtcactcacatccgccatgatgaacccccttctctcgcaggatcaatctccacgcctggaagagaaactcccggtgactcttccctctttggcttcctcgtcctccccacccacaacttaatacgcgagatcagccctggtcagaaccaggtaaaacccccgcggttctagggcttggcccagcgagcccagtgggagtcggagtgccccagcacccccacaggtactcagctggcacaccttacctcagcccaccccatccctgcccctccaccccaaagagctaggcccaaagaaaagaagagagggtcctctccttctgtttaatctcaccacccgcgccacctgcgggactaggcctcaaaaccaggcaaagtagcgccagttacctggggtttctgggctgcctggttctctccgctgtcacttcagggacagctttaaagacaggttcctcctcaagccaccgtcacatgattcatgacctcgtctgcgctccaggaagcactttctaagccgccgtcgccctacgatacgggatttccggaggggcccggcggaagctgcgagggcgcgtccggcggccgcgcccctcccctcccccccgccccgcacgcgccccgcccctcccccgcccaccgcgggccgcgtcttgcgcctgcgccttgtgtcacgggccgaaggaagtcagctgtggggtagatttgtacgagatcgctggaccctaaggaacccagaaaatgcaagcaaggttatgtgttacaagacattcttgtgcagagagggtgtataaatgtcattagttttgcagggtctgttatcttaaaaccttttcttgtagatgaagaaatttgaggggatggtgtgatgagctgaagagcaagcaccagattgcctgtgattggaagtaccaggtccacaggtttctgacctgtttcctaggctcttgtgacttccccatgggtgctctttactgaaggccttacctagattgaatggggaggagccatgggttttctggagcacttcaagcgtctacttttaacatgcagacactgattacgggcaccttctatgttcccttttacatcagaatttttaaaaattagtaaggtctcatgtaataaataataattgaaaaaaataaaaggctttccgggtgcggtggctgacgcctgtagtcgcagcactttgggagtccgaggcgggacgatcctttgagcccaggagttccacagcagcctggcaagataggaccccatctctacaaataataataataattaagaattatccgaacgtggcgtgcaccaggtactcgggaggctgaggcaggaggatcccttgagcccagggtttgaggctgcatcgagtggtgatcgccccactgaactccagcttgtgtgacagagcgagaccctcaaaagaaaagcttctttagaaatcgcatcctctttcagctaccacactgtttttcctctactccctttcatagccaaattttcagaaaactttagcctggttttcaattgctgcttccatatgtcacaaatctaatcagagttctgttgattctacctcctatctttgaaaactattcacctatctatattcctaccctactccaagccatgatcatctctcttttgacaacaacctcctattcttcttacattctcttttgccctccagtctccacacagcaacaaaaatgatgttctaaagacccaaatcacatcatttaactccttccttgaaaatcaagtttattgacttaggataaagttcaatatcagcatcatggtttatatatcattcttatggggatctggcccctatcttaattctctcacctaccctggattccttatgctatgatcatacaagtttgttttcacttccataaagatttttatcactttaccaacttagcacgttctgcctgagatatttctctagcataccttaatcctactaatctcatcttttgcattttggcttaaactcactctcagagaagccttccctgaccctcactgaatagtttaggtcttctagataaatgctttcattgtaccctgtaattttctttgtagaatttatcataattataattatttacttgatatttattttctttgctagatgtaaactctttaaggtttttgtctttcttattcagtgattaattcccagcacccagctcactgcctgggatatagcaagcattgacatacttgttgaatagttgaatgaatgaaagagtggccatattgagtataaaacatgataaaaacaaacattttacagtgagaacagacctttttattaatatattgagataaactacagagactgaaagacaaaaattcatatttcattcagaacattcattaaaaatcaaatgcatttgagttctcacagaaaattttatgtaagtctgatataacattaaatattttacaaatcagacatttcattttgaaatctaatttttaatcctgaatgcattatagacaaagtaagctctcctttaccaatttcatttaacttatacaaggcttccattataattccatcaaaccttaaaaattacctgcag

SEQ ID NO: 317050 - DNA, 4001 bp, Homo sapiens
tatcaccagaaactggaagtcaacaccaaaatggacctgtacaaataaacctactgaactcacccttatcttctgttagttacccccatatgatttcctagtcattattccacaatttactaacccaagcccctttgtcttgtcacacccccacaatgcattgttctttgtttaaaaaggtatacaagcttttgggcccaacgcttcttcaggtcttcattttcctcttgcagactcctgtgtacacgtaaaaatagtaaataaaatctgtatccttttctcttgttaatacatcttatgtcagttttcttaggcccagccacagaacctaggaggatagagggaagattttcctcccctacaatcctcaagtgcaaatcccagatattctaggatgccgttccagtcaagccaatggctgtgcctcccatcgtaaggactgttgccacgtaaggactgtggtcaacacagaggctgtaagagaagtaccaacttcctagggagggtagaagcactctgctaagcacttagcggctcactcccttcatctccttcacaagtctcaggtctcaaataccagaaatgaggaagcaaacctagtaatacttagtatttacttttgcacggcaatttatgactttaaaaatgttttgtctgcctcatggcaactctgtgaggtggaaagaacaagtagccttatcccccttgaccgataaggaaactgaaacctagtttgagacaggagctcctgtgtggtgtggtaggactgagtgagaatccagatgtcttcccgcccagcagttgatctttccacaaaaccacacagacacttagaatagtgccctctcggtcttttccaccaaagaaaacggccttccttggcattggtaactctgccaggttctaacttccctaagattgttcactccccgggaatcaatggagccaactgagcaactgttatctgggtaggctgtggcacagtactggagatagcactggtcaggcgactggtccctccaccactgagatacctgcaggagactggagctcaagctccccctagaacgttcttctgcagggacagtcatctctttctggtgcttaggcatgactcccaagcttgtgctggttccgagagccattccctttgcagatccttcacatctgaagagcgaccttcgtaattttttggagttcacttttcttctggaagatgctcttaattctgggaaacgtgggtctctccccaaagcccttttctctagagaggcatgcttttcctctagaaacccttccaagctacttaactccctgacctttcacttccgcgggggaaggagccctgtgactctgggacctcagaaaccctttcaccttggcaaactcgggcttcctccaagctcggatgggagccccaccgccgcgtctttccccgggttactgccaggaccgcgggtgacgactggagcaagtgcgcggccgagtggagccgggtaaagggcggctacaaccatcaccccctagccccgagcaggggaatcgcgccctcaatacgaccgctggggtcctcagcggcctaggccgatccccgcaaggagagaatttttcttttaaactgatttttgcaacttggcttgggcgcccaggacaccgcggcttcgaccagccccgcagccccagtagcccacgggcagggccccagcggcggaccatgagcgagccgccgcctctcaccttcgtcatgtctgcggtggagagactccggctcccgaaacgtctcacggccagacgtcggacgactactcgccccgcagccggaagaggcagcaagaacatcttgtcggctcggcccctcgcaccgccctccagcgagcacgtggagagcggtgggcgggcgcgccttggggcggggctttcggggcgcagacggcgtgcgcgcggactggctcgggcgccgggcgagcggacgtgcgtctagggggcgggacggatgggcagcaccggccgactggaccgctgggatcaaaccgcggttgtggaggggactcaagggtgcgcccgcattcgtgtgcgcccgcattcgtgtgcgcccgcattcgtgtgcgcccgcgcatgcgggcgggggcgaaaaggcggggcttccggacgcggttgacagtcccgggagcaacgcgaagtagaggggcgggaccgatatggtgacgtcacacgatgggtggggcggaggcggggcgagttctgcaagcgggcgtgggcggagcgctgggcaactcccgggaaatagaaactgagtgccagagcttgttgtcaaggttgctgaatagacgactgcatagtgaagacactcccactgagttttcgtttgtttgtttggtttttttgagtcggagtctcgctctgtcacccaggttggagtgcaatggagcgatctcggctcactgcaacctcccgctgcttagttgaaacgattctcctgcctcgtcctcccgagtagctgggattaggggcgcccgccaccacgcccagctaatctttgtgtttttttgttgtttttttggattttttttttgaggcggagtctcgctcttgtagccctggctggagtgcagtggcgcaatctcggctcactgcaacctccgcctttcgggttcaacagattctcctgcctcagcctcccgagtagttgggactacaggcgcccaccaccacacctggctaatctttgtatttttagtagagacagtgtttggccatgttagccaggctggctttgaactcctgacctctggtgatacacccgcctcagcctgccaaagtgctgggattacttacaggcgtgagccaccgtgcccggcaactctttgtatttttagtagagacgaggtttcaccatgttgtccaggctggtctcgaagtcctgacctcgtgatccacttgcctcggcctcgctaagtgctgggattacaggcgtgagccaccgcacctggcctgagttatttttattcgtgtcctttcatctgttccacaggtgcaacggtgtaaatactgtttttgaaaatgatgtaacactattaggttcgttgactcgtgcacatagcaagtcaatacgcccagacaccagggttgcagcagagaaagaggtgtaatcgtggagtcgccaaaggaggagatgggaggaaacctcaaatccatctccctgaggaatttggggtcaaggtttttaagggttttggagagggctatagtgtggagatcgttgattgaagagtgcagggtgaagtcatgggacagggcgttgaagaacctgtattcttaagctgaccccattcctctctggggatcttcaaactggtagctggaattcaaggtctgaaaaatatcttaagcgatccttaaacagaaagcttatgattctaatgtcagagatcctgtctataggaacaatgggaatgcaaatggtcagtatgtagtgctaggtgacttttagcaacaaggaagtgggccaaagtacagcctgattaatgcttaattataactatatttctgcctagaacttggcatgaaatttttgtcaacacagtggggatggtttcaatagaaagttttcaagtagtgctcaatatttttatatatttttattttctgtaaagcgttttgttttttttaattccttattttttacttttttttttttaacggagtcttgctctgtcacccaggctggagtgcactggtgtgatctcagcttattgcaacctccacccctgggttccagcgattctcctgcctcagcctcccaagtagttgggattacaggcgcccgccaacacgcctggctaatttttgtattttcagtagagatggagtttcaccatgttggccaggtgggtcttgaagtactgacctcaagtgatccacccgccctggcctcccaaattgctgggattacgggcgtgaaccaccgcgcccggctggttttaaatttctcattgtaaaaa

SEQ ID NO: 317051 - DNA, 4001 bp, Homo sapiens
ctagtagagacggggtttcgccatattggccagcctggtctcgaactcctcacctcaggtgatccgcccgcctcggcctcccaaagtgctgggattacaggcgtgagccaccgcgccggcccatttttactttcttaagttgcagttactacaatcaaaataaagcaccgacggccatacagcattggtcagcattcaaatatagtggcataatcttatctcctctaaagggaaggagagctgacaatgttagaaaaccatttacctaacgtgcaatccacgctcgcatgtcaactatcctatttcaattattttccagcacacttataacttaaagcactttattttttttaattatacttaaagttttagggtacatgtgcacaacgtgcaggttacacatgtatacatgtgcagccatgttggtgtgctgcacccatcaactcgtcatttaacattaggtatatctcctaatgctatccctcccccctccccccataaagcactttaaaaaccacatttaaagtctcatttttaatatgactgctcagcagtgttttgaaaaccttttttcatcttatttcacaaaagactacaatcgcgcttccacttacgaataaatccccttgctctgacttgcttcaatccttttatgtaaaaaaaaaaaaaaaaaagtctaccaaaactttcccatacgaagcactgcagtatctaaagttagctactttcccaagtcactaacactggggacaaaacacaatcgcaaccgcgccagcagggatgcgccgccaagctaccacctccgtgcccccatcaggcaaggagaacctgaggtcccacctcttcctgccgctcccttcccagatgcccatgtctgtaaataggcagagtgaatgacaccttggaacaaattacctccgactgacagggaggggaggcctgccgttacccgggcctggtgcccgctaccgccgccacgcgccggcaagtcccgcaagtcgcccctgcccgcaccctgccagtgcccaacgcagagcaaccacagacctgcctccagggtttccagcgggggcggtggcggacctgtcgtgtctggggacaggtgctggggaggctttttggtccagggatttcccttaggcggcagcagcggcggctgccgcttttccgcagggccagctgccacctcttcccgggcgtcctcggccggcggatcccgcagcaacggcggcaacggcgacggcggcggcggtggcggtggcggctccccgccgaaagggcccccgggcccacgcgccttgtgcgccaggtgcagcgccaggggcctcacggggacagccgcctggggcacgctgcgtcccagcaccagcgccggcgacggctctccccgcgccccagcgctagtggcggccgcggccctctcctccctcgccgcctctttgccctcacattcgggcgggggcggctgctcggccggccggttcgccgcggccaacagcgactccctctcagcagtcaccgcgggcggatcctcccgagaatgggcggcgggcatcggggcgcgagtagacatcgtccctctgccccagccgccccagccggggtggccccgaggccagggaacccgactgcccgtctctccgccgggacaccggccggctccaactggggacagacaacccgagagcccggcggccgtggccgccgctgccgccgcccgccgaggccgcgcagcgcccggcgtgacgcccctccccgcaccgaacggagcgccaaccgcccgccggccccgtcctctccgcgacgcacgccccgagcccgccaccacgcgccgggagccgcagccgggagccgcgagccctcacctggcgcagggcagccgcggaggcgcagcacgccgaggccgaggagctttacccgagttggggaggcgcgagcagccaaagctggtaactgcccgcggaggcgtggagacggcgaagaggggcggcccgagagcacggggcggggcctccctgaggagcgtgacgtggctactcaccgggtccttctctcgccgggcctcccgcgggagctgacggattcgcccgcccgggtgccgcccggcccgagggtctgccccgccccagctgccctccgagtgcgagggaggacgaaggggacgactcccggctcactggctgaggccgccccgactgcaggctcaggggcggagcgcgcaccaggcctctgtggctcgcggctggctcgcggcctgcccccgcggcgacggcggccaagggcctgggcgggccgcgcacatggcgctgggaggaccgagcgctcgatttgcccttaggccctaaagctgggtcgcagctaggctaagggaggggacgcggtgtcgacccccggcctggggcagctcccaagtgaagtgggctccgcggcccggccgcttggcccgctggcgcccggcgcctcccccaggtgaaagttgcctcctggcgcctcggggcaccgcgatcacctgtaatcttgagccacgtcccagatgaagggggagttacctctcggtaactgtttaggaaacctttgccccagcgttcggcttagtgcgcttccccgcccgcattcccacccaccaactaaaagagttctaaagcgttcctgagtaaattaaatagtatttcgccggcttttaaaattttttgttacctgtttctttaatttgggtaaatagcacttaattacaaattaaccatattcccaataggttttttcttcctggaatggatgttaaaatggtacaaagacgttttgataataaatcggatacgagctttctacttggcactcacattcacttagagatgatactcgtttcatttttgagtcagtgtttgtgtcctggtgcaaggtggctgagagcaggttccgccgctgatttttttccgagccccccaccaaccccatagccttgttaaataaattatctgtgctcgccttatgtttgggctttcaacccccaccccccaccccacgcccaataagtcgcttcaattacattcaacttgacgttaatattttttgcttactcaaaagccgtattcggcacaaataattttcctaaggctaataacctattcatacataacagctataaacaataagggttttcttgttttccgtgtcagtgatctccagtttgcccaaccctaagcaacctggcgaaccttgttgcaattaaaaggggattgtacttccacctatattcccatccatctttactagctctgttattagtggcgctttgtattttttattggtggtggtgatggtggtggtggtggtggtttgagacagagtctcactctattgcccaggctggagtacagtggcgtgatctcggctaactgcaacctctgcctcccaggctcaagagatgctcctgccttagcttcctgagtagctgggattacaggcgcgccactaccacccggctaatttttgtatttttagtagagacggggtttcatcaggttggccaggctggtcttgaactcctgacctcaaatgatccacccgcctcggcttcccaaagtgctgggattacaggcatgagccaccgcgcccggcatttttttttttttaagaggtagtctctctctgtcgcccaagctagagtgcagtggcgcgatcgcggctcactgcaacctctgcctcccgggttcaagcgattctcatgcctcagcctcccgagtagctgagattacaggcgcccaccaccacacccggctaatttttgtatttttggtagagacggtgtttcaccatgttggccaggctggtctcgaactcctggcctcaagtcatccccccaccttggcctctcaaagtgctgggattacaggcgtgagccaccacgcctagcctcacacctctgtaaagtgtccttttaataataaacttaaaattccaaaatttgagcgttccgtctgattttagtttcatctgactga

SEQ ID NO: 317052 - DNA, 4001 bp, Homo sapiens
atgttctgactcaggaattcttaatctgaagtccatgcaactttggctggacaagaattctagtgggctccattaaattgtaaatgatacattttaaagataaggtaaaatcaagactcttgtacaaatataaaatgaatacacggtaaagatttaagcacagtcatgggttgcttaacgacaaggacacattctgagaaatgcacagtcaggtgagtaagtacatcattgagtatgtagttattctatgatgtattcacacaaacctaggtactattgcctattactcacctataatcttatgggaccactgtcatacatgcggtctgtcggtatgtggtgcttgactgtaaataagggaaccagttaagtgctaaaaaccagttcaaaggagaatttaaaaagcaggtacacaggcaatcaggaacgttgaaatgaatattaataaatactgctcaggacaataattaattgcatctttactggacaaacctaatttccatgttgctgtagcgagttacagggttgaaaaatagttcaaagaccacgaaagacatagataacttggaagagtgagtcagacaagacaccaagtcatttgtgtgtgtttgctatttaaaagtatttcgtaatttctcctgaggaaattatatgaaaaatgtttgtttggagacgcagcctctctcagtggcccaggctgcagtgcagtggcgcgatcccggctcactgtaatctctgcttcccgagttcaagcgattctcccaaccaagcctcttgagtagctgggactacaggtgtgcaccaccactccccgctaatttttgtgtttttagtagagacgagattttgccatattggccaggctggtctcgaactcctgacctcaagtgatcctcccgcgtcggcctcccaaagtgctgggattacaggcgtgagccaccgtgcccagcctcgcaaaatgttttaataggtacatgcacgttttcctgagaagctaatccatataattaagttttcaaaagaagtgtgccacaacaggttaagaatcattgttctggtcactgcttacaactcaagtccctcaacacgtagtggcctgtgtgttctgctttgtctgaatcttctcgtctaaatttccttattaaattttcaaggcccaggttaaatggcatcttactctttgagatcttccaccaccctgtgtcctatcatttgttttctcttaagtttctttgcaaacgcactctgcacaccatatctagcaagtgttagttcccttccgtaactggattttttactctttgaggacgatggcagagtcctgcaaaagaagatgataattttagaatataaatcctcacgttcgctatcttctggcagccacagctcagctccaatctgcgaaatacggcactctctttattgactactgcttctctcggcacccgtacttccgcaaggacgccgtcataggccgggcgcgccccaaacctccccacgccgggcccctatgcgcccttactgtctgaaaacgggaactacaagtgctgccgaagacttttgcgcgtgcgcatagataactaggccaaggaactgatgggtgtgcaggacgggggggcggggtaagaaggacgatagatgatagagtggaccgcaagaaaaaggacggagagttaattagacttcgcccaagctgtgcgaccctataggccgcttgtaacttactccgttcgactcccaaaatacagggtcaagtactgcggccttcggacatttccgtctccggatcctgatagtctcggttactttcgcgtcataggatgagcgacaacgttttccggtcccaattgagaaagacgggcccggaggcagtgcgcgctccacctacgtcacaggcgaggtggttccaggagggctgggcatcggagagcgcggccggctgagagactcgaagccaaggaagaatttgattggcgatttgaaagcggcggtttttggcttaggcggaggtgggcgggccaagttttgggtcctcatctggtgaggtcccgcgttaatgacgtcacgttgtttcgcgggagaaattcgaaagtggattttgtgcaatttgacaggtgaggtgaagtgtttctcgggatttcctaggaatgacttgagcgatttggggcgaagggacgaaagactctgctccttaagaagagaaccgggaaggatgctgtttggaaccaggattggggtggtcgcagtcacagctactcggactgcttgtagtaagtggtgcctcttcaccgtttttcccaggccttgctttgcaatttcgagtaggtatgaggaccaaagagggctttgctgtttgtatttaggactgagaaaggatcaagtctccattgtcatttggtgacaggattatggttcttagaatcttggcaaatgagatgtgggtttcctttgtttatttggactggatggtttgttaacaatgttgagttcatgattccaaaactttgttatccgaactatttagaggttcaggtttaggttcaaaaaatactccttgtttaaaaaaaaaggaaaaatatctagtatttaaatgaataatggctcatactttactgagaacaccgagttttatgtatatatattgcgtccgtacatatagtagcacaatgtatatgtatgtatatgtgtgtatgtacgtatatctgtgtgtatgtatgtatgtatataattatcacagagcatctggggtctttaaaaacttatttggagattaatctttcacctattagaagtcggtcaacaggtgaattgtctggtagacgtggacagatgaacacttggaaaaaactctttgcatctcacttaaatatatatgatgctgttgtctaaaataattttttctgattaatactaagataagaaagggtgttgactttcaatgaataagtattagagctcttctaaattttaaaagatccagttagctttttttttttaggttttctcctataatcgaatttaaccatcctttaagagtttcagtcttcttagttctttttaaactgtacattccagaagtaatatctcaatttaggaaaataatggagaatttatcttgcaattgtgaaatagcatataagttatcctaaactagtaaatactgggttcctaatctgtaaattgtaataatgcttattcttcaggattatgagactgataaatactgtatgtaaagtatctcgtccaattcctgcctgatacatagtatgtaatcaataaatatatataattacacacgataatcatataattgtatattacataatacagtaatatagttatatattatataattacataataattataatgtatataattaacaatataatgtatataatgtttataatatagcactttgggaggctggaaggattgcttgagcccaggagtttgaggccacagcgagctatgattgcaacactgcactccagcctaggtgacagagtgagaccctgtctctgtaaaagaaaaagaaaagttaaaaagccaacagaaacaaaacctccaaataaagcatttaacagtttctagcatatggtagcactgaataaatggtagctattaaacagatctgatattaataattgccacatgcccagcactgtgtctgtaccatgtattctcatctatgtatacagcatatctagcccaggagtgtttttctcgatctctcttttatcttcttggcattcttaggcatcagcaatttatgtacgccggaggggagggagataggatgtggaagttgtatttcttttttttttttttttttgagatggagtctcgctctgtcgcccaggctggagtgcagtggcgtgatctctgctcactgcaacctccgcctcccgggttcaagcaattctcctgcctcagcctcctgagtagctgggactacaggcctgtgccaccatgcccagctaatttttgtatttttagta

SEQ ID NO: 317053 - DNA, 4001 bp, Homo sapiens
agatggagaccatcctggctaacaaggtgagaccacgtctctactaaaaatacaaaaaaagaaaaaagaaaagaaaaaaattagccgggcatggtggcaggcgcctgtagtctcagctacttgggaggctgaggcaggagaaaggtgtgaatccgggaggcggagcttgcagcgagccgagatcgtgccactgcactccaacctgggcggcagggcaagactccgtctcaaaaaaaaaaaaaaaaaaagtaacatttaactggctttaaatgaagaataaaagttattgggtaacaataccagtaactttatatacacttttgtaaatcctcacaatcccactaggtagcagtttcttccatcttaacacaaaaactcaaaaaggtttaagtgacttggccaaagctagctaagtaagttgtcccaggtatgtttgatcccacattgtctaccttttggtagaatttcccgcaatttatcaccacggactctatgttctgactcaggaattcttaatctgaagtccatgcaactttggctggacaagaattctagtgggctccattaaattgtaaatgatacattttaaagataaggtaaaatcaagactcttgtacaaatataaaatgaatacacggtaaagatttaagcacagtcatgggttgcttaacgacaaggacacattctgagaaatgcacagtcaggtgagtaagtacatcattgagtatgtagttattctatgatgtattcacacaaacctaggtactattgcctattactcacctataatcttatgggaccactgtcatacatgcggtctgtcggtatgtggtgcttgactgtaaataagggaaccagttaagtgctaaaaaccagttcaaaggagaatttaaaaagcaggtacacaggcaatcaggaacgttgaaatgaatattaataaatactgctcaggacaataattaattgcatctttactggacaaacctaatttccatgttgctgtagcgagttacagggttgaaaaatagttcaaagaccacgaaagacatagataacttggaagagtgagtcagacaagacaccaagtcatttgtgtgtgtttgctatttaaaagtatttcgtaatttctcctgaggaaattatatgaaaaatgtttgtttggagacgcagcctctctcagtggcccaggctgcagtgcagtggcgcgatcccggctcactgtaatctctgcttcccgagttcaagcgattctcccaaccaagcctcttgagtagctgggactacaggtgtgcaccaccactccccgctaatttttgtgtttttagtagagacgagattttgccatattggccaggctggtctcgaactcctgacctcaagtgatcctcccgcgtcggcctcccaaagtgctgggattacaggcgtgagccaccgtgcccagcctcgcaaaatgttttaataggtacatgcacgttttcctgagaagctaatccatataattaagttttcaaaagaagtgtgccacaacaggttaagaatcattgttctggtcactgcttacaactcaagtccctcaacacgtagtggcctgtgtgttctgctttgtctgaatcttctcgtctaaatttccttattaaattttcaaggcccaggttaaatggcatcttactctttgagatcttccaccaccctgtgtcctatcatttgttttctcttaagtttctttgcaaacgcactctgcacaccatatctagcaagtgttagttcccttccgtaactggattttttactctttgaggacgatggcagagtcctgcaaaagaagatgataattttagaatataaatcctcacgttcgctatcttctggcagccacagctcagctccaatctgcgaaatacggcactctctttattgactactgcttctctcggcacccgtacttccgcaaggacgccgtcataggccgggcgcgccccaaacctccccacgccgggcccctatgcgcccttactgtctgaaaacgggaactacaagtgctgccgaagacttttgcgcgtgcgcatagataactaggccaaggaactgatgggtgtgcaggacgggggggcggggtaagaaggacgatagatgatagagtggaccgcaagaaaaaggacggagagttaattagacttcgcccaagctgtgcgaccctataggccgcttgtaacttactccgttcgactcccaaaatacagggtcaagtactgcggccttcggacatttccgtctccggatcctgatagtctcggttactttcgcgtcataggatgagcgacaacgttttccggtcccaattgagaaagacgggcccggaggcagtgcgcgctccacctacgtcacaggcgaggtggttccaggagggctgggcatcggagagcgcggccggctgagagactcgaagccaaggaagaatttgattggcgatttgaaagcggcggtttttggcttaggcggaggtgggcgggccaagttttgggtcctcatctggtgaggtcccgcgttaatgacgtcacgttgtttcgcgggagaaattcgaaagtggattttgtgcaatttgacaggtgaggtgaagtgtttctcgggatttcctaggaatgacttgagcgatttggggcgaagggacgaaagactctgctccttaagaagagaaccgggaaggatgctgtttggaaccaggattggggtggtcgcagtcacagctactcggactgcttgtagtaagtggtgcctcttcaccgtttttcccaggccttgctttgcaatttcgagtaggtatgaggaccaaagagggctttgctgtttgtatttaggactgagaaaggatcaagtctccattgtcatttggtgacaggattatggttcttagaatcttggcaaatgagatgtgggtttcctttgtttatttggactggatggtttgttaacaatgttgagttcatgattccaaaactttgttatccgaactatttagaggttcaggtttaggttcaaaaaatactccttgtttaaaaaaaaaggaaaaatatctagtatttaaatgaataatggctcatactttactgagaacaccgagttttatgtatatatattgcgtccgtacatatagtagcacaatgtatatgtatgtatatgtgtgtatgtacgtatatctgtgtgtatgtatgtatgtatataattatcacagagcatctggggtctttaaaaacttatttggagattaatctttcacctattagaagtcggtcaacaggtgaattgtctggtagacgtggacagatgaacacttggaaaaaactctttgcatctcacttaaatatatatgatgctgttgtctaaaataattttttctgattaatactaagataagaaagggtgttgactttcaatgaataagtattagagctcttctaaattttaaaagatccagttagctttttttttttaggttttctcctataatcgaatttaaccatcctttaagagtttcagtcttcttagttctttttaaactgtacattccagaagtaatatctcaatttaggaaaataatggagaatttatcttgcaattgtgaaatagcatataagttatcctaaactagtaaatactgggttcctaatctgtaaattgtaataatgcttattcttcaggattatgagactgataaatactgtatgtaaagtatctcgtccaattcctgcctgatacatagtatgtaatcaataaatatatataattacacacgataatcatataattgtatattacataatacagtaatatagttatatattatataattacataataattataatgtatataattaacaatataatgtatataatgtttataatatagcactttgggaggctggaaggattgcttgagcccaggagtttgaggccacagcgagctatgattgcaacactgcactccagcctaggtgacagagt

SEQ ID NO: 317054 - DNA, 4001 bp, Homo sapiens
acataagcaattatcaaaaacagcccattttgtattcaagaagcacaaacaacaatatttagttttttaaacaatttatataaagaatacctagaggtttttttttacacttcataaactaaaatcacttacgaatacttgactaaagctatttctcatcatctttccttagagaagaccaaaatacatttttcgtaagggcaaaacaaaagcagtaaattacttaaacatcacttaaatgccccctaaagtaaccttcctttctcatacattttcctatattcatcgcgttctgcggtacacatttctgaactgaaattgtattaagtttaacctaatacgatctcttctctactagtcaaaaaaagatcttaagacgttaaccaaatacatgggaggcggggtcgggggtgcgaggtggtgccagagcagatggaaacaaggtaagagagttgttttcttaagacactagggttactccccaactccaaatgccaagattcactcgccagtagagcaagctgctgccactatccactgcttacacaatacaaccttcctttctacctcttcccctacactcccacccataacccccttccaaaacaaacacccacaacgcgccccattccataatccgtgttcgcccctctaagcccactaaaccaacctgctggataacagctctatgcattcgtcttaggcaaaaaaagaaaaaaaaaaaagcgactgcagcaaggtcgggagtcccaccattcctgtcaccctaaacaatccacagggtgagagccccaagcccagaagtttgaggcaaaacgattcagatccaaccaaaaagagggaattgcagttgaatggggatgggaggtggggagggcgatgcgtatgcgtgtatatgtgtgtgtgtgtgtaaggaagagtccatcacatgacagtgaaagaggaccagagtcgtcggggcgtccgcaagcagacgggggggagggtgtcgttgccgtggcaacaccccccatccgtccagacttccaaagagggaggaagaacttcaaatcccaaccgtcagcgctcaagcggctccttcttaaaggggtacacacagcgccgccgccgagcgcgagagggcagagttgggcgccccccgcccctcggacgacgcccccgccgcccctcgcccccagccggcccatcagcggcccccgccctgcgagtgcccgtgggtctccaggtccaggtccccgggaactggccgcgtctgctcacccggcccccggcggcgacaagggggtgtgtgtgcgctcggcgggggcgcggaccagcccgccttcctccggccgccctgcccgccggctctcctccgccagggcgccgacccaccgggccgcttcctccgtcctgtcagggtggacggcgggcgacggcgggcagcgacgggcgccgaggagtttcggggagagagcgagcgggcggcttccgcgggggctcagcaagcgggtccaaactaacagttcccggggagcccaagagctgggaaggcgaaggagcgcggaccgcgccgggccagcagcccgcaagacaaaaggcgagcgccggggccgccgcgccgcgccgctcccatctcgctcccccaccgaactaacccgaacgggagattcaactaaacccctcagccacaaactcctcgggctgcgacagcggtcgccgcgcggagcccggggccccggcccgcgtctctcttacctacacagtgcatgaggcggtggcgccaagagtcgagttcccgccggaatcctcttctctccgccgcgcaccgagggctccggcactgagcggcggcggcggcggcggcagcagcggcggcggcagcggccattctctctcttcccttgtccatctgcgtcccgcgtcacgcgccctcatttacatacgagcagcgcaggcacgaggcaggggcgcgagccctcggcgcgagccccggagcgcgcgccccccggaggggggttgattgacacgtgtcactaccttccctctgccctgccctccccctcccaccgctccctcagggagaggcggggagggagccagaggagaaggaagcaacctgccgcttccgctgaccccgcctccccacccactaccctcctccccctcccgctggagtttactcaggcgagccataccgctcccgccgcccgcgaaaaccctgagcgggagcgagagacccggagcccagccaggaaccggcgtgctagtggagcggactagcaacgcctactttctgccttcactacgggactccgacagtccggagacttcacttcccaggctccatttcgccaggatcccgaagctgaacttggcgccgtggcgcgttgcttgccggtcattgtagtccagaagaaaggattttttttgtttgtttgtttttcttcccccccgcacttgggtatgcaggctggcctgcaacttctctgcgccgcgccgctggggggctgagtctgtcgctccctgcgcccggaaccatgcgctgcccggtggccgggtctgacccgactgctttagcttccttaggctccgcgatagaagggtggtggaagccgcaagagttgtcggctccttgtgggttcaggctgcgctttgcgttttaagtgctggaaactttccggggtcgctgtcttcctgtcactccgcagggaaagggcaagccggtcattcggctacatctggaataactgccaaacgtccagagagagatcccggagtgacttcggtattcaaggcgaagagatctcggaaagccagaatatttgcaaggactaggaaaaagatgcgggtttttttcactgaaaattacttgcaggggactgggtgtagccggctgaaaactgcagaaggaaaattttctttataagctcctggagggcagcgacccactgagatctctgtaccgtgacatctgtcactcgctagaccctagtacagtgcgtgacacgggattaagcactttacaaaggttaatggaatgaattctaccacgtgctagagaaaataacttcttcagagagagctagagaggaatcttacgtttaaatacagactccaatcacagtttttacttttgcaccagagcgattgtgcgtttgtttccgtataagtgcagtttatcaagccgaagctaagctacccaacgtttgctaagaagtactgtgtatttctggaaatttattcacaagtctgtgggaaatatgtttaattcttcttggaaatctcataaactctgaattcagtaccaccttccctgttttgtggcttatccttatccaccttctttttcttcctatgagaaagtatttctttgctcattatgacttcagtagtgaagatgtaattttgcatcttcataagttaaaaataataaagtttgaacgcataatcaccttttctagaacggtcacaattggagtgcaggtgaaatcactagtgaaggtgattttggaattgtcagtggatggttttagttaaccacttccactcacaattgccacgatgatcagcctttgcagttttcctgatcacttttatagtaatctacattagttaggatgggaaaaattatggtgcagtaataaatgatccaagaatcttagtggcttaaaacaacaacaaaaaactatttcctgattatctacatgttcatctctgggtggcaggaggagggggcttcattccatgtggtctcactaagcaactggatccttaaagaggctggaatctctgcaacgtccccccttgggtgataggcaaaaggaagatgaagaatggcgaactggttcttcctaaaagtgatacaagtcagttctcacatttcattgaccaaagcgaattattcgggcgtatctatcttaaagggagcagggaagtgcgatcctattatatgtgcaaaaagaagataaccagaatttattggtaaatagtatcaaggattactgtgatctatccttctg

SEQ ID NO: 317055 - DNA, 4001 bp, Homo sapiens
gattccaacacacagttgcaaagatctgaaggaaatatacaaactgttacacacacaaagcaacatacacaaaacagcaagcacaaatatcagtcactgccaacagttcactatcctaagcaaaacatagtttgcacttctatagaagctactggcttctagaaagagcaagagtaccagcagtcatatttagcgtctatggtgtattaacatataaagaaaacagcagtcattaaagacaacccagcttttaaaatacatataagtccttgtccagcagttagccaatcagaaagcaggtcacatcttgttagctgtattaaatacacgaaacgtcatgaattctctatggctctgttgacaattcaagccaactgtgttttatcccatagcacaaacttaatggagtcccttcctagagttaaaagtcaatcttcaatctaaaattccaccagagctattccctaaaagctctttggcataaatcttgtggtatttatactctgcagagaagactaaattcctagcaatttccacttcctaaagtgactttggtgcacctataacaaactccttttccgaacacttccacacaaagccccaacttacaggcagatggacaatccagcagcaagacctgccagctgagctagcacagagaaaaagtcaactgacataaaatatttaaattgcaggaggcgagtctggagttttgcatttaaaaagttctgaaagtcctgttctctctgctcccagagttgctggctgcctaggaggctgagtctccctctctcaggcacaagatctcaaatatgcaaaaactagagctgacttgaaagctgaaccagctcctgtcctaaggtagagtgataggggggcacggccgacagcaataggagaaagtctagagtccccttgccccaagcaactggtttctgattttaacactgaaatatacaaacatgtgtccctccagggctagttctgagaagtaggcaggtttactcttctgcccctttttacctcgattttggtgactctgaaaagtaaatacaggtcaaagcagacttcctctaggatttgtaaaaaagaaaatatatatatatatatatatatatatatatatatatatatatacacatatgtatatatatatatatatatatatatatacacatatgtatatatatatatagccagatgcaaacaatcacaaaattccttggaattatatctcaagaaacaccaacaggactgactcagagcctgtaaaacaccagagttctggaagagcaacatttctggaaacccggcatgtgaatcaagtgctgggttgtctcaagattccggcagaaactgtcctctgctacaagagttgctgtgcctggaaacccagcgtccaaactcgtggattcatcctggcgctcatttccacgtacgtggtagtatcaagtgggacacttcccatagaattcagccagaaaccctaggaaaagctcatgcatagcttaacaaaaatacacaaacacatccccaaggttgaagtacttacctctgtgcgagactgcagtctcttgttcatctcatagattcggtactctggctgtaccatgtatggtgtatgcctcctataaaatgggccgaaaggagaagaatagaaggggtcatgtggtgtgctggacatcttgcctgcttttcgaaaatcaagctaaacagagtatcagtaacgtccatgcagagcacatgggctgtgttcttcccagtacaaagtagacgcacgcacacacgctcacacacacacagaggcaggcaggcaggcaggctgaacacgctggctgggaactgctgtcggagccctctatagcaggagaggagagggagaggagaggagggagggaaagagggagggagggagggagcacgggagaggagggagagggagagagcaggagctccagagagggagggaggttggtatggaggaagggagggaagaagggagggagggagggagggaggagggagggagggagggggagagagagagagagagagagagagagagagagagagagagagagagagagagagagagagagaggagctggatagctttaggcaccactgcttgtttttaaagaagcagtttgtggagaggtcatttcctgtccacattgtagactagttcacaaatataattctcctcacagtctgacaagaggtctaaggtttggttttaatttttttcctccagccaggacccttcacaacctgattgctaagcttgttagcatagaggtggtctaaccgctacatgagccgctcacccctgacaaccacactgttgtaatgtatcagaaatgttgattactacaaaatacagaaacacgggcactgtggtgccccgaattgggaccggtgattcactcacatgcagagatttatttcagcactaatctccctatgtagttttgctttacttgctgttgttccaagggctgttatattctttgccctccactccatctcactcccatctctccccactcacccctcttcccagccacctccctcttctccaaagacttcattcaggcccttaaggtgcctgggcattttcaggtaaaaacagtcgttctgaatgtggaaggtataaaatacacttaaggagagcaatggtcttttttcccaggaaggaaaaacaaacaaacaaacaaacaaaaaacccaaacagacctcccaataagacaggaaaagcaaagaaggagaaaactgccacaaaaatgaccacggaaaatttggttgagaaggaaattgcaaataattgaatggatcatccccagataacatgtccaactcttatggagacaaagtctgtattttccaagattggtcaagtaaacaaatattttcccaactgtggtatatgataaccataagaaatcccaacagcccatggaaggggaaaatctctatagagaattaaacaatctataaaataatcaaattctgctagaacccactataaccagagatacgacacttaaacaaagcccagccacacaaaatttaaatgtattgagctaacacctaggtaggtcagtggtattaaggaaataaagcaaaggaccaccaaaaagcataatgaattcaagacctgaatgcaaatgcatgcaaatgagacatttcttctttttaataagcagattaattaactttctgccccaatcatggcttgggtatctccaagtcactagccaacaggggatagagtattgctaattctgcaatttacactcttaaaaatactcagacacagaaaagtgtattgctgtcttgatcagtccttcttcataattgcatgaaatatttgctgagtccaccccaaacttccagcagcgcagcctaacacactaatgtcgcttcccaggatgagattagggtaggtattacactaaggctgcttggaacttgcgctaggagaccccaaggcaggcgagaatgcttggtttcaggtttcattacaaatccgaaagctggaccaaatttgctgcaaggtttgtcaaaacacacaaccttctaaagacaggatttcaaacaattttggcatgatttacgttttggtatggcagccactgcaaaacctaatggttccttatgtttaaactctcaaactaaagacattctgaaagtttagtgtctgcctgagtttgtgttaatgtgaccatttcagtgcaagaatgaaagtaacacctaggcaggcctgtgcaggccaatagtaacaaaaaaaaatgaaacagttcaaaaatccatttaggaagggaatccctctctgaataaggttctggtttgctctcatttgtttctgcagaccattgccaattataattggaaatatttcttgccattaatagtgaaagactctcatttcagaactatctgaaacttgataatgctgatccatatccctgattctcatccccgttatttcaggagtctcc

SEQ ID NO: 317056 - DNA, 4001 bp, Homo sapiens
cgcagcccgggtgcgcgccccatcggccggcctgctccccgcggcccggctcaccggtggtagggacggccccgcctgccccagcccacgcccgcctccccttcctcccgcctgtggctctgctcgtctccacctaagcctttggtggtttaacgcacttttgcagagacatctaccaagagatagcgtgtgcactttgttttccgtcccacggaagaatttatcagtagcgttattcagccctactcgctttaaagcacggcacccctcagcccaacaaaaagaccgaaggcgaaacattgtgggttcctgcccgcgaaccaaccgttcagccaccgaaccccctaaactgatccatttggaataagttaccctgcccctctacctcccatcctacacacacacacacacacacacacacacacacacacacacacactgcggaccgggggcccagctacgcacacaccccaaaacaaacgagggatctactcgggaccctcagccgggcggccgggcgccttcgttcccttcctccctctctgagtttcccagggacccgccacgcctctcggaactggggcagcggcccgctcacctcgtgtccgttgctggccgggatgatttcagactcgttcaccaaggaagacttgatgtcagctaaatcgccttcctcttcgggatgactgatctcggcgaagatcttttccttctgaggatcgccctcgtccttgaaggggatcatctcgtccgtggcgcagagttccgggtcccccccgccgccgccacctcctccggagagttggggcatcccggcggctctgtaatctccgctccgctgtgggagcacccgcgcaacagcaggaaagacagaggggtaactcaagggtgggggaggaaaggagagttggaagggttcgtgcagcaggacagcgggcggaagcggggcgggcgagcgcggggccgccggccggcagccggagcagctgccgcggcgcccgaatcccggcggccgccgcgctttcccgcttcgcggagaccgacgcaggcgcccgcccccgaggccgaagggcactgggcggcgagggctgcggtagctggcgactccgggggcgtctgcgcggcgcgcgctagacgaggctgccccggcggccaccccgcgaccccgcgtcgccgggatttgcgcgcggagaacgccggttctggagggagcacgcctccccaaagtgcagaggagggtccggcggcgcgtctccgcggaaaccctctccactgtagttaccccggatgccgacttagtagtttgttttccgagaaaagagaggggatctgggcagaagggccccgtttgccccaaaagaaggtgcaaggatcagaagataacgaaacgtccacttcctgaagggtgggaaaaaaagaaaaagaaaaaggagccacccacgctggagatgtccgttttagatcttcttattttcttccctttcgcttcggtttttcttctcgaggctcatttaatctgctagagaaggaggaggagcagaagatgggggccgaggaggaggggaagagaaagagaagtttgccaagaataaagtttttgccggcaagcgcggggactccgcagtggagggcactgcggagtctcggggagtcacagcgggggcctcgggcccaaatgcctctgcccggagctcgagccgacacacacactcagtccgacccctctttgttcccggctcgagtttctcagcctggctcgccggctcgccgctctgcacgcctccgccggccagctctgtcaaagcaaagagctgcgccccttgagttcgcccggccgaggggaggggacgccccgagcttggccgcgtgcgaggctccgggcgcgtcctggttcctcggcccgagagcgcgcagcccgggtccctcctccgcgccctgccccgcaggtgagcggctgcgcctccccactgcttctcctcctcccgcgcctcgccggcgctgaaaagctacccacttgcgtcgcttctcctccctctcccctcccccgcctctagctctccttggctgcccgctggaggggaggcggggggtgagggggagtcggcgagaaggaggtggtgattgagggcttttttttctttttcttttcccagatcctgtaggacgagtcttggttttggggtgtgtgagtgtggtgtgtgcgcgcgcgcctggagggaaggatcaggcaacttggcgagagaaggaaggaccgggcgctgcttataacccaccgaaaggcacgctttgcccgcgtgaaactgacaagaaacattgccgcagtggcttgacttcatcatctaagtatctatttacttggcccccacccacccactccttttcctctgccagtctctcccctacctccttgacgcctcccactctccctccctggctctggcagagggaggaagatgaaagagaaagccgctgccgctgtgatggacaccacattgatagatgctctgacagtggggagaggcgggaatctgggactgagaaaaaaaggaaaaggggaaaatataacagacattgctcaactattaagagagaacagaaggacaaggaaaagagagttgtagctttcccgaatataatatcacacacacgctctttggagacaagggaacacactagtgaaaataaaatctctaggcttacggagaaaaaatatgacgaggaagaaggaactgaagactagattttaattattgctttttaaacaatatatctttcattctgttctcaccacgggatgtacggagagttgtgctaggtctccagtgggttttcagagacacacaccgcagtgtgtgggaacctcatcgagaatgaaaagataatccaagaagggggaagagaaggcaaaaggactcaggagagcaaagccagaagagggagggaggacggggtagtccctggcaccttggactgcgaactgaaagggacccttgaagacaccaatccgaatacaacctcaaaaattccccagtctccactgtctctttgatgaattttgtacaaagacaggagttttcaggagatactttgtgaaagttacagcagaagggaagctgaagtttgaaaacacattacattttgtcccttggttctcaaaccccctcagttaaaaatctaggcaaaattattatatccaatacagtaaccatctgtaaaacttcagaacagtaaacaaaggacataaagaaatgtatcttcatctcccttaaatcgaaaacaagcaaaacactacagaatcagattttgctccattatataggaattgtctggcaaagatccctctttttttcctaaaggtgaaatttcaggctgctgaacattgaatgggtaaagatttttacaatgctgtatctaagtgagcactaatgacttcacctactaataacgactacttcttgggaataagaatttactaggaagcaatttttaaaactttacaaaggatccaattggtccctacaacatggccagtagtcacatgtaaattctatctggaagattggggtgaaattaaggggttggtgaaggaatccaggaaaattaaaacattaaatccatttttaatagctgacaatgctatgcctcaagagaagaaaaagagtatattctgctacagtgtgtgagaaacccaatttttgtttttggatgatggtggtatgtcacttcccttaaagttaggcaccagtgtgagtagtgtcccagagaggtgaacgtgtagctgtgtcagacatttatagccccattcttaaaagacacatgggaaaacagtcaaaagtcctcccataactgcaccaatttgaccaataggaaaacaagtggaaaatgcagtttcaccaaagcagagtagaggttccttttcatcaaaccctcaggagggggaggggagaacacagaatggccagggggtactttctggaagccgaagagagattaaatgatga

SEQ ID NO: 317057 - DNA, 4001 bp, Homo sapiens
ttaggatttaaggtaagatgaggaagagaaaaactcattgtagacattccctcttcccaaagaatctggaacccacctgaaatccaagggtccctaactcattcaaaaacagtttttaaattatgtaatatatattagaggtaagccataagtttcctgcgttttctttaccattaaaatagtgggcatagtctgacctagtcccagtttcttgaactcaaaagtaacaaaacacacctatttatacaaattgcaccccttatctgctaaagtcagaagaagtagaatgggtgtcttaccgtcatcggggtgttctctggccttgtcgtggtagggctcctgagaggtttgtgcttgtctggccacctaacatcatgaatccccacacccaaaagaaagaaaatcaccttagagtttgtgacaataatggtacaaatgtgtgtgcgctggtaattcaaaggaagaggtttaggggcaactctgttttatactctgagagacatacgctagtgtttagtactgcataatccttttcttgtcaacatgtatttttgagtgattattatccacccgggaccaaaaacgtataaataataacaaaaccaataaaaatatagttaaatttgggaatgatccacatgctgttctgactgctgtttattaaaccatatcaaggctccttggatgcctaatattacaggagtaggagttaatggggttgatggtttcgatagcctcttcaaccactgttcacttcaatcagatctgattaaaagaaggctgaaatatcattttgcaactgaaaatggcatttaaacataaacaagccaaccactcagatgcggtcttaaggcaactgccctgagcgcagttacagcagaagctccactcgagcttataacctactatggctggctgagtgcaggcttacaaaagtagaacgattctgtggttaaagggaggaaaattagagagtcaggttatagacatctaaaaggtagcccagttgatatcagttttggtaatcaccatccacccagacagcctcaaacacgtgcaaatcagtggtattactccttcaccctcaggcctcctcatgcccacttaacacccgagtgctctcggattcgaacgcagtgtccttcacccggaccagaaaattgtggagaatatgaagtgggtggcaaaattatttatggactaaggcaggactagcaaaatgggtagaaagagaggctgctctacaaataggagagtttggcaaaaagcctgtgttttggatgttattcggttctctggacgtgtgtcctccctttgacctccttttcccagcacacagtagtcacaaatcttttacgcggggttaggtgcaccctacccccgcccccagcccgctcaaactggattcaacgggtaaagaacaccattctgttctctgaacgcaggcccccagcctttcaaaattcgtactcacctctgccattgggatagagaaggcagatctgaggtgttcttaaacgcgctgtttaaaacccaaaatgtccccgccctcaaaaccacacactttctttttgggggtagaaagatgccatttaaggaaaaaaaggtatatcctccaagtttctttggagggaaaaggcgttggttaaatcattcgggtgtcaggacttttctaccggatttcctccagagggtttcccagttgtggaacaagggtgaccagtggagtgtcgggtatcagggtccatccgccccctagaccagctctggactaggcttcaaacagccctccagcgcggccctgctccgcgctttctctagccagcacccacgtgtctctatttactctactcaggttaccagctctatcgcccgcagcgggccagaagacccgataaagcgccttccaccctgcaggactagtgcccggcttccgctgcttctccgcctttcttctgcgtagatttaaggcctgatccggtcccaaaccccaaataaaagttgtgggtttgtttccaagtgatggcggttggagaaaactagagttgggggcggtacagccagggtgtacccttgcggtgggtcggctcggcgcacccacagctcccagctgctagcccaggcgctggggccgcagggactgaaccccgcaccgcccccgcagcccgggtgcgcgccccatcggccggcctgctccccgcggcccggctcaccggtggtagggacggccccgcctgccccagcccacgcccgcctccccttcctcccgcctgtggctctgctcgtctccacctaagcctttggtggtttaacgcacttttgcagagacatctaccaagagatagcgtgtgcactttgttttccgtcccacggaagaatttatcagtagcgttattcagccctactcgctttaaagcacggcacccctcagcccaacaaaaagaccgaaggcgaaacattgtgggttcctgcccgcgaaccaaccgttcagccaccgaaccccctaaactgatccatttggaataagttaccctgcccctctacctcccatcctacacacacacacacacacacacacacacacacacacacacacactgcggaccgggggcccagctacgcacacaccccaaaacaaacgagggatctactcgggaccctcagccgggcggccgggcgccttcgttcccttcctccctctctgagtttcccagggacccgccacgcctctcggaactggggcagcggcccgctcacctcgtgtccgttgctggccgggatgatttcagactcgttcaccaaggaagacttgatgtcagctaaatcgccttcctcttcgggatgactgatctcggcgaagatcttttccttctgaggatcgccctcgtccttgaaggggatcatctcgtccgtggcgcagagttccgggtcccccccgccgccgccacctcctccggagagttggggcatcccggcggctctgtaatctccgctccgctgtgggagcacccgcgcaacagcaggaaagacagaggggtaactcaagggtgggggaggaaaggagagttggaagggttcgtgcagcaggacagcgggcggaagcggggcgggcgagcgcggggccgccggccggcagccggagcagctgccgcggcgcccgaatcccggcggccgccgcgctttcccgcttcgcggagaccgacgcaggcgcccgcccccgaggccgaagggcactgggcggcgagggctgcggtagctggcgactccgggggcgtctgcgcggcgcgcgctagacgaggctgccccggcggccaccccgcgaccccgcgtcgccgggatttgcgcgcggagaacgccggttctggagggagcacgcctccccaaagtgcagaggagggtccggcggcgcgtctccgcggaaaccctctccactgtagttaccccggatgccgacttagtagtttgttttccgagaaaagagaggggatctgggcagaagggccccgtttgccccaaaagaaggtgcaaggatcagaagataacgaaacgtccacttcctgaagggtgggaaaaaaagaaaaagaaaaaggagccacccacgctggagatgtccgttttagatcttcttattttcttccctttcgcttcggtttttcttctcgaggctcatttaatctgctagagaaggaggaggagcagaagatgggggccgaggaggaggggaagagaaagagaagtttgccaagaataaagtttttgccggcaagcgcggggactccgcagtggagggcactgcggagtctcggggagtcacagcgggggcctcgggcccaaatgcctctgcccggagctcgagccgacacacacactcagtccgacccctctttgttcccggctcgagtttctcagcctggctcgccggctcgccgctctgcacgcctccgccggccagctctgtcaaagcaaagagctgcgccccttgagttcgcccggccgagggg

SEQ ID NO: 317058 - DNA, 4001 bp, Homo sapiens
gaggtgggtggatcacgaggtcaggagttcaagaccggcctgaccaacatggtgaaaccccatctctactaaaaatacaaaaattagccaggcatgagggtgtgcgcctgtaatcccagctactcaggaggctgaggcaggagaatcgcttgaacctggaaggcagaggttgcagtgagccgagatcatgccactgcactccagcctggatgacagagcgagactccatttcaaaaaaaaaaaaaaaaaattacaagaattgggggccgggcgcggtggctcacgcctgtaatcccagcactttgggaggccgaggtgggtggatcacctgaggtcaggagttcgagacccgcctggccaagacggagaaaacagtctctactaaaaatacaaaaattagccagtcgtgatggcgggtgcctataattccagcaactcggcaggctgaggtaagagaatcacttgaacccaggaggtggaggttgcagtgagccaagatcacaccactgcactctagcctgagcaacagattgagactctgtctttaaaaacaaacaaacaaacaaacaaaaaaaaacaagaattgggaggatacattcagggcaacttcaatctatctctttgggggtggggaacagagacaagaatattgaagctgggtgcctgggcatggtggctcctgtaatcccagcactttgggaggccaaagcaggaggatcagttgagccttggagttcaagaccaggctgggcaacataccaagaccctgtctctacaaaaaaactacaaaaaaaaaaattagctgggtgttgtgtggcacaactaacaacttgggaggctgaggcagaaggatagcttgagcccaggagtttgaggtgcagtgagtatgatcgcaccactgcactaattattttacttgagtccctcttagcaagttttatgtttattccaattttacaaataaggacatagactcaaataagttggttaattagagagagagaggaggtgggcacaccctgggacagcattcactccagacagcacctgaggctaggggggctaaagccacgcaccctgaggaccctcagcggctccggagtccccgtgttccccgggtgccggtcgcggcctaatcacaccacaggggtttgtaggtgctggcatcacctcatcagtgacggaccaggaaggctcctgcagcccagcaggtcctgctcgccggtgtctgccctgcccacccagtctcgtctccgggaccccaaacgtgaccaaagggcacggccgtcctcgtgcgtggacacgttccaccaagcttactcgcgcagggcgcgccagggctgcccagcccttcagaattttcccactgtctctgaggcagtgacccgggggacccggccgcctaaggtcacaacacacggcagaggcccagcggctccgcccggcgctggcggcccagcccgcgacgagacccggggccccacggtcccgcaggggctccggaggccgggaccaccgggctccccgcatcgccgtgacaaccagcccgaacccgcgggtcgtccgcgctcccgacccaccagccgggagccggccccgccctggggtgcccgccgcttaccccgcgggacggtgtaccgaggcggcggcgggaggcgggcgggcgcccggccgcggcagctcctcagtaagatggacgccatgtgctcgggcgcggcggccgctccggcctcctgcgctgcctccttctccgcggcggccgcggctcttcgccgtcccggcggcgcttcagacccggcccgcgcggacggctgacagaggcggctggcctcggacgggaggcgctctcctcaaggacccggcaccagcggcggccttgtcccggcacagacgtccggaggcgcggggcggggcggccaggccgcggctcccattgggcccctcagcgcccgccgctggccaggtgaggggcggaccgcgccaccgcggactaccggttccggcgtgcaccgggacggcctgcacgctggggtgcggactaccgatcccggcgtgcaccggagcggcggactaccctgaggcgcggactaccggtcccggcgtgcaccggggcggctggctcctggggctcgctgcatcctggttcccgtcgtaccgtggacgccggggctcgcagcgtggcggccgcaggagctgagggagtcggccgcgcttgcgcggggagtgtcttttcgtctccgggcggcggcagcagcgcgtgtgtccggaacttttctgggactaagtcctgcacccacgagtagaaaacggctcctgggagcttggggctccaagggcaagtcaggggacgctggggatggaggggcgccctcgacgccctcggccgcggtccctcgccggcccccctgctctgtggctctgccctcggcggtctgcactctggcgcgcgcagctctgagtgcctcttccctgcgtaccgggcggcgctccccagatacggcgctgctcggcgtcgggagtccccgtcaccactggggggacgggagcgcagggtcccgccccgaaggacagggccatgccggcccctggaggcgagggcactaggccgggtggcggcgcagccagcatagcggccccccatcccggcacaccgcgtcctcccgtctgagcgggaggggtagatatgggtcctgcgttggcgcggggggacccctcgtttcgctctggcctaagcagcccctggggtcccgcgcgccgcaagagcgccagacttcctaacctgggccataccctgtccgctccacttcccagtccaagaaggaacagccgaagcccaggacgccaaggacctggctcgaagtctccagaattcccgccagagctgggctgggctcgcggaccgctcatgcgccgtctcccaggagcctccccccagcccagtttaatagccggccctgaccagtccaggggagagagaccgtgcagcctcccagcagaccgtgacctctgagctccaccttccccttccttccctaagatgaggatccctgagttggggcagagaaagcaggcagggagaaaaatggggacctgcggcgctgggggcccagctggtggagatctccagctaggagatccccagcacagcacttgccctgccctctgtcttgttcagggatgtaacctgcctcctcctgcttctccgcggcacctcagggcaccgcctggggagggtcttgtagtgcacactcagcatctctgttccctggagcgcatggggtgtgaaacgcctgatgccagccagctccccagtcttgagaggctggttgaatggcacatctccctaggaggctccctccccagggtcccctctgcccctgctgtccatgcagtcggtcctcacccgtcaggaaaacgtagcctgcttgcctgggtggttttccccatcaggaactgccaggtactgggcctggatgggcttgaattccccatctcagtgggagaagggggcattgtttagtgcagggcactttgaagccgtctgtaagtccctgtgtccacaccggtcagtgggcactgcagacatcaaatgcagacagagtttaagcacaactaggcctgaacctaggcctgtgctgccaacagacatgaaggggccccttttccacccatcccccaggaggcaagagggggatacagaaggatagtccttgcctccccacccagggttggacctgagctggagtggacagttggtcagggtcagaaagaactggactttttatggcccagctgtaggactttttatggctcagctgtaggactttttatggcccagctgtaggactgtatgtcctagtcctggtctggacattggttctgagcaccagatgaccctgcccgatgctggctagggagggtgaccccggagagggtgcaagaaacagtgctcctctcgttaatgctgtggggtcccaggtgtcccggcaaggccaggcagg

SEQ ID NO: 317059 - DNA, 4001 bp, Homo sapiens
cagaaacctttaccatcagctccttccacagacattatctcggtcagtttaaatcaatcccttcacttccttttcttaactacaggaggtccttgcctgaaaatggataatcgcttcacctctgcccatgattctgtttgtgtagacacagcgttgtgttggcctatgaaatgctggggtaggattaagcattcctcttgggaccccatctctgaaagacagagcactcctgattaaatgcaacatgaaagccctggggaaaaactcacagacacctgaactcccctgtgtggggagaggcagtaccatctgccagataaaacggtcaaccaggaggcaagatgcttggctttatttctgcccccaggcccccatcctttctggccacagcaggatctgaatacattatttcagaattcctttcagttggcatgcagatcacttaagcagctgctggtctgaaggatttaataaggggaactctaatttctggaatcctccatgtcacccgacttagcaatattaagaatcaaaaaggtcctctgttcccaccagccaaactcttctgactttctataaatgcaaatgggaaccccctcactcctgggtccaggcccctacaatttgccttgggtgggaggctgggaagcactggacacaagaaagtatcttgagcacaagcaacgtcaccccggggattccctgcctccaccactgactgggcacccaggcatcttggcctggaacaagagagtggtcttagcaggaaacatgtcctagcagtaaagatacagcccaacagccccttccaccgcccttgtgagagctggtcatttggcttgagtggccaggtgagggcaggatgaaagcacctctcggcaggtggatacctaatgtgaagccctttcctgtcagttcctcctgctgaaaaagcagccaacacaactgtgtgatggagaaagggggcaagaagccctcctgacctcagggcaagaaggctgacttcaaagcacttggccactgggctaggcgcccaacatgccccaaacctctgcccagccttctgttacccctcttctaggccacggggggcggcccctcccctcccagagcctgcatgccttgacctcgactttttgcaacctgcaatgtggagaagtcgggaggaggccacggggtgaacattcgccccagacctgatgtggggcagtgaggcctcaccctgcccagtttgcactcagtcaggtcgtgttcagctgctcctatgcacgcccctacacacacaactccaacccgcaaacacacacacacacacgcacacgccctctcaaactttaatgcacccttgagtctcccggggacgtcaaacgcacactccaggactccactccaaagactgcttcagagcagctggattctgcattggcacaagcttccccaggtgagtctgatgcaggtggcccgtgggccacactctgagaaacgctgccacaggaacctgtctgggttcccagattctggggctcaggtcctcaccgtcctccccgggggccaacactccacccacgtcccccacacaaaggcaaagaaggggcctggggagtgggtcagggtcgcgctggcccggcgccagaggcaactccctcgcggcggcggacgcagggtggggcgggacgggatgggggctggaggggtcccactcacagggagctgatgtcgcccggcacgatcctgggcacccaggaagagcccacgcagatgatagactccttggtacagctgcaagtggcggggcagcgcgccagccgcctcacctgcgcgctccgcggtatcaggcacgcggcgcccagcagcagcagcagcagcccgagcgctccgcagccgcctctccgcagcgccatgcccggtccccgctccccgcccgggccccgacccccaccgccgcgccgcgcgctcggacccggcgccgctgcagacgcgggcgccgctcgctgctctgccgccgccgctgctggcgaggactagggagccgcgggtgtgggaggccgagccgcagccgagcagcatgctggccgccacccccactcggcgcccccccacccgagcccgggctgctgggcggccgccgccgctgcgcccgccgcactcgcgcctgcctgacatcagcactcgcgcccgcagcccggctctggccaatgaataatgcatggcggggcccgccccgcgggggagggggccagcgccggccccgtggcgccccacccggcccccacctcgccaccccctctcgccccgggccgggcgcggggacagagggaaaagttgggtgaccttgggggaggggccaagcctggcggagacccccgtcggggcctgactgagcggtggaggatccgatgcctgcaatacctccaggggtataatctggggagggcactgggttcctttcaggcaaatcaataaagtcggagcggggagtgtggagaaccggcttgattactggggagggaggcagccctgggtgctttgaagaggagagactttggagcagcctttattaattttgaagtgcatgctgccggtagggtcagcgaggatggctttgcttgtcttctgcggtggggcagtgaggtctggctctcgctcccacagcaccaggggttactgaagccagccagtcctcccatgggaggaacgtggggaagcaaagccgctgcagcctgcacgcccggcgctctgggccctgcctgctgcctgctaaagagctggaaagcccgggaaagtttcccctcgctcagctgcccacgggtcaccccacccgccccagtcagaggagggtttgtagagattgagggtgtgatacattctagccactgtacttttaatcttctaaccttttgaggcaggtcctacttatatccttaatttattgatgaggctgctgacgcccagaaagcatcctgactggctgatggtccagcagctcctggctgggcaggatggggctcggagccttgaagggctaccttaactgggccctcctgagcccctcttcaactccttaagtttgaagcaatgagcggaaatcttaacacaggtaatgtgcggctgaggaaatcaaagaaaatgaccaaagcggaaacaaagtaatggctaataacctgaactgctgggagaagggaatcacagcacgactgtcgagctgcaaaccaaggaaaagcatgccagatgctaaaacctactcagaaaagtcagtatcgaatgcaaaagtaggaatcatactattgcttcttcagcaattattgttggtgatccattgacaagatccatgaggacggtatcaggctggctgctgtgggagggaacaaaggaacagctcctgtcctcagggagctaaaagtctagctggacagacaaccctaaaagagcaactccactggctacaagggggtcacagactgaccaaaagaggttcaggaattgaaagagagctttgcgtaggcaacttcatggagggagttagacattccctgctggtgactatgtaaaaagcacctggcatcagtacaaaccagcctgcatttatcatcatttaattcttgcatctgtcctgagaaatgggtcctcccattttatggatgggaacattgagctcagagaagtttttatcttgtccaagatcacacaggacatggccagggagatcatactccacaactggctgctgtgtctaaccctcgctgctgtgtgggcatgcatttacaaatactttactcagcaagccccagtgttaggggctgaggacacagaccacagcctgggagggcgacagacatgcagacccacaatcgtggatgtgtgtgctgtgcacctgaaagatgtttcccttaagagggatgggctactgctttatagagcagaggaacggaggcttctcaaacagagcactccctgctgacccaggaaaagaaaatctatttctcacctctgagtgagagcct

SEQ ID NO: 317060 - DNA, 4001 bp, Homo sapiens
tatctgaaaataatgcacaataaaggaacgggacgttaaaattatctcaaattttcaattacctttctcctttctggcgttttaggtttcctttatattcatcccaggtgctcctgtctgcaagatcaccagatacaaaatcttgaaggtctggtccattctgtaggagttccttttttttatctggcaaggagcttaacggtctgactgggctgcaaaaatatctcccaaatacctaaagaaagagttaattatgacgtttatttagtggagtccgtaataatttagttttaacccatcataacacctaaacggaagggtaaagccaaaaaagtgattcagaaattatgtcaaactaggagctctagtattctagggcattagaatataaaagatgactgaaggaaccaaacctaaaagagagtaagagttgactgtttactactgagtttagaatagatttggaaatctgtttttttttttttttttttgagacggagtcttgctctgttgcccaggctggagtgcagtggcgcaatcttggctcaccgcaagctccgcctcccgggttcacgccattctcctgcctcagcctcctgagtagctgggactacaggcgcccgccaccacgcccggctaatttttttgtatttttagtagagacagggtttcaccatgttagccaggatggtctcgatctcctgacctcaggtgatccacctgcctcggcctcccaaagtgctgggattacaggcgtaagccaccgcacccggcccgaaaatctctggaactaacatatatcacactttcatgtactccacctaccaggaactagatgtttgtctttcaacaagattgaactgcaataactgaagaaggtgccacagtttaaaactgttctggtcctgacttgaatcaggggcgtttaaagtgaagtgtgcaataaatctctcgagctttgaataattgttgaaacgtaggttaataatgcccaattagtttcagacaactggaaggttaaaaccaagcctaacgtttttactttctttttctttttttttttttgagatggagtctcgctctgtcgcccaggttggagtgcagttgcgcgatctcggctcactgcaacctccgcctcgcgggttcaagcgattctcctgcctcagcctggcgagtagctgggactacaggcgcacgccaccacgctcagctaatttttgtatttttaatagaggcggggtttcaccatgttggccaggatgaacgtttttactttctaggttacattgtttctgtgtttgaacgtggcagtcaagaacataagaaatcatggtattcggcttttacatctgaacacaaacgtgtatgagatagccaaaacactacaaaatccacgagtctgcacatgtatctcaaaagaaccttcgacaactcaaagagtgcctgttagggtgttgcacgattgctactgcacttctcaatgtctgccgctgaagcctagcggacaggtttgtgttctctgcggctagagtggtgtctcacacacagtaagagtccaagacagaatagctatgtggggtgctcactgcagtgctccataaatatagggtacaaaccactctaagcagaaaataagtcctcggtgctggcccagagagacttgcaaacaaactgatgccagagactctatatcatggggctggcgggataattacatgagattacacgaaaaacgtttaaaactgccgttggctagtagtaaatgttcagtaaatgcactggcctttattattgggcatgggcgctctgaagggataggatccccccaccccacgcccaaacccgttcgccccgccgctcacccggggccccagggtgcgggctgcatccccgcagcgtagagacatttcctctttaggactagcgcagtgcaggggttgagggatcgctaactcccgggaaaggacaggtcgaaattacgtcgctccatttatgacaagcagccaagctgctccacgattggctgctttagccttacgtgcgtcgcgcactcatgacgcaatacgcaggccccttacgcgatacaagtacgtaatgacgacagacgttctttctttgctgcgtctactgcgaggtaaggatgtttctgtgctcgtgggggtactgggaatctgaaaccatctgctctgggaaaggctgcggcgcggctcccactctcggaaccttgtcctgtttgtcccccagctcggcaagcgccatatgagcctggcggcgccagatgcgaatcctgttgtgggctttttggcctattcccgcccctcagtcttgccgggatggcaccgcccgcataggacttccagggttgggctgagtgggagttcgactgctgggcctcgtaattctcgctttggggctgctccttccaggctgggacacactggggcccgctgtcggtctcccgtcctccgacatcttgtctggaacttccgcctggcagtctccagtaggagtggagctctgtgcggcgtagtttggtggaaaaacgggccttgcgtcggcctcacccccagtgtttgtgtttcagaatgaagactattctcagcaatcagactgtcgacattccagaaaatggtatgagacttgatgtcttttacttacatctttactgcacgttccaagcgttgtgtggcctgacgagtgtgttctctcttctagtcgacattactctgaagggacgcacagttatcgtgaagggccccagaggaaccctgcggagggacttcaatcacatcaatgtagaactcagccttcttggaaagaaaaaaaagagggtgagggtttttcttctgataattcagttgctcgttggaaggtggtttataacagcatcacatttggttgctttaacaattttcgaattaaggttcagtgcttcagctttaaatgttgctgtccagaataccagcctgttcagtgaaattgaaaaaccagattctgaacacagccaattatataaagctcaaatgtaatagtggtcatcagtgacacgtcttaatggtgttagaagtttggtttattttcctagtgattgctttgtaaaaatcacaggaaccggcagtaggtcatttaaacctgatgatttaattttccagaagggaagtttgttgcaacttctacaaagcttaactgttgggaggttttataggtggttggatttttccagttgaaaaccatgtgctttgataagggttaattctagaatcttaaagtaattcggtaagtggtctgttgtcttttaagcctgcatatttctggaaagaatacattttttgttctgttacagctccgggttgacaaatggtggggtaacagaaaggaactggctaccgttcggactatttgtagtcatgtacagaacatgatcaagggtgttacactggtaagcagatgtatcagacttccttgttttggaaagggaggtttctcaaacctgtgctttatacagcgtaagtgtctctttcagagaatgggtcatgtattttatttggtgtaatacgcaagaacttggcaaaaataggcatctgtgggtctttaagcgatagagctgagagcaaagaccagatgggtacaacatgtttgtttttttctgttgttgggttttttttttttttaatcaaggctggggtctcgctattttgtccaggctgagctcaagtgatcctcccaccttggcctcccatagtactgggattgcaggcatgagccaccatgcatggctagatgggtacaacttttaaaaagtaggctaatgatgaattttcataccttccgaattctttaagataggaaatctacagttgcagtactagttggtagtcacatctcaccatcaggaccccttgttgggatagaaaaagatgtagtttctgagttttctgtctgctgccataatgtatgtcattattctttccaacccaccgtctctcccctcaagataaaaa

SEQ ID NO: 317061 - DNA, 4001 bp, Homo sapiens
tactaccacttaaaagcaaactgtaatctgggccaaaggagacattttgtatcttgatttaggtgggggctatagtaatatacatatgtcaaaattcatggaggtgtacacttcagatttgtgcacttttacatgtgtaactcataccacaatacatttttaaagcagaatatgtcaatgatacagttaaggaaattgagaataaatcacttgccttcaagaatagtaaagactgttctgcttctagatcctccccttacccccacccacactcgaagtctctcctgagaattttagagttcaagaacctgaaaaatagttatccaactctgcaataagccagtaactacaaatgcttcctgtgtatcctgggagcataagtacgcaacacaggcagagcacctgtcacacgccaaaccgttccagccacatatcaaaaataaaaagccaaggtctttttctcatctgatggtgagttatcaaattatgagacatgcctggggctttcagcaagacagccctgatgttcattgttctgtttcttgaaccctattttcaaacagatgtttctatactcaagtagcactcttgcttgcgggaagcaggttaaccctgtagggtacaggtctctggctggagcaggagagcagcattaagtgagggtggtttctgcaggaagctcagcaggtttaaatctgtacgtggagctcttgttactctagcagcttcttgggaaccacaatgctgaacggagtggggagtcactaagtgacaggcggaattctggaagcttcaacattgctgggtcatgatttagcgatacacttcctcctctgaactaccaggcaaagagggctgcttgtcactgagggaaacaaggccaaattcataccttccactaagcctccagaaaggccacccattgaagctgaggctccttgcactaatcatagggggtcacctttccccttcatgcccttcaagcgtcctgaaccccgcagacagttcatttcgggagctcggggctaccaagctgcatctactgatagacatcgtgaatcaggatcacccagtgagcgcttccgggactgagagccgagagctccagtgatttccctggcctgccaacgagttatttaagaagtgaaatatgccaaccagaccgggtagcccgtacttcggaaccgaccctgcagtccttgggatggagaggggcgggggttgccaaaggctgggcagcgtctatgcggatgcgtgctcgcaggtgggtcttgcaagctacccccgccctgcgcactgtgccagcctcacacctgacccggtgccaggaatacagcaagaggctccggtgggtatgcgcctccgtgaagacactgccaactctgctccggaagggtgcggggtagggggacaaggggcgaaatgtgggaccagaagcaagataccccgaaatgcgagcaccggtgaagtctctgggggctcgcgcttcctgcgcctttgcaacgctttgctagcactgcgcttcccttggcagcgcctggaagcggcgctagctgagatttgcgaggccagcgggcaggaaggatggacgcgcaggggatcccttcctgccctcacgcgcgcagctagactgcagtgtcccctttcacgcccaccctcgcccgggattccaatgccaaagcgctaaggtttcgcggctcgccgaggcccgggggggtgacctggagcagctggcaaaagaaagtgggggcggttggggggaggcaaggctggacctgcggtcggagcgtgcgcgggtccgtggctcagggcgccagtgcaaggccgcccgccagccacccgcacctacctcaatccacttctgcgcctcggagaaggcgggctcggggggcggctcgggctgcaggggctgaagagcttccagaccgagagcgggacaagccatttgcgcagccccgcgtcctctcaagcgccgggatgaggacggccgccgccgtcgccgccgcaggagcgcgctccccgccccttcccgcccgccggcctcccctccccgcctctccccgcccccggccggcgcaggtcccgggagagccgcgcgctgctagaggacgccgcggcagctgttcccggcgccgcccgggctccaacgcgccgtgagtgacccgcgggagcgagcgcggaggcgccgggagcttcttctcctccccaccttcgagggccgctccgcccccggggagggggagcacagctacggactaaaaataacccggagcgagcgctgcgtgtctccctcccgttcacacccggcccgatagagggaatccgctggccgccccgcacgtccctgcgccccgccggctgctgaggggcgggcggatgggtctggcatcatatgggagacgcgcgcccagtggggcgcacccgggcccgggggagcgggcgctgcggcaccggagcagtaggacgcgcgggcactggccgcgcagcacctgcagtccttcctggccgcagaggtaggggcaaggcggggcagcccctggcccggcgccgggaagtacacagccacctgatctttttgtaagaagaaaaagaaaaacgaccctgatgagcttttcttctccaggaaggctacctgtgtcctagtctgtcgatgcagtcaaccaacagtcactgtgcacctactatgcgtcaggcactgggccaggcgctggggacgcagagatggaaacacacacacacacacacacacacacacacaccctacacaccctacccacacacaccctacctggaagtccttgccctcgaggtatctacattgtagagggaattgggggccgggacagacaataaacatgtaaatcaaaagaagataattgtggcgggtgttgttaagataaaagaggagaagataatgacatggaaagaaaaagcgcggggtaatttccgatagccttccccccttttggctgggaggctgacctgtgagtcgcggttccattaacgggaggtaggcagatggtcagtgagctgaagagagacgtgcatttatttatctcgtcccttcctgcaggtggttagggggtttccagaaggttcctcatctcctcttgtcccactcaacctcccaggcctaggtatggtaaaggcttccccatcccataatggtctcccgatccggctcacttctttctaacccttcctttaaactctccttggccactcccacttgagcatgccttctgttttgcactacagcccaagtgacgatcaaggaaggtgtctgtaaggaaatgtcctgaagaggtgacatgagtgagggagatttaactgtgtaacaatttgggggaagaattccagatggatgccaaggccttaaggtaggaatgagcttccccgtggaggagcccacagcgggccagcaagactggagctggtgtggagagcaccaggcgggaatgatagcatgggagaggcaggccaggtcccgcctgcgggtgagggggcacacactaccttttagattgttgcctgggtataccctggtaggccaccagggagctctgacctacgtgagcccagcgctgggtccggaggagctcagtattcttggcctaacctcaagctaatggattcccctcttcagaatggctgctaacaagaggtttctgacggtggctggaggtccctgggtgcctcagcctctaaatctctgttccccatccagaatccgagtttaatctttgtccaattctgctgctataataggggaatggaacaaaaagcaggcctcaaattccaccattaccagctttggagtcagacaggctttagtttatttgctttgaaaacacttacgtggcacttatactgtgccaggcactgttctaagtgcattacaaataattgactaactcagtccttattccagctctgtaagataggactgttatcatccctacgaggaaaccaggggacagagctggtggacagggagggtt

SEQ ID NO: 317062 - DNA, 4001 bp, Homo sapiens
ggctcattggtgaagtaaggataagcagtgtctcacagctctgtgggagtgttgaatgagatactgagtgagtatctctaaaatctcagctgaggactaaatgagatactgtgtaccaaggaattaacttagatcctggacacattaaatagtcaagtattttcgtaacagaattttatagctggaagggatcttttagctacaaaagataattcggatctcagagtaggcttaagatatattagctagatatagcagcatcaaccaagcaatacattgaaaaaagaaacaatttaaaaattccccactagccctcatgtttttccgcaagtttatatatgtagaatatgtagaaccaaaccatctttccttctaaaagtacaaaggtacaagataagtaagacaaatggcttctgaaaaataggcattacgtgtatatcaagttacatgattacacatttttgtaacgaaaaatgatcatttcttccaagtgatataaaacccatagggtttaaatcaatcccagcttcagaacaagcaggcagcctgggttgtgcactatacattaacagccacctgcatcgtgctagctataccagtcaggtatcacaagcatcaaacagattgccaaaaaacatgccaattaaagttgcacaatcccaggcttcagaactttctaagtgtgtgcagttcatttccagtttactggaagttgatccattttctcttatatagtgtggtactcactcaaacatttagcttcctcatgcccagagtatataaacctccagcacactttatgagctaatggtctgcacagtgtcttgattcactgagtccaagggaggaatgatgtaacacattttccaacagaagatatgctcactgaggcagtgctcaaataaactcctggcaaagccaaccaaaattctaaggaccatgaaaaacaacattcaaagacttcttttttctgccagtttatagaattactaagttccggcaaggtggatatggagcctgctttcccagtgcccatccctctgccaggcgcaatgcagcccctgcaaatgtttaatttcaagatggatagtttattaagactccaacctaccatcgctgcttcccctgaggactacatctggtgaaggcgtctgccgagagcgagagccaaaggaatccaggctgtcgaaggaatcatctctgccgtggcgaggaggagagagggagtcgctgcgctcggaatcccagcagtcgatgtagccactgtctcggatactgcgtttaggactttcaatgtcatcagtgtcctgtcaaaaaagaaaatgaaagggttacagacataattctagcctacactatcaggaagatgggtctccagtggtctccaaaaaaacccctgcatatcacatcagaatggaaaggttgtggaaaccagttacaggatcaatcatctttgaaaagtcactgctctgttcctggagcctcctttgctgcaactttcccaatcagaaaatcatgcacaacgttttttttaaaaaaatccccaaataactcatattccctaggtttaaaaaaaaaagagtagagaaagaattagaagaaaggatcacaaagtttggattcacaacagtacaatgatagttcaaaacaaaaacgaaaaaccaaaaccttaaccttgacttgtctttcggaatccataactgcatgtctgtcctgggaatgagcccctggtttagctgtgcaacttttgctcctgtttatactatctggcaaatacaggcaacatttgtctttgctgcagaatcagttctgtaaaatcctggagcagcacgcgttcatctcctgctaccttgaagggaaattcctgctctgaaagggagctgtctttctgaggcaaaagttaaaaaaaaaaaaaaaaaaagaaaggcaatgaaaaatatgcaaaacgcttttcctgatgcctcagaagaatccaggcatgctctcgctctcagccagctcttggcgctgggggagctgaaagcacttgtggctgacccacatgttcagagcagggagaacaatggctgtctttgacagcctgtgattataaattctttccagcacaagcagcacatactaaaacactgaaactccagcagaagaaaggtcagtcaaagccatcctcaccctcgtattataataaaagccttgttcccgccagtgtcttagcattaattacaatagtccaggctgactaaaacaaaaataactctggtcactcaaagataaacctcaatttaatatcatccagactgtcgcttaaaattaggactgtggataacactggcagagaggcatgttctcatccgcaaagactggaatgccacactgcagattccctgggatgctcgcgaaagtcccctctgcattcccaatagaaaggaaaaataaatattcttcatgttagcagttttggaaactggtctaaactgtctaggatgcccacgggagccaatgcctttgcaggaagtgcctttgctggctgcttctatcaattatatcctgagcctctgacatactccgcagcaggaggccctttgcgggggacagagtggctgtaatttacaagacacacacagctttgcatcaagagaagggagtgggcaagaggacaagggcaggacggagaggagcaccctgcagcctccagacagaggactgattaatgccctgaagaacaggttgtcaaatggcctgggtgagtagagccggcataaccctccagaggaaggcagaaattccagttatggaaattaaggtagcttactcttaggtcaaaagttaaccaggacttgaacaaaagccaggcctgactaactgaaaaaggaagaactcatgactcactgaaaattatagacccaaattggatatggtttcatatttaatttctttggaaatgcaagtaattatcttggattatttacctactgagaataggccaaatggctaaaaaacaaaggtcacttttattgaacacttattatgtgtctgcagctacacttgatgttttttgcatgttatgttatttaatcctcacaaccactcatcctaaaacatggttagcattatccctattttacagaagagaaaaataagaatcagagaggttaagtaacttgactgaggtcacacagttagtggcaaagctgtgattctaacacaggactctgtctccaaatcccaaacggtatagctgaaaatatttgatcatctttggtacagttacagttccaccatcagcatcttctctactactagacacttactgcctccttattctgtagatgatgctaacctggattatgatcctcagctaaatgctattatgactagatcacaaaactataaatatagttatgtgttgctgaatgacagggatatgtcattaggtgatttcattgttgtgtaaacatcacagtgtgtactcacacaaacctagatggccaatcctactacacacctagactatatgtacagctcattgttcctatgctgcaaagctgtacagcatgtgactgtactgaatactgtaggtaactgcaacacaatggtatttgtgcatctacacatacctaaacatagaaaacatacagtaaaatgtgctacagattgagtctccattatccaaatgcttgggaccaaaagctttcaggatttgacttttttggatttggaaatatctgcattacacttaccagttcagcatcatcccaaaactgaaaatccaaaatccaaaatgttccagtgagcacttcctttcagagttacgtctttgctcaaaagttttggattttggagcatttcggatttcagattttcagattagggatattcaacttgaattttaattttctaggaccattgtgtatatgctgtctactgttgactgaaatgttatatgaagcatgattagtgcaagagagaaggagtttagggtaatggttaagagaatggtctcc

SEQ ID NO: 317063 - DNA, 4001 bp, Homo sapiens
tcggaaccgaccctgcagtccttgggatggagaggggcgggggttgccaaaggctgggcagcgtctatgcggatgcgtgctcgcaggtgggtcttgcaagctacccccgccctgcgcactgtgccagcctcacacctgacccggtgccaggaatacagcaagaggctccggtgggtatgcgcctccgtgaagacactgccaactctgctccggaagggtgcggggtagggggacaaggggcgaaatgtgggaccagaagcaagataccccgaaatgcgagcaccggtgaagtctctgggggctcgcgcttcctgcgcctttgcaacgctttgctagcactgcgcttcccttggcagcgcctggaagcggcgctagctgagatttgcgaggccagcgggcaggaaggatggacgcgcaggggatcccttcctgccctcacgcgcgcagctagactgcagtgtcccctttcacgcccaccctcgcccgggattccaatgccaaagcgctaaggtttcgcggctcgccgaggcccgggggggtgacctggagcagctggcaaaagaaagtgggggcggttggggggaggcaaggctggacctgcggtcggagcgtgcgcgggtccgtggctcagggcgccagtgcaaggccgcccgccagccacccgcacctacctcaatccacttctgcgcctcggagaaggcgggctcggggggcggctcgggctgcaggggctgaagagcttccagaccgagagcgggacaagccatttgcgcagccccgcgtcctctcaagcgccgggatgaggacggccgccgccgtcgccgccgcaggagcgcgctccccgccccttcccgcccgccggcctcccctccccgcctctccccgcccccggccggcgcaggtcccgggagagccgcgcgctgctagaggacgccgcggcagctgttcccggcgccgcccgggctccaacgcgccgtgagtgacccgcgggagcgagcgcggaggcgccgggagcttcttctcctccccaccttcgagggccgctccgcccccggggagggggagcacagctacggactaaaaataacccggagcgagcgctgcgtgtctccctcccgttcacacccggcccgatagagggaatccgctggccgccccgcacgtccctgcgccccgccggctgctgaggggcgggcggatgggtctggcatcatatgggagacgcgcgcccagtggggcgcacccgggcccgggggagcgggcgctgcggcaccggagcagtaggacgcgcgggcactggccgcgcagcacctgcagtccttcctggccgcagaggtaggggcaaggcggggcagcccctggcccggcgccgggaagtacacagccacctgatctttttgtaagaagaaaaagaaaaacgaccctgatgagcttttcttctccaggaaggctacctgtgtcctagtctgtcgatgcagtcaaccaacagtcactgtgcacctactatgcgtcaggcactgggccaggcgctggggacgcagagatggaaacacacacacacacacacacacacacacacaccctacacaccctacccacacacaccctacctggaagtccttgccctcgaggtatctacattgtagagggaattgggggccgggacagacaataaacatgtaaatcaaaagaagataattgtggcgggtgttgttaagataaaagaggagaagataatgacatggaaagaaaaagcgcggggtaatttccgatagccttccccccttttggctgggaggctgacctgtgagtcgcggttccattaacgggaggtaggcagatggtcagtgagctgaagagagacgtgcatttatttatctcgtcccttcctgcaggtggttagggggtttccagaaggttcctcatctcctcttgtcccactcaacctcccaggcctaggtatggtaaaggcttccccatcccataatggtctcccgatccggctcacttctttctaacccttcctttaaactctccttggccactcccacttgagcatgccttctgttttgcactacagcccaagtgacgatcaaggaaggtgtctgtaaggaaatgtcctgaagaggtgacatgagtgagggagatttaactgtgtaacaatttgggggaagaattccagatggatgccaaggccttaaggtaggaatgagcttccccgtggaggagcccacagcgggccagcaagactggagctggtgtggagagcaccaggcgggaatgatagcatgggagaggcaggccaggtcccgcctgcgggtgagggggcacacactaccttttagattgttgcctgggtataccctggtaggccaccagggagctctgacctacgtgagcccagcgctgggtccggaggagctcagtattcttggcctaacctcaagctaatggattcccctcttcagaatggctgctaacaagaggtttctgacggtggctggaggtccctgggtgcctcagcctctaaatctctgttccccatccagaatccgagtttaatctttgtccaattctgctgctataataggggaatggaacaaaaagcaggcctcaaattccaccattaccagctttggagtcagacaggctttagtttatttgctttgaaaacacttacgtggcacttatactgtgccaggcactgttctaagtgcattacaaataattgactaactcagtccttattccagctctgtaagataggactgttatcatccctacgaggaaaccaggggacagagctggtggacagggagggttggattcaagcccagacagcctggcgccagatttgctcctaactgcacaccaagctgtcttaccagtcctgtccagactcccacttacagtgtgtccctcagtttcctcacctaaaatgaggtggatatagtcatccagcagaatcattgtgaaaggcacgaacaaggggactgaatgtaaacagaccaaagctggacctgacaaacaagcagttgctgagtacagaccactgatcctcacctccaccctgctgtccaaaacagagggagggaaaagtatacaaagaagagataaagaaggcaagcatgggaaagggctaaagacgtgtgggcagaagatgaccttgtttccataaagaaacatggcaaagcaaacagtccacaaaatgactctggtacactaatacaatatatggctttgggcagtgatatgatctggctccatgtccccacccaaatctcatcttgaattataatctgaattgtaatccctacatgttgaggaagggacctggtgggaggtgattagatcatgggagcagtttccaccgtgctgttctcatggtagtgaatgagttctcataaaatctgatggcttaaaagtgtctggcagttccctctttgttctctttctcctgccgccttgtgaagaaggcacttgcttctccatctccttctgccatgattgtaagttcctgaggcctccccagccatgtggaactatgagtcaattaaacctcttttctttataaattacccagtctcaggtatgtgtttatagcagtgtgagaatgggctaatataggcaggttccactgcatggagtaactaggaggaagggaagcgagctagcccagatggtatatctaaatccatttgaaaatgagtattaaattttatcatatctctaatatatctggcattgaaattggcatttaaataaaacttttttccttcagtgaaaatacattttacatcttttaaggtttataatcataaggtaacatttgctttttctgagcttttaccaatcacaaattcacgctagcaaagacccacagacttagaaccataatagaattcaaacctagtgctgctatcaataatatccataaatagttgttaagaacctactatgtggaagatacagaagaatccacaaggggacacagactatgc

SEQ ID NO: 317064 - DNA, 4001 bp, Homo sapiens
gtgcacacgggctacgccgagacctttcacccccgggcggagcacgggcccccgcagggacgccaaaggaagtcgcgccacctgcggggtcccaagtccggcatatttttgtttgcaagaccaaaagccatgcggagggtggcataaggacaataaagaacccaaactctttcattttcagagcagcaacttgagagagatggtggaatgcgtttcattcactgtggctatctcaggcactaaaaacactgtgaaagacctttaatgtcattcaccaactttgacattttaccccacccgcagaactactttgacaggatgagctatttccatatgcatgttcgacctttgacacctttgtcaattacaggcagcaatcctcatgcagatgaagtggtcaaaatatctaatttaaaaaaataaagttctgagctatcttcctctccaacttaatttatctggtcatttctgtccatgaacactgcgacttccaatctgtcatcggtttaagacgtcaaagcgcaactagatttgaaatgattgaactaattgtagaaacattcatgaatgatcgatttctaaaatattgaaaatataactcttagctaaaattatttgccaaatgtttttttaggatctaagtcatcaaattaaaaaaaaaccatctgctgctgatatatttgttctgtacagtaaaaataaacagcttgcttcagaacaagatcctagagctacctactaggtaggtaagagttaccagctcttgtcatcagtcagttgaataagtaaccaaaagagaacagaggtaattcttaatcatttaaaaaataacaaaacataagctgcaaggcttctgaagagatcagcattaaaaaaaaaaaaaaaggaaactggctgcctttgtcaattttagaaagagttaaccatccaaaagctgaattctgtatcattcaaccacaacataagctctgggcaaactgaatttcaaggctgcgaacagggccactctactgtctaagttagtgtaggaagagtaaggttgaagttgaagttgaaaaagtcatttcatttccctaccttgtttcaatggcaactccatataaaagtcggtagattcagccttcaacaagggctgtccaccacccaccccaattgctgtttttatatgcagactaccagatgctgagagtataaagtgttctcaattacttcatctttaaacttcatttccccactgacggccccgtccatccgcactctgcttggttgtttaccgttgctggccaagctaagtcccggcccgctcccttcccccgtgcacctcgggaacattatgacatttggctggtgggcttcgcgaggaaaacggacacgcacgaacaagagcctgtacaaaggggcataggaagaacgcggcggcgggcagtagggagaggagggactggcacaaaatgacacagcagcaaaaccggttcccagaaacctggggccgccacgggtggcttgttgggtcgcgcagtgtgcgtgtcaacagccgcaggagcccttactccagaccgccgggcaggcggctggccgagcgctggccctgccgggtgacagccaccctctcgggagccgacgggaagagaccgagccccaaggatccttcgccccccgcaacccagcttcagggaaggggcgcggcggaccccgctggcgggttcccgctccccgccaaggcccaccggcccgggctcccggagggagcggtccagcgctctccgcccgcgcaggcactcgcagcgggggccggttcccccttcccgccagcccgcccaggagcccccatcccgggggctgacactcaccaaagccggcggcgccgccgcctcctggtcgcgcggcgctccctgggctcccagcagcagcggcggcggcggcgcctccgagacacagaccagggtttgttcaaaatcacgcgcccagccccattccaccgccgcatcccataatacgctgggccctccccgcccgcgcgcccctctctgcccgcccctgcgctccgcaccccgccccacggccggcttccttcgctccgcctcttccgcggcgcctcgtccctccccttggcaacccaagcccgcgtcattccgccgggctccgccagggcgctccagttccacgtgacgccgagtggcgcccggtcaaagcgatcgcacggaatgttccatcggactgaagctgatggggggaggacccgcatcgcgctgcggttgggagagaccgtcccttcgtctagctttccttgttaggaagtccgggttgtaggtgcgacttccaggatatcccgctgtttgatgtgcttgagtgaggaggtgatcagtagtcacaaatgccaagtcactgtgtttttaggcactagttttgcagtgtcgctaaaaagccacagggagattcattgagagttaaacttattttgaaagacgttttgcatttcttgcaacacgcagctaagactaacacagtcaaaattatttgtatttaatcaccttttattttttcccgcgatttatatgatatccaaatacggagtcggatgaacagacgctgacagatcattctgaggggaaaaaaaaattattctgagagattattatcaactgctgtgagtgcgacaagcactacatatacgaaaatagaaaatacaagagtgtaaatgtaagatggtgcgatacagtgtataatttgctaatggagtacggaggacatacaggtcagcatgagagactacctcgggaacataatggaggaggtgaaacagtgtaggggaggcagcagtcactttggaatcaagcagtactggtatttaatggcacctccgtttattagtgtatattgtataacgtttattttcctatccagcaaataaaaataacaaaacttcccaggattctgatggttaaataaaatgaagggtgttaagcaggtacacagtctctgcctgaaatgttagttcccttgtgccataatcaacacccagtaccagcccaaacactaatagtcaggatttaacaaggcaaatgtcatgaaattagcaaagccttgaaaatgggaaggtctgtgacatgtgtaagtaatgtgataaagttgaatgacacaaaggctttgttggagatcagcattgtgagcccactttatgaggaaccttgagagctagtgtgagaaatcctcatggtaaaatgattgatggtgctgttggggcaccactggaaggaagaaaagaatgagatggggtacccaaaactggctagattttagagagaccaaaatatctcaaaaaaaggagaccctttcccagtttattccacaaggcagcataactcttatactaaaacccaagacaaacagtacccaaaaaagagaagggaaacttcctttcttgctatgattttgttatgaaggcaaaattgagtatttagttgttattggtgctgtggctcacacctgtaatcgcaggactttggaagactgaggcaggaggatgggttgagaccaggagtttgagaccagcctgggcaacatagtgagatttcatctctacaaaaaaaatttttttaaataaaaagaattaagaagttatcagaccgggcgcagtggctcacacctgtaatcctggcactttgcggggctgagggaggtggatcacctgaggtcaggagtttgagactagcctggccaacatggtgaaacactgtctctactaaaaatacaaaaattagccgggcgtggtggcatgcgcctgtagtcccagctacccaggaggctgaggcaggagaatcacttgaacccgggaggcagagtttgcaatgagccgaggtcatactaccgcactccagcctgggcaacagagtgagactctttaaaaaaaaaaaaaaaagatgttatcaaattccagcaatgtggtagtaaaaagaatttacatcatgacaaagtatatggtttaaccgaaacagtgattt

SEQ ID NO: 317065 - DNA, 4001 bp, Homo sapiens
agacaatcacaaagaatcacaaagagacaatagccctctgtgattaaaagaaagccaatgaaaaagctttttaatctccctattttaattatttttaaaattcttagtcttactactgagtcagcagctataaggcatgggtcaaataactgcaacataaaaactgtaattttaaaaagacaaaaccaaatacctactgaataatacagcatcagacaaattatttttaaaaaataatcattatcgtcatcattaaaccttctgagtacctctaaggtatttctcctaaaaatttttttgggtctcttattcttctagtaagtgaaagccagacctacaaactatacacacctattcacacaaaatatttcccctctaagtaaactacaaaatttgtgatatatgacacactatggcacagtgtgttacatatactctttgtagacaatttgaataaggaaataatatcacatatactctctgtagacaatttgaatacggaaatttagggctaatcataaacattacccatgggcattcctcaatactaatccttctgttcattatacactcaatgtcattgacccaaaaaagctgggggaaaagcatagggtccaaattaatgtataaaaatttttttgcccagcctaaaaatttgattcacatgtaacttttctgtaacactagtgttgtgtgcaaggagacagactccttacggatctttcagcataacctaaaacttaacatgggtcttcagataacctaataaaacagtggctgttatagtcaatcaatccagctctctaaacaaagggctaggctaatcactccagcatttagtgatttagaaataacagaggtctcaatttatttttcccaacttaatgtactcacaacaaatgcttgcatcaccccatcgcaactctccttcttaacaatgaaggtaaaactcaggaccaaaagagagctcctagagctgtatttcatttgcattataaaatctacagcaaaatttttcataactttactctctgaattcatgaactaggttggcgggggcaggagggtgagtatagagaagaacttccctgaaaagcatgagtataaaatataactgagagtatctcaattgttatatgccaaatggcaggggcaaagaggttagttactctaaggataacagagcattaaaaattttttttctaattcttacaaaactggtccctattctataaaatgtgaacatccacaacccaacaagttacagactaggatctaagacacagatcttaaatgcagataaaatgccaatgctctgcctccctaaagaaacgtacaaccccaagaactgctgaacaccatcaaagcaacacccgccagagtggctgttttaaacattatatcaggaaatcatgataagtgctagcggttcctctaggcctcagcagcagccttaggtataagagcaaactggagccctcttaacactcaaagaataatgttgatgtcatgacgaggctactgattcttcgcactccggacaagtcattccttgatccaccgcgcaattctttccccacccacccccatccccccaaataaagagatctccggacagagaagccctcgggtaccccatcctcctctacctccagcggctgccgctttctcctccctcgggctccgaggtaggggctccagaaggtcctgggcaatcccgagccccggcggggcttgttttgcccgtgcacgatagctctggccagcagcttcctttcccagtttgtccaaactggagcgctccagggtacccggggaccgagaagggagccggggtggcgacgtcgccgtcgccgccgcctctggtatgtcaggggccgggattgtatttcgaaagatccgccattttcacctcgtcatcaccatcacagctcagcagcttccccgacagccggagcccgggccgccgccgccgccgccaccaccagtaacctcccccttcctcctcctcccctccccgcccgccccacccgggaggcgcacacccacatatccggggaagcctcccgccgccccgccaaccttcaaacgcacaagggccgtgcaagtgcacacgggctacgccgagacctttcacccccgggcggagcacgggcccccgcagggacgccaaaggaagtcgcgccacctgcggggtcccaagtccggcatatttttgtttgcaagaccaaaagccatgcggagggtggcataaggacaataaagaacccaaactctttcattttcagagcagcaacttgagagagatggtggaatgcgtttcattcactgtggctatctcaggcactaaaaacactgtgaaagacctttaatgtcattcaccaactttgacattttaccccacccgcagaactactttgacaggatgagctatttccatatgcatgttcgacctttgacacctttgtcaattacaggcagcaatcctcatgcagatgaagtggtcaaaatatctaatttaaaaaaataaagttctgagctatcttcctctccaacttaatttatctggtcatttctgtccatgaacactgcgacttccaatctgtcatcggtttaagacgtcaaagcgcaactagatttgaaatgattgaactaattgtagaaacattcatgaatgatcgatttctaaaatattgaaaatataactcttagctaaaattatttgccaaatgtttttttaggatctaagtcatcaaattaaaaaaaaaccatctgctgctgatatatttgttctgtacagtaaaaataaacagcttgcttcagaacaagatcctagagctacctactaggtaggtaagagttaccagctcttgtcatcagtcagttgaataagtaaccaaaagagaacagaggtaattcttaatcatttaaaaaataacaaaacataagctgcaaggcttctgaagagatcagcattaaaaaaaaaaaaaaaggaaactggctgcctttgtcaattttagaaagagttaaccatccaaaagctgaattctgtatcattcaaccacaacataagctctgggcaaactgaatttcaaggctgcgaacagggccactctactgtctaagttagtgtaggaagagtaaggttgaagttgaagttgaaaaagtcatttcatttccctaccttgtttcaatggcaactccatataaaagtcggtagattcagccttcaacaagggctgtccaccacccaccccaattgctgtttttatatgcagactaccagatgctgagagtataaagtgttctcaattacttcatctttaaacttcatttccccactgacggccccgtccatccgcactctgcttggttgtttaccgttgctggccaagctaagtcccggcccgctcccttcccccgtgcacctcgggaacattatgacatttggctggtgggcttcgcgaggaaaacggacacgcacgaacaagagcctgtacaaaggggcataggaagaacgcggcggcgggcagtagggagaggagggactggcacaaaatgacacagcagcaaaaccggttcccagaaacctggggccgccacgggtggcttgttgggtcgcgcagtgtgcgtgtcaacagccgcaggagcccttactccagaccgccgggcaggcggctggccgagcgctggccctgccgggtgacagccaccctctcgggagccgacgggaagagaccgagccccaaggatccttcgccccccgcaacccagcttcagggaaggggcgcggcggaccccgctggcgggttcccgctccccgccaaggcccaccggcccgggctcccggagggagcggtccagcgctctccgcccgcgcaggcactcgcagcgggggccggttcccccttcccgccagcccgcccaggagcccccatcccgggggctgacactcaccaaagccggcggcgccgccgcctcctggtcgcgcggcgctccct

SEQ ID NO: 317066 - DNA, 4001 bp, Homo sapiens
tcacaaccacattagatcatggggattattatctcccatcttaccgatgaagaaactgaaagtcagagaagtaacttgctcaaggatataaatgaaggagattgcacatttttccatcaggcctatgtccacttgaaccaatgggtggagttaccacaggaactctggacaggacttgtgtgtaaattacccaacagaccaactgcattctagtcaatctgactctgaattccagtctttgtcacttcttttctttcttctacctgggggtacagtgtctacagctttgttcctttagtactcagacatgctgacatacagtgatgaaattatttatttaatcataaattaactactgtgaaaagcactaatcaaccatggtaaaccagaggcaatgtaatcttgaggagaggtttagatgcacttttatcagaagatccaagctttgaatcaagtgagaaccttagtaagagacaagtggtggccaaacccccccccttaaactcacaagcttggggaaaataataaacaaaggtcagttaaggaagaacaatagggacctccaaacagtaagacagaaattagcaacaagaactgggcagattcttagtggtgaggaacgactgtctgtctaaggcaaaaatgatctcagcttgtttcaattcataccttgggagaatttacatgcattttgtatttctgggtggatgaacaggagcataattcctaacagattattcccttgcaaacatctgctaacttaaatctcagaaaaacagctgatgttggaatctagaatgaagtgtctcgcagatttatttctttttccagtttttccagctcatcccagcaggcagctgggcttaaaaatggtttcctttctctgacaacaatattggctaaagagtttgactattgggctgtcaagatacaggctgtgtgatcaggattaagaaaacaaaaatggatcctagaggtaaaattactttaaaagccaggtcctggcagaacaacttcctcggtatatttgctattaaaagaaaaagagacagaaaaagccaaagaggtccaaaaaattaaaaatcagacctgaagtcacattcttgcagcaatgagggaattaattcttactgtaaccaaaggtcagcaggcagccagtccaggtctaaatgtaaacaaattctaaatgcacactgcaaagtcgtatttaaaagagtgttcaacaaagagcaaagaaaatggtagactttttcagagaagagaggaaaactggaacgcacagcttctgaatagggcaacagaatttgccctgaggaacaggttttcagggggaaagaaaaaaaaactagggacacttcacaggtttagatcaaaatacagggaggaagaaaaggaaaaataagaactctgaatccagtctgcactggcctcctagcccccgttaaacgggctgaacagatctgcaccttcgcgctaagtttcaaaacaaaagccttcactctacttctctttaggttgttgttgttgttttaatcagatcaagtacgaggacaagcacaggctggattaatgatcagagaaacaaaaaggattaaatatctggcctgggagaagtttattgtgcaactagaatgtcaaagtcatctctctactcttctgtctcaaaaaagcttctccctctggggcaaacactagcgacaagccgttcagcttgtattttttcattcaaattccgtgttcagatccctcaggggccagtggtctaaatgccaagagagaaaaatggagggtttcaactcacctcttcaagcgactgtctggggctctccaagcagcagcaggcaggcagctctcattccttgtgggtgaaccgagcagctccttgggccgccggagttgtgaccagcctcaacttcggtgaacaggtgcctggaggaaggaggacggcattggtcgctccagaccaggaaatgggtgacatcacggaagccccgacagataaagcattgctgagaccttagggattgaaagagtcaggaggccccgcccacctgtcatttacctgaatacctgcaagcaggtaggtggcgtctctttgtggacaaataaatcagttagagcaatttgccaggtggaatttactttctttcctgagcacagcacgtgtccagccccgtgttcagatctgaagtcaaatgcctggttgtttcccaggccctcccctttccccatatctgcccacaaaggagttaaaagggaagtttaaacaccaaaatgagacagtaatttagcagacacaaaaaggaagagtgtgaagccgaacttcttagaaatatctgaggtgccttttcgaaccgcatccatttgaacaccaagtgtttctctaattccaataaaatgacaaatttaagttgacatttccaattcatcttttaaacaatttgaaataggatacctgtcagcagtttcaaagtggttttcaaacacttttgcgctaccccctcccccgcccagcatttttaattccatattcaggaatttgcaaaacttcagtcattcctatctcggctggcttggcagttagagtcatacggcagttacagtgcactgcaggcctgcaattaggagcaatttaaatgattcagattggaatggtagtactgtcattaggcgatgttgtctgctgatatagccaggaaagagacgtcagagttatttctgtcccaagcgtggtgtgtgaccctggacaagtcactggttgcttcaccttttccagcaggaaaggaggcgtaaactcatccagcaccagagcaggcagctgggaggtatcccaggactgttaaactctctggcatcttcccaggagggctgtaaacatctcccatcatcccattgaaacgctgcgtatttttaccacctgcatccagcatccctggaactcattacctgaggaaactgtggattccccgtcccggaagatggcctgcctgcccagagagaattttttttccccttcaggaaaataaatgttgacattcctattttcctcctacttttgcctccctcgtcttcttctttccctcctcctgattttgggaatgcttttgttccaccggttttaatattggactacctagaggttttggggtttggtttgggggagggtggaggaagaaggaaaaatgggagagggaagaaaaggaagtccggattcccacagcctgggcctcagctggctgcagtcagtcaatagctcgcaaagcaagggggaggagaaggaagagaaattgtagtcgagggcggggtctgggggccggctctggtgctcgacctcaggggagctggctcctgtccccgatccgccccagacaggtctaagctacctctttgcacctgggaactctgtgccttttgagagttgaaggcttaaaacaacaacaaccaccacaacaaaactattcacctttttatccaatagaaactaaggtaggtgtggctattcctttattatttaaaagaaaaaaagggaggtaacaaaaccttttacactcaggtgtttcaggaaaaggtttcacgccactagtttgataattgagaaacatcactcacacaaaggcccccctcttcacgcggacagggtgtcccctgggcaagggggaggggagggagagcccgccaacctgatgaatcatctagaaggccacgccttcagcggtcttgcctttggcgaagggcaggatccaacttgggaggggatcacaggcttcggttcaaggccttgggtgggcaggggaagggtgtaggtgaaatgaattcgcataaagcttcaccgaacagcctggagatcgtgaggtttcacttgccatgttcacatacacacagtcatctacatatgtggtgtgatgaattgttgtaaaacagaaagaaaatagagaaataagagttaatccaggagtggagctaactcccaggtatagtgtataaaggaagagaaaaaacta

SEQ ID NO: 317067 - DNA, 4001 bp, Homo sapiens
gcacccccctccacaaaactagaagaatgcaagaaagcattctcccctatagccttcatagggagcatgaccttgctgacaccttgattccaagcttctggatgccagaactgtgggagaatacatttctgttgttttaagacatccaacttgggttaattcgtgacagcagccctaggaaaccaacatagcaacgaagaaggatagcgcatgggaatgggtgggcagggaagaatatcatggcactggatttcaaagatcccaacctcagcatccattgagagaggaatgagccttttcataatctctgccattgtctgtttgtctagaaaagcttctgcaaggtcattatttcctcagagatgctcatgattcagatttaagctagacactttctcttggatcctggagttatattccaataagatgggaccagataatcctgaaatgcagaacaaatgatcacttccaagaacctagctgtatttaccaaagagcatctgctgtgttagacaaattggctggtccagctaattacaaaggaggcacgggctaccactacatagtcatgggtggtagcactatctaatgtgaccagacaagcttttctgatctgaactctatgaactctatttaaagtctctgttttcatttgcccactgactgtaatttacacataagccaactcttgctatttttcccgtctggttaggttcataaggaggaatacatttttgcaaatgttccaaacacaaggcacacacagcaacacttttcatatgattgctagaagtcattcacattagtctataatccttattgaaagcttactaacaaaaggagctggaaaaatatcactagaggttggtgacatgaggcatttccttgcataaaatggacatgtgtcatgtaggaaattgtctttatttttcagagatgcacaatgatgtatttaggggtgatatgtcatgatggctacaatttgctccagaccattgcagcaagaaatatatgaagcaaatgtggcaaaatgttaacccattaaatcaaggcaatggaaatatgggtgctcaaggcatgtttcttcgtatcccataggtttcaaaagcatcaaaaataaaaataacatggatatatacattttatacatagggttctttttttactgatactatacctgttttcaggtatagagactgtctcaataaagggacgatgcctgcttgcaattataaatacccaatagaggcagcagatctatgcatacaaattctattcttaactgctcttcagttctatttacggaaggaagagaagttacatctattgaggaaaaagagtaccccaaaaaagcagcactgacactgaagcaggaaaaaaaaatgccttattgagaaagtactgcatctgttaatatggggcttttttgttaagtcacagacagctaagcatgccgttttaaactgctggcagggtgctttgtccaagtgcatctagtatgtgtggaatttaaaatggatatatcagctagggaatggactcgggtcccacccccaacatactaggcacataaacacacaggcacggacagagaggggactcacagttctgaatacaggaagtgcaggttgcccacattgtcaatgtagttagcaggactgagccaaggcaagaccagcaacagaagcgccttcattctccgagcagtgtgctgccttctccctggccaccttctgtcagctacaagggcccaaaccagccaagctcctttaagcaaaccttgccatgcccccacaatcagtagatcacaaagaatttgactgagaaccttcagattaagccacgttaataaatcacgggcccgtaagaagattatgctctctgattctcagatgagaggatgtaggaacgcaaggagccaccacggttggcgagagagcttaggctgagagcaggcaagctgatgcccaggaaaggaaccagcccctcctgcaggatgcggactggttcttgggaagcagctggtacatttacatcaccggctgggagcagacaggctgggagttaaaatgtgttggaagaggacatgagcatgacacattcagaccccacggtgtgaataattaaataatgaaaagctgccctccagtttgctatagcgacactgtaagaaattcccatctttggagcagcctggagagctgagcttaaagcaagcattcacatattcagtggctgaaatatgaaccaaccccaccttcctccagcacccatcactgtcttgactgcactgacatatgaaagagatgtgacagtgacagcttcctcgctaattttgaaatctggctctcgagaagaataggctgtgccattctctgtcagaataacaaagagcctggatagacataaagttctgtccaaacaatgtacaggttcctgtttggtgaggaaatgagtcactccattcttccttctccctggggggaatgaattgagctctgaaatcagctgtatgacacttgtttcatttaagctctcaagcctcagtcaccttacctttgaaatggagctaattatgccttacctacctggtctgtcagggactgggccacatcccctcttccagctttaagatctgggatttgagactgcatcaccggcctcaacactaagacttctttgcaggcctaagctctggaatgccacagaagcccccaggactctcgcttaccccatattcaagaagattaaattccattttgccaactcaagaccagaatcttaatagaaatggctcgaagggataattacattcatcacattaatgacagccaagccatgatagcaaactccactccacaggaagtagaccagagaaaagtctacaggatgagacgagttgcaatgaactgcgtagtcattaggaatttggcatcagaggcagggctaaagagtttaaatacagaagactcttagaatgtgcagatttaatttctacagtttaaagtgcagatgaacaaccttgataaaacatgggatataataattcatgattttgttgaggtccaaattggaattctattctctgtaaggctgctctgcaagagtgagtcagagctcatggaaagcagtagaaagaagttaggtttgatatgtaggtgctggggttagagaagcttgaggttagagttctagctctgctgcatactagctgtatgacagtaggcatgtttggttaacctctctgaactttcatgtcctcccctgtaaaagaaagacaatagtaatagtgcttaactcagagtgctagtaagaaggtgaaatgaggcaatgcccataaacaacaaagggcttaacgagtattagcttaatgttattgtattttatttttttcagagatgggggtcttgctctgtcacccaggctgtagtgctgtgtcacaattatacctcactgcagtggtgaactcctgggctcaagcaatcctcctgcctcagcctcccaagtagctgggactacaggtgcgtgccgccatgcctggctaaaaaaaaaaaaaaaaattaaaatctttttcagagatgagggtccctctatgttgcccaggctggtcttgaacttttggcctcaagcaatattcctgcctcaaccttcaagtagctaggattacaggtgcaagccactgcacctgggtctactgttactaataactattagcgatagtgaatgagcctacttggaagcttaacagctatctccaagaggttttgttattcttttcttatcccttctttcctcctatactattagagaagtgacatgttatagtcttatcctaaatatggagtttcacaaagtcctgaaacatgctcttcttggatgtccacgacctcctatatagatcagaactcttaagtagcatgatgtattataaaggttgtggacttcatattggtattggattgtatttctgacgatcttggacatgtcagattgcttctgac

SEQ ID NO: 317068 - DNA, 4001 bp, Homo sapiens
acctgaggtcgggagttcaagaccagcctgaccaaaatggagaaacactgtctctattaacaatacaaaaaaaaaaaaaattagtcagacatggtagcgcatgcctgtaatcccagctacttggaaggctgagacaggagaattgcttgaatatgggaggcagaggttgcagtgagccgagaccgtgacattgaactccagcctgggcaacaagagtgaaactctgactcaaaaaaaaaaaaaaaaaggaaaagaaagaaatagaaaatgcgaaatggtaagaaaaaacagcataataaacatttgtatggtgttgatggacaatgcatttgaagataatatttgaagaaatcatattacaattaatttctgttcttcctcattggagcttgatgcctctaaaaacttcgtcattggaaccacctctggtgctttaaaagaaaaaaaaaatccacatactcacacaggtgcaaggaaatcagaatctcaggtattgagacccaggcctcatcatttgtaagctccccaggtgatttgactcaaagccaagattgaggaacggcgacatggatctctacacttaacctgcctaaatagattctctagaagcagttcataaaaaaactccacatgaactgtggaagaggatatgaatttgatgtacagtatgtcctcacttaacatctttgaaagtctcttggaaacttcaccttgaagcaaaattatgtacagtgaaaccacctatttttcatcaacagtacaactacacaactttgaacaaccaattgtgttggaggacctcctgtacattgtttccattaagtcagttttcagggaattccaaaacgaagtgaggacttcgtgtatataaaaagatggttgtgattccacctggatgacagggttattgctcagaaactaaaagaggctgcctaggtatagaggattctgtcatgaggtttctgctaaacaaagggtcccagaatcctcacccattccagttcaaggcataatgaagaaagcaatattcacaaaggaaatgcggaaaggaataaaagccatcaagccacaaaaagaatgtgactaaggggcaggatttgcagatgtagagatttactgtggttgccctttctcatccacacaagaaaaaggatggaacagatcatgagattcgactgttctgctgcgcagcctccgcaaggcactttgtatgtccctgtttctcaggctgtagatgaaaaggttcagcatgggggtgaccacagcgtacatcattgacgccactacaccattcctgggaggtggtgacacagctgaagtcaggtacatcccaatgtctgttccataaaatcagcaaacaactgctaggtgagagtcacaggtggagaaggctttatacttcccatctgaagatgaaatcctgagaatggaggtgacgattttatagtaagataaaaggattgctgaaatgggaagaaaagcaaacatagtactatggaaatatgtgaatatgctattgatgacgctgtcagaacaggcaagtttgagaagttgagaggggtcacagacaaaattagagatttccacattcttgatgattgtgaattgtaacacaatccaactgtgcagctgggaatccaacaggctaaggaaaaaggacatcaaaatgaagaagacacagaggtgaggattcacgatgactgggtaattcagagggcgacagatggctacaaagcagtcataggccatcacagtcaggatcatgccttctatacatgcaaaaaggaccaagaaaaacatctgtgtcaggcagccctcatgagagatgactctgctatgcgactgcatgtccacaatcatcttgggaaccatggccgaggtgaaaccgatgtcagcccagcacaggttggagaggaagaagtacatgggggtgtggaggggggagtcagagctgacagccaggatactgaggaggttcctcagcaccgtgaccagatacatggacagggacagggacagcaaagcgaggaccggctgcagttctggatcctctgagagtcccaggaggaggaattctcagacacctgtgagattccgtggctctgtgtgtcttggacaccttgagaaggaaagaggattggaaaaataaaagataaaaaccagccgttaatgctagatgcaagcaattcacaaggaacgtcttcacacttgcggaccatacgccgccagcaatgtttctcagttgtgacaattccaacaatctcagaattattacgtgatttacttttttgctatacaaggctttctgtacatactattttagagaaaatccactgaagaatattagaagaccaaaacgtcatatatcacaaatccgtgatctcagtaaaatacggcctactcttttcagaaaaaatgcaatgcaatgacaatgtccttctctcttgaagaaaaagatctcagtctaattgaaagaaattaagaagccatgaaatacactctactttattctgacaccgtgctacaacttccattgatgtagaatatgtaaaaggatgacacaagagctaggaccccattatctgaaaatgaaatcgaaccttatcgttctcaatcggaagagcttttcacatgcctgttacttttcatatttattatcatccttctgttttctgacatcatttcttcataaaagtacatgcacactctaaaatgggagctgtgtttccaaatgaattgaatatataactcttggtccagcaccatggttcacacctgtaatcccagcactttgggcagccgaggctgatggatcacctgaggtcaggagttccagaccagcctggccaacgtggtgaaaccccatctccagtgaaagtaaaaaaaaattagccggacgttgtggcgggtaactctaggtactcaggaggctgaagcgggagaatcccttagaacatggaaggcagagattggacaccctgtgataggatttttgatatcctagggagatagtgctcctgatagcagagtgggcgtacaccctgtgatattatttgtaatatcctagaaagatattgctcctaatatcacggtggctctacaccctgtgatcttaattgtaatatcctacagagatcttactcctaataatacagtgggtgtacaccctgtgatattattcataatatattacagagatacgactcctgatatcacagtgagtgtacaccatgtttgtacaccctgtgatatttgtaacaacttagaaaaatattacagctaatatcaaagtgggtgtacatcctgcgatgttttttgttatctaccaggtagatattactcctaatatcacagtgagtgtacaccatgtgtgtacagactgtgaaattattcgtaataccctaggaagatattactcctcatatcacagtgggtgtatgtaaaccgtgagtgatatttttttctaatatcatgtgggggagaggatgttattgcttccaatatcacagaaggtgtacacccccctgtgatagtgttcctaatatccagggaaggagaggatgacattattcgcaatatcactgggggtgtaccacctcccgccgggatattgttctcaatatccagaggtggagagaatgatgtcactcccaatatcacagggggtgtacaccacccctgtttgtaaacaccccccgtgatattgttccaaatggcctgtgaaagagtaaacatgactcccattatcgcagggggtgttcagccctgatgatattgttttctaacatccagtgaaggagagcatgctattactcccaatatcgcaggggttgtacacccttttgtgtttttgtgcccaatatccaggaaaatagaggatgatattactcccaagaccgaagtaattgtacagcacccctgtgatattcttcctaatatccagaaaggaaaagaatgatattactcccaacagcgtaggaaatgtatacccgcgctgtgct

SEQ ID NO: 317069 - DNA, 4001 bp, Homo sapiens
gattcagaattgcatcactgacgaactacaatgggtttctgtaatcaattaaaaaccaaaagtgagctaaagaggctaaaaattcatttcagctgcttgctacactataatattctgagacctaagcagtggcaaatacagctgtgtccttttttctttgctataattatcatcaacatatgagagagtgactatattacaacattttcatcttagtgaaaaaaatcaatgataattagccaaaaacattaaattgtgtaagaggaacatacatatagactttaatttaccaggtttgagagagattcagtgaatattactctaagttgtacagaatataaatgtctcgcttatatattaaataatgtgatatattttataaaatttgcaaaggtacatcctttctaaactatcatatttctgctataaatacaaagatgtctaaatgaacaacattaagtatacatgtctattaagtatattagcatgtttccataatcacacctttctttaaaaagtgaaaacacacattaatattattttgttattgtgtatgttttcattttttttttgagacagagtctcgttctgtcacccaggctggaatgcagtggcacgatcttgggtcactgtaagctttgcctcccgggtttacgccattctcctgcctcagcctcccgagtagctgggactacaggcatccaccacctgcccagctaatttctttgtatttttagtagagacggggtttcacggtgttagccaggatggtctcgatctcttgaccttgtgatctgcccaactcggcctcctaaagtgctggggttacaggtgtgaaccatggtgcccagccgttcttttgattttttatttgtttgtgtttttgcatttcaaggtatagtaccaaaacaatttccctttattgggaggttatagtttgtgttctgtatattaaagattgtgcagagtagtaaatactcagagaaaaaataattacttggttttggaaagcagatacttttgaataagtgggattttacttttggagttttctttcaaatgcccaaatttactacattaaaaatgtttttttaagtatgaaactatgcaagccaaaaaattcacaataaatgagataattaatatttcagctgattttccaaaagtgtagtaaagactaaaaataaaatgcaagagctctttttaaaaagccttttggttttaaatacatttcaataggcactttaagaaatgcaactggaaactcataactatttcagcttaaaatacacattatgggctgggcgcggtggctcacgcctgtaatcccagcactttgggaggccaaggagggcgggtcacgaggtcaggaaatcgagaccatcctggctaacactgtgaaaccccgtctctactaaaaatacaaaaaaaaaaaaaaattagccaggcgtggtggtgggcgcctgtagtcccagctactcaggaggctgaggcaggagaatggcgtgaacccaggagacagaggttgcagtaagccgagatcgtgccaccgcactcgagcctgggtgacagtgcgaggctctgactgaaaaaaaaaaaaaaaaaagaaaagaaaaggaaatacacattatgttcttttattttaacttactcatactaacatatgataaggaaaaactacaaagcagtctcagagaaaagatcccaaggaagtgtccagtatgaataagtgagacaacattaagcattacacaaaaatctgaaaaatcttaccatgaattattggagctaagagcatcatgaaaattagtagctgcgatggccacatggctgtctactcaggtatggagtattcctcaagaatgactgttcaaatgtgaaacaaaatacgtatatttctagtttctcttctgtattccaagactgatgatttttcttcaaattaaaaagaaaaagaataatttctccaaaacagaaacaccaatatcccaaatctgaaacctgcaaaaaagaaaaaaaaaagggttattgtataaaataagtaagtaatccaaagacattatttatacaatacatatattgccatcatgttaatatcctggcctcagatcttaatgaaataaacaattcagtctctactgagcaaattaactgaaatatactgattttttttttttttttaagatggagtctcgctctgtcgccccggctggagtgcagtggcgcgatctcggctcactgcaagctccgcctcccgggttcacgccattctccttcctcagcctcctgagtagctgggactacaagcgcccaccaccaggccaggctaaatttttgtatttttagtagagatggggtttcaccgtgttagccaggatggtctcgatctcctgacctcgtgatccgccatcctgggcctcccaaagtgcagggattacaggcgtgagccaccacgcccggccttttctttcttttttttgaaatggaatttcgctgtttttgcccaggctggagtgcaatggcacgatctcggctcactgcaacctctgcctcccgggttcacgcgattctcctgcctcagcctcccgggtagcttcaccccagctaattttgtatttttagcagagagggggtttctccatgttggtcaggctggtcttgaactcccgacctcaggtgatccacccgcctcggcctcccaaagtgctgggattacaggcatgagccactgcgcctggctaaaaatacatatatattataccatggtaaagcttacacaaagtaagccccatggggttataccacagtataattataccacagtataatttcactaacattagaatagtaaaatatttaattcatcactgttaccataaataagtttaaaacaaaaggtaaatatatgtcttactttcatctcaggctgcaatattcattcagaaattattctacatattaactacattacttttctaaacatctctgtaaatctgtgaacatcatagatttatgtttacaaaagatgttactctttgtttgaatgtcaaaagcttcattcagtactgaaaatcaaggcaaagtattatctaaataacaatgtacgatgattaaagacagattattatgcccgaaatttcattttcatttatgtttcatttatgttattctaaatagcttgtttttaacagtaagcatatagatacaaactaaattaaaatgcagttcgaacatcattcattcaacagaggttaattgaatgctcactaaaatacaaagcagtggtctagaaacatggaatagaatattgaagaaaacatgcaacctattctccaggattgtacaattcaagatgaggaatcttgcctagaggtgtcaaatattaataactttaagcactgaaaaagtaactttattgaaccaaactagtgtagttgcctcctcttcaagtcttcccaagatttatcttaggaaaccaaaatactaaagaaacataatccaaatcctgaagacaccatcttttacaatcagcacctttcaaactgatcaatcaagcacaaattgggccttccttccttcctttcttccttccattctcttcccttccccttccttcccttcccttccccttccttccttccttccttcctcctccctcccttccttccttttttctttcattctttctgtctttcttttcttttttttgtcttggagattgatacatattttcaataatttcagagttttagaattaaattttaaaatcttctcaaaagggatattcaaaattgtttactgatgaatgtattaatacacttcattctgtcaaaataaaaaccaaagtctttactaaaaggcaaaaattacacaaatttatcagatgttttgatattgttatttacggcatggtagttaagagcacgcattctggagccagacaacctgatctcaattactgttctactacgttgggcaagtcatttaactatatagcatct

SEQ ID NO: 317070 - DNA, 4001 bp, Homo sapiens
cccggagacggccaaggaaggcgaagtacttggatgagatgctaagttctttgcccgtgcgcctgcagcccgactccaatgcctcctcgagggtggtcctagggagctgccgggtgagggagccgctgaagcgttggccgcgccaggcttggcacgcgatgtccccaccgggtgctgagttccgtgctaatgcattatgtaaatgcttaaattctgcagacaaaggccacaatggagagcctcgggtggctccacaaagctgcccagtcggcgctaataggtttcatcagcagattctacgcacgcctgagggtactctgcggatgatggatgaaggaacattcattttacctggaagacgaagggggccatagagaccaggcgtgagggaaaacggctccccattatccttggaggccgggcctttgctgccaccctcaatctgccgtcagcgatctgtccccgtctccctgcttgccggtgacttttgttcattcacaaacgattgcgcatcacattatagtcccagcaaagaggagaaaactcccacaaacgagtcgaaagaggaagttggagaaggggagagagccagtggacgtggagatttttttattttcccagtttactcccaaaatttaaagaaaagcgcccaggtggcgagttgctgaaactcatcagctgcgcacagggagcttgctagcctctagcagcacagcagtcagcacccttcgctaaaatcgggggagtctgatagacctcggtgtgtacgttcaatgcagacccgacctcacactctgaactggctcctctgggccagttctgggaaagcgccaataccgaagcctcttgtgtcacgggccaaagggcccctggagatgaaaggaaacgtgataattaacggtttccgtccctggtggtcactaaggcggcttataatgcttatgactgcctccacctggggaacttgagggagacaaaagcatggagaattgcttcagggctccacatagctatatacatatatatgaattcttttatgtatataaaaatatatacatatgtatacattttatatacatgaaagaattagctatagactcaatagccttgtcccaccgcgttttggaagacgcaagcagtgccaagctgatttgcgtttcatttttctttttcccccggtggggtccactttctggccgccttcttgggaaagggctttacttcaaaaagaaaggaggtgagagcgatacgaggcatgaatctgtataggtggctcaagatgcagatactctgctgccatggaaatgaatagggcgcggagtgtccatagtttcttgaaggatatttttgcctctgataaattccaattttttaagccagaacgttatgccattaagtgatttattttgctcagtggaattgcctgaaagtaaccctctcctgctgctctgcgtgctaggacttcggcttccggaagcgacagcccgaaggaggcagtgaaaagtcttcatttgccttgtttctgaagtcttcccagaactcttatgcgggaagcggttagcgatgattaggcagcttttcaactgcaaaaatatagcgtggaatgagctcctctctcggctggacttctccccgcccccgaccccccttcgtcaaggaccattgcaaatttactttgcaaaaggcagcttctcaatgttctcaaaatctcatctatttctgtggttgagaggtcagtttttaatggctccctggaggcacacttcataaaaatacgtttacacactaataggcttatgcccccaataatattttcctacctgcctcaattttagctaaacaaagggaagactatagctgtaggtggaaaggcccaagagaaatctaacattagttcttctaaatcagaagatgtcacatggagataggagaaattcctctaccctgagtagctggagagacctctggtttcccggaccgttaagaaaggtggctacattctgtgataacgttctgcgtgcaaacgccttaaatacatgcgaatgcgtcaccaggtctggcggcgagatttagaaagagcctggactttcctggtcaacactcagacagactgtgctgagcggtcgactcccactttggccaccgcttcccctacccgcctgcagaagaaggaatgacagctacagtgtccccgcagggtggtcggccccggggcagcgccctcgcacctgccgcgctcaggcccacgtccatttcccccagtaacgcatacaggccaagcaagatccgcttgggtctcagcgcagaagaggccgaaattgaggctcacaggtcccagcttacttctgcacctcatcttcccacggctacctcaccagaggtccctggagagtttctgttcttaagaactaggacagggaagaggtgcagagttccacagaaacctaacgccctagaaggctaacagatttcccacctgcaggctttttatctctggatgccccctgctcctcagagaagtctttggatggaagatatgatcacagtattagtaataataataactaatatttacggtgtgcttcctgtgtattaggcactgaactaagcattttcttatttaatcctcataaccctatgaggtattatctccattttacacaggaagaaattgaagcttataacttcgtctagtcagtgtgctaatgtgtggggatcaggactcaaccacaggtctcttttgccccaggtcctttaccgtcactgggaaggcctgcctttccatcagtctaaccacccattacacatcatttattgaatacctgctatatggcaggtgctatgaccaaccctagaggttcaataaaacacctcaccctaaacttagatcccacaatttctttgtaatctgtaattaatttcccctcttctctcatgtcacgaggtctaatttttaacatcattttactgggatagtgagaatagagctggttaaggttctgattaatagtatgccatcactaggaaggctacaaaatcctacaccctccttagggtgtaggatgaatctggggtggggaagttcaatgtcttacccaagggcacagagtcaggagcagaatgcaggcccagtgttccagacttcattatctcagattttcttttacttgagctctaggcctgagaaatttggttttctaaactgcatgttttaaaattcttgtccttcttagggattattttgttgttcttggatttttttagattactaaatcattgggctataaataatgataatcttaacatttgtttttttcttagctatccatctatattcagttcttttacaaatgtccaggtctggtcccctggacataaataggggccctaactagctaactccaaaggtgtggggaaaacaaagttgtttgtgaactttgttctgacagcagaggaaaagaagcagacacttctccatggagcctcctaactcagtgctacatgcagtgttaggccaatagggatcaattaccccctgggaggagattttccctggcttccttcctggtgactagcatcttattatgaggacctcactttagcctattgtctttagaaagattaaaagctgcagcttcagttggttgtttctgttgttgttgtcaatgctgttttgttgtttttgtttgccaaccataaaataagaacattgaacaaaacaaagaatttacatttagcattatgaagactcctagccccaattaatacagcttaatataaaattaacaacaggttgaggcagctgtgatgcagaggtaggaggcagaaaggcagaaatcctgagttaagggcctggaagtgccatttacaacaaaataatctcagacaagtcacttgccacctctgagcctcaattccgtctttctaaaatggaaataatatccagagggctattttgagaattaaacagaatcaaatacattgcagtattctatgaaaat

SEQ ID NO: 317071 - DNA, 4001 bp, Homo sapiens
aacatctcttcttgaaaactaattgtattgatctctggggaacccataaacaatgtaatctaccttcagggctaatgggtaaaggatgcttaacaatgaagtctagatgaggatcaaagccaacccagaaagaattcagaataccatggaaaatacaactctgaagcaccaacacaaagaataagggaactaccaggggggccctcttactgggaattttgatagcttatagcaagcaatgaaaaatccctctatgcagctttcaaagggagaaaactgcatggttccttattttaaaggcacacactttgtttatagtgttatggattaaatataaactctggacctcttcctttcaagtgaaattcttggttaaagttgcaagcagcggtgactgattccttgtatcccccacccccagtcacttgccctttgtcgtttgaactacactgtgggtggacacctgatgacttctgcagcaatactgggcagctctggaatctctggaagcggtcctgcattgccacatcctttctctaagcatttcgagatatcctgcaaggcacgttgccatttgcttatttacttagcctaccttaggaacaccagaactttccttacttaatctagaactttaagaatgttatggaaggccgggcacggtggctcacgcctgtaatcccagcactttgggatgctgaggcgggaggatcacgaggtcaggagatcgggaccatccttgctaatacggtgaaaccccatctctactaaaaatacaaaaataaattagccgggcgtggtggcgggtgcctgtagtcccagctactcaggaggctgaggcaggagaatggcgtgaactctggaggcggagtttgcagtgagtggagatcgcgccactgcactccagcctgagcaacagagcgagactccgtctcaaaaaaaaaaaaaaaaaaaaaaaaaaaaaaggaaaaagaaaaaggatggtatggaagtggtaggggaggtgtccaggaattagatccctactcgcggggaagagaaaaggtcagggatgggagggggcatctccgcggagcccacttcccctgggagtcacacatcataccttgtcggactggggactgatcggggtgccatatctgcagtaggtcacgaagtgctcgcagttgttccacagcaggctgtagggggtaaagcccagcagcttttcagccctccgcgccacctcctcgttgagcagtgcctttttctggagggactcgtccaggtgattgaccaggatgttagctccgtaggcgaagtcctccactgtgtccacgcggatgctggccactttgacaataacgcccaggatgagacgcttgttggagaccaccttctgcgtgcgccccatgtcgtctgtcagggccaacaggatgtcgggcatcatgtgggcaacacggttgtctcctaggtagatgccatagtgggtcaggtgggtccggggcacctccagcacgtcgcctcggtggaaagagctggtttcataaaaactgttcctccctttgtcttcgcccgcggcgcccgaactaaagagcgtgaagttggagatgaggagcagcttctccagtagtaaagacaccacctccagcatggggttcttcatcctgcagggaagagggcgtcttggagaggtgccggtgccactccggcaggggccgggctgggcaagttaagctcgccgggcaggggtgctgcgctgctgctcacctgcaggccaggtgaggtacggcgcaaagtacggccgctgaggagagaggaaggcaaaggaggacagcgaggcctggcgaccggctcagccaagccacaatggggaatgagacggataaggaaccggtggctgacggcggggacagtgagaccagtgctacaagcagccggagaaggagcgcacctgggggccgtgccgggggcagggccgcgcgcggtgctcggaggtgcaggcttcgctgcgactttttatggccgtcgagggggcggagccgaaggccgtcacagacccggaaagctcactgattgggcgccgctggcgcgctgcgctagcggcggggaggacgcgggatcccggtttctttgggaggggggcgggccgactcccagctccagggttctgcacagtgattctttatcgccgcgggatcccggttgcactactggcttttaagtggcctatttagggaggtagagtcccaaggtgtggcggcacgaaaggtcctgcacctgtcgggactggggcgagttcctggcacttcgcggtagtcttcggtggaaagtcctcttgggagagatttctgagttggaccaccttcctctaaaaggatagatatgagggacttcggcttaataaagagattgcatttactttgcaaagtgcgagcgcctcgaatgcctgcagattctttcctgaccgaatctttcgttttgttttgttttgttttgagacagtgccttgctctatcacccagagcaggagggcggtggcgcgatctgggctcactgcaacctccgcctcccaggttcaagcgattctcgtgcctcagcctcccaagtagctgatattacaggcaccacgcctggctaatttttgtatttttagtagacacggggtctcaccatgttggccaggctggtgttggccaggctggtctcgaactcctgacctcaagtgatccgcccttctggacctcccaaaccgctgggattacaggcgtgagccaccgcgcccagcccctcttttttcaaatgccctgaatcctccatgctttcagccggcgcgagggtgtgtgtgtagggcgggggggggggggttgggggggtcgctacccgcgagtccagtccctgcgcgccggtgatttgaacccgaggcctctctgcgctcctaggcacctgtggccgttgagtacgaagcttccaacggttggcatgaaaaacggcggggtcccaacgcccgccaggaaagcaagattcatgttaagtttatttctccggcttcagggtcacatggacccagcttcagttcacccaccgaaactttgtccgcctccctttatttttatttttatttttatttttatgtttttaagcataacctcccggagacggccaaggaaggcgaagtacttggatgagatgctaagttctttgcccgtgcgcctgcagcccgactccaatgcctcctcgagggtggtcctagggagctgccgggtgagggagccgctgaagcgttggccgcgccaggcttggcacgcgatgtccccaccgggtgctgagttccgtgctaatgcattatgtaaatgcttaaattctgcagacaaaggccacaatggagagcctcgggtggctccacaaagctgcccagtcggcgctaataggtttcatcagcagattctacgcacgcctgagggtactctgcggatgatggatgaaggaacattcattttacctggaagacgaagggggccatagagaccaggcgtgagggaaaacggctccccattatccttggaggccgggcctttgctgccaccctcaatctgccgtcagcgatctgtccccgtctccctgcttgccggtgacttttgttcattcacaaacgattgcgcatcacattatagtcccagcaaagaggagaaaactcccacaaacgagtcgaaagaggaagttggagaaggggagagagccagtggacgtggagatttttttattttcccagtttactcccaaaatttaaagaaaagcgcccaggtggcgagttgctgaaactcatcagctgcgcacagggagcttgctagcctctagcagcacagcagtcagcacccttcgctaaaatcgggggagtctgatagacctcggtgtgtacgttcaatgcagacccgacctcacactctgaactggctcctctgggccagttctgggaaagcgccaataccgaagcctcttgtgtcacgggccaaagggcccct

SEQ ID NO: 317072 - DNA, 4001 bp, Homo sapiens
ggtaggtagaaaagggggaagtattttagggccagatttccttttgattctttaagttgatgggcaagagaggctggaataaagaaatctaaaaagtctccattataaatgataaccaagccaggcacaatggcgcatgccagtagttccagctacttaggagacaagaggggagaatcgcctgaacccaggaattcaaaactagcctaggcaacagagtgagacctcatctctaaataaataagttaatgaattaattaaaggtagaattgtataatatatgaattatacctcaatttaaaaacaatttaagccctatacagtgatgcatgcctatagccacaactactcataagactgaagcaggaggatagcttgaacttaggagtttgagaacagcctgggcaacatagagaggcctcatccccctcccacccccacccgaaaaaaagcattcatagctcatcttagtataatcagcaacttccaatgactaactatgctttcctgctagacatgaatttataaaacacataaaaattatactgtatctgcttcaattccttttttcatattgccattcaattttcacaagattactttaaatgcaatcctaaattcatcaccaatttaacttttgttagttatgtctaaaaataaaactagtcaaaattaaaaatactaactttgcagcaaattaatcttgcatcagcactacaaacaaatttttaaacttattgtagcaaaacataacttcgacagaatcaaagacattaattctcaagtccaaaaaaaggtcacaagaaattatttaaagtggtaaagggaaacgcagacttaggcatacaagccaagaaaaaaaaaattagagataactcctccgctagaacctccccccaatacttccatagcaacaattatttccttagcacaaaagtgatgtgttcactttcacaaaacctggatcatctaagtttgcacaattcccttcaatctaaaaaacagatgaaattgtttcatttaggtgagtagaattttgtgtccctatacacgaaaaaagtcaccatcagtgtgagtaaaccacatggctccagctttaagatcttgttccccaacccactgaaaagagtatatgcttataaaatattcatggacttaccaggttaaagacagtttctacaatatccctattggatacttctccaacttcaaccaaaccggtcaacacggcaaatttcattctgatgcccctgatggggagccctggtttcagagacaatgcacccccttcagtaggggtttcttctctccctccacctcccccgtcatcacctgttggtggcggggaagggacacgattgtcttcgctagccattgctagctcacgataaaggacaactcagagtcaccctgggacggcagtcgctgcactggtaatgagcacaacacacgcaatgcaaaacgaaagggtccctcttccaacttgtggagataccccaaagcagttgatgtggaaagtccttggcgtcgccctcctcctcttggagaatatttgtccaatctctctccccgaggctgacaacaacgccaaaccctattggaagattaaatatatgttaaataggctaggttttgttttagggttttgaggggacaagagggaaatagttattgtcggtcaagtaagttactaaaggcaccccactactagccacccgcttctcccgggctcaaaaagctgggttctgggtgaaggcaggtccaagaggcccccgaacaggctcactcctcccccactctcgtgcaggttctaggcgcagggtaacctctcctcacaggtgcactagaaagagaaactgtcgcggggaaaggagggatcggaggaaagaaggggggcccacaagctatcacagaggtagaaagttcttcctcacccagatactccggactcgtcctcaccccccgcccaggagcagcgagaccgaggtggcggcggagatccagggcaggaaaaggcgggggaagggggcggtgattattctaaatgctcggcccagtgggaggagtgaagcacctctctcaggcacctgagattcgacgggaaggggtggggaggtgtgtgtggtggcaggaagggaggggagcggccagagaaacccagcggccaccgcagggagagaagggaggacagagaggtcagtgcacctggtcgcagcctccaagtttccctagtccgctccccgggagtccgcggctgcacagaactccatggcttcctggcccgccccgcccctgcgctcagcctttgcaaaagcagccgctgctggcgctacgggcgccgcggctgaggctgctgcgagtggtgaggatgctactgccacagctcgccccgccacgggtcgcgcggctgtcgtgtgcccactgaagctgctcccggccgccatgacagcgccgagtgctgccgggcgcggcgtgcgcgtgcgcgagcgcgagtgcgcggggcgggagggcgcgaaggcggaggcagccgcgcggcgggggcgcggtgacgacgcgcggacagccaagggggccccgagccagccggagtgctgggctggggcttccggctgcactaggcgcgctgctctggtagcaccaggtgtgtacccggcccggcgaggagagacccttccgtccgagggcctacactttcccctctcccactctcggacctcgggaggtgcttctgccaagtcctgaggcggggattttggcgctcctgctgttgttaagttaccgtagggtctcttggcgcggagggaacacgcgctgcgttgcctaggtgtctcattggacttggagaagaacacctgaggcacctctacgagccagagaggtgacggcgctggagccagtgaggctgctgtccctgcccaatgggagcgaggagtccccacccctggctgctttcagctgttgcccgcccgccgctctcggcggagacttggagatttccactgggatacctcggcagctgccgccattcgggaggggaggggaggggaccgagtcgacgaggaatgggaaagattccttgctttgcagctgccgcgccacgaaacctctcccacattcattctaggcagaggattcctgagacagctgctataaacagcgtggagacagggttccttgtgcctgtagacctccgaagggttttttcctctcgtgattttccaatgtgaagattaggctcgcgtcattctcagagtagatcaaaagataaattatattaggtagtacagataggtcctcatactcagtgtcccttctttccacccgctattaacagtaaaccattcttcctagtgagtgaaaaataaatttagaggaaggtggtttttcacccacgtgtatcctttgaggtcaaagggcctttttaaaaatacgcctagctcctaaaatgaaagtgaagcaaaaagtgggattaaacaaaggaagaattctagagaacttaggaaaaaattatagtggtttgagaaatagtttcctgaagaaaaagttatttgagatggccttgagaagtggacagaagccgggcgcggtggctcacgcctgtaatcccagcactttgggaggcccaagcagatggattgcctgaggtcaggagttcaagaccagcctgaccaatatggtgaaacccccgtctctactaaaaatacaaaaattagccaggcatggtggtaggcgcctgtaatcccagctactcgggaggctgaggcaggagaattgccactgcactccagcctgggtgacagaggaagagcgagattctgtctcaaaaaaaaaaaaaaaaaaagacaattttaactctcacatggaaatttgggaagaaaaaggtaacagacgcaaaaagcaagggagggctgggtgtagtagctcacacctgtcatcccaacactttaggaggctagtgcaggaggatcacttgagactagcctaggcaacagcaagacccg

SEQ ID NO: 317073 - DNA, 4001 bp, Homo sapiens
ctctaaataaataagttaatgaattaattaaaggtagaattgtataatatatgaattatacctcaatttaaaaacaatttaagccctatacagtgatgcatgcctatagccacaactactcataagactgaagcaggaggatagcttgaacttaggagtttgagaacagcctgggcaacatagagaggcctcatccccctcccacccccacccgaaaaaaagcattcatagctcatcttagtataatcagcaacttccaatgactaactatgctttcctgctagacatgaatttataaaacacataaaaattatactgtatctgcttcaattccttttttcatattgccattcaattttcacaagattactttaaatgcaatcctaaattcatcaccaatttaacttttgttagttatgtctaaaaataaaactagtcaaaattaaaaatactaactttgcagcaaattaatcttgcatcagcactacaaacaaatttttaaacttattgtagcaaaacataacttcgacagaatcaaagacattaattctcaagtccaaaaaaaggtcacaagaaattatttaaagtggtaaagggaaacgcagacttaggcatacaagccaagaaaaaaaaaattagagataactcctccgctagaacctccccccaatacttccatagcaacaattatttccttagcacaaaagtgatgtgttcactttcacaaaacctggatcatctaagtttgcacaattcccttcaatctaaaaaacagatgaaattgtttcatttaggtgagtagaattttgtgtccctatacacgaaaaaagtcaccatcagtgtgagtaaaccacatggctccagctttaagatcttgttccccaacccactgaaaagagtatatgcttataaaatattcatggacttaccaggttaaagacagtttctacaatatccctattggatacttctccaacttcaaccaaaccggtcaacacggcaaatttcattctgatgcccctgatggggagccctggtttcagagacaatgcacccccttcagtaggggtttcttctctccctccacctcccccgtcatcacctgttggtggcggggaagggacacgattgtcttcgctagccattgctagctcacgataaaggacaactcagagtcaccctgggacggcagtcgctgcactggtaatgagcacaacacacgcaatgcaaaacgaaagggtccctcttccaacttgtggagataccccaaagcagttgatgtggaaagtccttggcgtcgccctcctcctcttggagaatatttgtccaatctctctccccgaggctgacaacaacgccaaaccctattggaagattaaatatatgttaaataggctaggttttgttttagggttttgaggggacaagagggaaatagttattgtcggtcaagtaagttactaaaggcaccccactactagccacccgcttctcccgggctcaaaaagctgggttctgggtgaaggcaggtccaagaggcccccgaacaggctcactcctcccccactctcgtgcaggttctaggcgcagggtaacctctcctcacaggtgcactagaaagagaaactgtcgcggggaaaggagggatcggaggaaagaaggggggcccacaagctatcacagaggtagaaagttcttcctcacccagatactccggactcgtcctcaccccccgcccaggagcagcgagaccgaggtggcggcggagatccagggcaggaaaaggcgggggaagggggcggtgattattctaaatgctcggcccagtgggaggagtgaagcacctctctcaggcacctgagattcgacgggaaggggtggggaggtgtgtgtggtggcaggaagggaggggagcggccagagaaacccagcggccaccgcagggagagaagggaggacagagaggtcagtgcacctggtcgcagcctccaagtttccctagtccgctccccgggagtccgcggctgcacagaactccatggcttcctggcccgccccgcccctgcgctcagcctttgcaaaagcagccgctgctggcgctacgggcgccgcggctgaggctgctgcgagtggtgaggatgctactgccacagctcgccccgccacgggtcgcgcggctgtcgtgtgcccactgaagctgctcccggccgccatgacagcgccgagtgctgccgggcgcggcgtgcgcgtgcgcgagcgcgagtgcgcggggcgggagggcgcgaaggcggaggcagccgcgcggcgggggcgcggtgacgacgcgcggacagccaagggggccccgagccagccggagtgctgggctggggcttccggctgcactaggcgcgctgctctggtagcaccaggtgtgtacccggcccggcgaggagagacccttccgtccgagggcctacactttcccctctcccactctcggacctcgggaggtgcttctgccaagtcctgaggcggggattttggcgctcctgctgttgttaagttaccgtagggtctcttggcgcggagggaacacgcgctgcgttgcctaggtgtctcattggacttggagaagaacacctgaggcacctctacgagccagagaggtgacggcgctggagccagtgaggctgctgtccctgcccaatgggagcgaggagtccccacccctggctgctttcagctgttgcccgcccgccgctctcggcggagacttggagatttccactgggatacctcggcagctgccgccattcgggaggggaggggaggggaccgagtcgacgaggaatgggaaagattccttgctttgcagctgccgcgccacgaaacctctcccacattcattctaggcagaggattcctgagacagctgctataaacagcgtggagacagggttccttgtgcctgtagacctccgaagggttttttcctctcgtgattttccaatgtgaagattaggctcgcgtcattctcagagtagatcaaaagataaattatattaggtagtacagataggtcctcatactcagtgtcccttctttccacccgctattaacagtaaaccattcttcctagtgagtgaaaaataaatttagaggaaggtggtttttcacccacgtgtatcctttgaggtcaaagggcctttttaaaaatacgcctagctcctaaaatgaaagtgaagcaaaaagtgggattaaacaaaggaagaattctagagaacttaggaaaaaattatagtggtttgagaaatagtttcctgaagaaaaagttatttgagatggccttgagaagtggacagaagccgggcgcggtggctcacgcctgtaatcccagcactttgggaggcccaagcagatggattgcctgaggtcaggagttcaagaccagcctgaccaatatggtgaaacccccgtctctactaaaaatacaaaaattagccaggcatggtggtaggcgcctgtaatcccagctactcgggaggctgaggcaggagaattgccactgcactccagcctgggtgacagaggaagagcgagattctgtctcaaaaaaaaaaaaaaaaaaagacaattttaactctcacatggaaatttgggaagaaaaaggtaacagacgcaaaaagcaagggagggctgggtgtagtagctcacacctgtcatcccaacactttaggaggctagtgcaggaggatcacttgagactagcctaggcaacagcaagacccgtgctctttttttttttttttttttaaacggagtttcgctcttgttgcccaggctggagtgcaatggcgcaatctcggctcaccttaacctctgcctcccgggctccagcgattctcctgcctcagcctcccaagtagctgggattacaggcatgcgctaattttttttatttttattacaagcccgcctaatttttgtatttttggtagaggtggggtttcaccatgttg

SEQ ID NO: 317074 - DNA, 4001 bp, Homo sapiens
aaataattacaataaaataaccctttagtgaaacatatgacattaaatcagtggatttgaaaaaccagctcataatgtatacacacgtaagcagcataaagctgcaatgtagtggtagtgttatgtcctttctataacttcaggaaaagacctcatggaatctttgaaatcctctagggatatctcttacttttcatctctattttatatcacagatttcagtactactttataccagaatggtagcagtttctactcattaagaaagtattggccgggtgcggtggctcacgcctgtaatcccagcactttgggaggccgaggtgcgtggattacctgaggtcaggagtttgagaccagcctggccaacatgatgaaaccccatctctactaaaaatacaaaaactagctgggcatggtggcacacgcctgtaatcccagctccttgggaggctgaggcaggagaattgcttgagcccgggagatggaggttgcagtgagccgagattgtgccactgcactccagcctggctgacaaagtgagactctgtctcaaaataaataaataaataaaataagtatctcagcatgctatcatagaagaaagtctagtttgtacgctaaaagatctagcatctttatgaacttagttactacatcaacacaattatatgatctaggacaagtcatttggtctccatacagtttagtttcttcacttataaactgacaaggggttgaactagattatttcttgccaggcctaatattctataatttttataaaatccatcaataatggggtcaccacaaagaaggaaacatttctgtgatagtttctcaaaagtaccctggcctgatccttcactgctacacgtccctggacaagtaggtctttaacttgctacattctcttcattgtctttaaccacccagtgaatatctcaaaaaataccaagaattggttaactaaagtttatacaataacaagataagcttttcacaaatatgtcttatttattattatttatttgtttaaagttataagacataaattgggcaactcttttaacaaattattttatctgagacaccgtttacttcaaccaagtcacaaataacctgattttgttattaaataacctctcaaaaaaaaaattcaagttctactgtgtttagctagcaagagttctgttttgcatttaacatatctaaaaggcctcatgcacaatataagtaaataactcttctcactacacaagtagatgctaaagcaacctagagattgaataacttctgtgagatcctgcagtgtctgaaacagacagtatctttttcaatcttctttattttgtaaattccatcagcttaaaatgaaaaattctaactattaacctctctaacttcactcttgagatctttctttctgccattcaattggcatgaatagttctcaaaggaagtggagagccatgaaagcaaaggatctgagcatgtcacgcagctcctgttcagcctgccctcttagcctttctataatcaagggcttagctggccatgcacctttaaatcgtttgatctcaagcaacaatttgtgaacatgagcataataaaaattttggaacatagaatgtgtttagaaatttccaataccttgagaggcctttgagagttaaactgctcaaaacgaaaacagtgaaggagtaggtgaccagtgttaaaacaattaagttaaagcttatggacactaaacattctcttctgtgatttctgatccccaaacatttgctttcaaaagtaggctttcttgtttgggtcctttttgtcaaaataatgagaacacttagtaacaagcagaggagcataccttgatcctgagccgtcatttctgccgtgataatcacaggtgcactgtgaaggacacaaacagcccactccttccaaaaagctaaggacaatgcacagacatgcaaagagatgcattgctccttttagaggttatttaaacaaaaggtaaaaaccgaatcctaagcattcagaacctggtatgcctggaatacaaacagccatttagtaacagcagattacacgggattagctgagatctgtagttacttaaccttcaagtgtatcttgcaggagatcaattgatccagcctttgaatacagtttcagcaaagtaacacattctaaggaaaatgaaaatcaaacacatgacaagcaatttcaatagttacccgtaactagatttgcaagaaaatgcctattaaatccctttcttctggatgtacttgccactacaccttaaaaatatacttaatgtaaaataattcagtcttggcagatgcaagaaaattctgtagattatttacatgttacaacattataaaatgttttgcatttggtttttgccagaatgtgttactaattcagttttacaaaatttagttttaaaaatagaagcacatgacataaaaatgatttagaaaagagttatcgatgttgccacatactggctatctctaaaagtaaagtaaaacaagtcagttacacagattttatagggaaaatgcttcaatccactactgatgtggcaggactaagttctccaataagaacgtgttctgagactcttccaggtcatctcagtgtgtggaaggtttatcccagcacatttatttttaatgcaggcaactatctctgttcaatagtttcccaagttatcagcatcaaagccatatttgaagatcaactctaattctttcagctatattaggctctgtcagaaaataaaaattaaatgtaattaaatttaaaagtatctccacactcatagagtggagaatccacagggacaatcaaggatttaagtaataaatatacgtcatttaaccttcttagtggctgcttctaaccatcctctttaactaaaaacctttttaaaagaaaattaattctataaaaataagcatattatagaaaatgttatttaaaaccaatagaatgtatataaaaaccatacagtctgaaaaactgtgctcaattaaaataaaatactgcaggttttcagattctgcacaactcgtttgttcatcaaatatttactgagtacttattctctgctgagcattgaggggtacaaagataaataagacagttattacacataaggaactcacacgataaagggaggaacagactactaaagaagcacgagaaaagagcatcaaacccagcctgtgttagtcaagcaagacttcctagggtgggtggtgcctggctgccttttacagggtgcatgacgatgtattatgggaaaatccagaaagttgcattgcaagcaaagggaatagtgggaacaaagggagggaagtgagaaacagtgtattgtcctcagagaatttcaagcacttcttgttgctcaggcataagattttgaggcaggaagttaaaaaagataaagctggagagataagcggggatgaagttatcaaggaaacccttagattccctatggagagcttactctcagcctacaggcaatgggagcaataaaagttaggcttgggagtggcatatcagcttatcctttcaggaagaattctctggcggctgtgtggagaaaaggtttagacagagcaagcaagaagaaaggaggaagcttctagatagagcaagcaagaagaaaggaggaggcttcaggtggatgtctgtggttatagtccaggtgagcagccattaggctacagccttgactgctgtgctagtaatcgttaggataatgcagcttcaggaaacacccaggagagagaaatgattgattagacgtaaggatgaagaagggatttaaaaacaaccctaaggtttcccagtgctggagatgcagtgagaggtggtggcctcgagtttttgagcacaagaggaaaaagaaattggatgggtaaagctctgatcgccaagtgaccaagggtttttgaatcattaatttcatggatgttatg

SEQ ID NO: 317075 - DNA, 4001 bp, Homo sapiens
caaattagcatgggtgtaatctgattttaaaaaggtaaggaattccatcaaccacacaatatgaattttctctcttgaagtaatgaatcatataaaatccatctaacactgttgacattcttgctttctagtgctcattcctacaactggcctccttagctcaaggaagaaatattacctgaaaaaacgtcatggtcacaggccctaacactgtgccttgtgtaataaagcaatactggccgggcgcggtggctcacgcctgtaaatctcagcactctgggaggccgaggcgggtggatcacctgagtttgggagttcaagactagcctgaccaacatggagaaaccccgtctctactaaaaatgcaaaattagcagggcgtggtggtgcatgcctataatcccagctactcgggagactcaggcaggagaatagcttgaccccaggaggcggaggctgcggtgagccaagattgcatcactgcactcaagcctgggcaacaagagcgaaactccatctcaaaacaacaacaacaacaacaaacaatacttgttgattggtttcacactaaccctgctcatggccaagtagagccctaacagtgcagggctgggtataagtctatgcattggtttgtcttcaatgggcaaagctctctggagaggtgagttaaattcttaatttgagccttaatgagagttcctctaaccaaatgagcaacccatccctaatataacatttttaagactttagggaagataaggtatttaaataataattgcaagtcaagcctggcattgttctctttaacaaacgtgacatctgctttctgttttctagaagcatgtccttaagtcctgagagtaaaatcaagacctaactatctgtgagacctcactgacgatttgctaccagataaatgagcaatttcacagattcttgcgggaaaactcaaaaggactaatgattaaccacttccttgaaatcaataaaacacattatttcttgtctcgtttgctctagcatgcaaaatgaactgttaaagtgttttccaagggaagcttaaatatcaggatttgtaccagtcttttcctttttccactggaaaaatttttggtttttagcagcatactgagatacagaggcataaaaggggttcttgggcaacttttcactggtcaacttcatcctttttctgcaatgtgtattctataagcaagaagaaaaaataagtggtagaaatttcttcctccagcgaagtgcaaagagagactctattcccaccaggtgctcattaggaaaagcatccttctctcatcgcctagatagaacaccaaccaccaactccaggacgtgaacattctttactaggacaccaagaccctcctccctagctgagagacagccattctccatgtcattttccacagcatcgcattcaccatgagacctgtttgcacgtcctgtctggctatgggtttatacatcaagatgggtcaagtcacccagcacaagtgttgccacttagtgggacctggtgacactgcccacagtcagagctcttctgcactggtaccttctctgcccttgtaactgacactcatcggacgaatccatttcaaattaaagcacttgtctattttacctgggaatacactttattttagctgttgttgagttttatcttcctgtctgtattggattgccatgttataagatggatcacagttgaatggtaaatcagtgtcttcatataaaatgtagcggtcacctcatttggggtgaaggagtccaggttggcctaggctgagggtagtgagacagcaaactcagttgttgctacacttttgtatttactccttggcattccactgttatggcttactttcaccaatcagaaacaagcttccagcaaaggttcctgattggtggtcaagagaagaaatagagagacccttagtgtgattggaaagctgcatttttatatcattccatgatgctattttagacaataaattgcttaagtgagaatgaagtgcagaaaaaaggaacatttagtaggggaaaaaaatcactgaattatctttgtgattttggaagagtcatttaatctttttaagagtcaatttcctcatctttaagttggactataagtggtctgcattaaaggattttataatgttcctttttagatatatacaattcttgattatatgattccccaaatcttatggttgcctttagtgaatatgaaatttcccaatgagctttacttagggtgaagcaatattaggtaaggtattaagaagaaaaacaatccctatcggatggtgcagatagcactcatttatgactgaaagattggatgtggaagttttattttcattgaagacattaactcaatatgctacttatccaaaaaggctaagaaaaaactggcatattcaggaagggcatcagaaatgaaacaaatcagaaaacaataccttactttgtttaaaactcatgttgccttttgtggttagaagactgcacatggtttttgctgctgtagcttaaaagaagttttggagatgtttggaaaactaaatcaaagatttactgagctcttattaaatgccaagtattgacctttgttgtaaggctttctaggcagcgccgacaaaactttacgaaataaggttcattatgaggctcgtttaacgtatggggaaaccaagggacagtggggaagttaagtaacttgcccaaggccacagggctagttaaggacaggtaagcagaacagctggcgtgtcccagcacctgcgcacttctctctctctctctctctctctgagacagcgtctcactctgtcatccaggctagaagagtgcattggtacaatcatagctctcaactgcagcctcaacctcttgggctcaggtgatccacccacctcagcctcccaagtacttgggactacaggcatatgccatgacatccagctaattccttaaaatttttgtagagatggggtctccatgttatgcaggctggtctcaagttcctgggctccagcaatcctcctgtctcagcttcccagtgtgctgcggttaccgcagtgagtcaccgtgtccaggcaatacaataaatattgcctttttgatggatttactgggtatttattggattgactagatatttattatgttttgggaatttttagcttcctgtcttggattggcgtcttttattagctcccaaacattctcagggataatttatttgtgtttgttagtttcctggggccgctaaaacaaaatatcaaaaactttgtggcttaaaagaacagaaatttcctctctcacagttccggagcctagaagtccaaaatcaaggtgttggcagggccatgcttcctctggccctagggaaaaatcatcctaagcattccccaccagcttctggtggtttctggtgatgtctggtgttcctaggcttgtagttgcacaactcaacctctgcctctgtgtttacatggccttcccttcatgtctcctctatctctgtgtgtcctctcctccctcttatgaggacaccagtcattggagttggcacccaccctaatccaacatgacttcctcttaacttgattacatgtaaaatatcctatttccaaagaggttcacattcacaggtttcaggagttagcactcagatatatctttggttggaaacacaagtcaacccaccatgctcttcagaggccccaatctatttcatttttctctccagcattttgataagaccttctcctcatgtctcttaaatttgcctttcagattttccatcgttttttttctctctgacacactctgggtaatctcttcagtaatctctccctttttattaattctctctttagccacatctagtctgccattaaagcaatccatttaaaaactgtttactgaagtaaatgaaagatacagaaatgtatatgtaagtttacagcttg

SEQ ID NO: 317076 - DNA, 4001 bp, Homo sapiens
aggacttaaagggaccagaaagatcatctagtccaaggctcagtccaaagtggaggtgagcagctcgccctaccatggtgcccagtgaacctcagggaggtttaggagacatgacccaacccaagactgaaactggtcaggcgagcacccagcaccgggggacagtgcaggggcagcccgagggtagctggaccagtgcaggggcagcctgagggcaggtgtattgctgcaggaggcctgggctgacaaagacagaggaccagctggaggtggctggaggtaaggtggagcgcaccagggcggccctgcagagcaggtggaagacttgggccagcacccaaaagggagccgctggggttcctgggtccgagtgcacttcctcagcgccacctccaatcggtcagggagtctatttcgggctccccattcctcatggggaggggggactccacccactcaacagatgcccagtgcagtgggcacggggaggcagcactgcatcccggctgctcctggtcacacctgttccctgctgctgggaggccatcaacacatccaaacccagccgtgtccccagcccctccagaatcccttcctccaagaagccgccctgccgctccagcccagagcgttctcccacctcccacctccgcaggctgaacattacgcctggggcttgactgctggtcccaggagcagttcaggaagggcctgtggagctgatgcccaggcgtcaatccccatccccacgcagtcttataaccgtctgtcgtctgtctgtcccccacctgtttctcctctcccttttcgttccaaaagttccttcttattctgcaaatcacttactttccctctcaaagactcaggaatgcttaaaactggactattgagacagagatctaatctgactcctgcatttgagatgagataatgaggcccagatggtcggcatagttcgaaaacacccatttcaggtgttttcaggaacacctaacaaatgaagcaaccgtatcttaatgaagagagcagctggcccagggtcacgcaccaattaggaagctgttgtcccggggggccccaccggccgagccaccttgggggtgccctttcccctcggggcctccgtaccctcatctctcaaatgaaggagaggtcaggtgagcgccctgttaagactgactttcagcattcccaaggtcgcgttttatgtgctctaaaccgatcccatctcctcacctcctcatttctcgctcaaatgaacaagcacgggcttgctactgggattccttctgtccctggacacgtctttctacccaacattttgtttttcttgtttccccacatagggagataaggttgagggaacaggcaaaggctcgggaggcaggagacctgtgatctagcctggttctgtccctacgctcgggtcagcaggccgcccaggctggggagggcgacactgaccctcggggtgccggccgccacctgcttcacacggcgtcgtcgccggcacgggtacctttcctgctgcagaaggggtcggggcgccccacctgacacttgggggaggctgtgccaaggacagggcgcgtagggcacaggtgccccggctgcgcccccctccgcctccgacccctgggccccgctccaacgaccccaaccacggcccccgcccccaggccccgctccaccgaccgcgggccgcgctcactcgctgggccttctcccacagctggttcaacttctccatgcggaactcctctccggactcgcgtttcggggacggcttgggctggttcttctcccgcgagtacttgccgccgtggctcgcagcgggccagggcccgaggaagagcagcagcagtagcagcgccgggagcccgcgcagaaacgacctgaccctccgcggcgccatcttcctctgcgactggcgctgcgcggagaaaacctagcctgccgatgccccgcccactaccccgcccccacccaccgcgcggtctcctgggaattgtagttcctccgtgagcggccggcagcggcgaggccgccggcggactccagcgcctaggaagccctgcgcaggcgcaagcgtttcccaggcaaccacgccgcggcccgaggctgcagactctggcaggggatacaactggagaatgagggtggccgggtgggagcagggatcaggcctcacccagagcccggagcctggagcccgcacgactcgaggcctctttccctctctgccccacagaaagagcggaaagcccaagaaccgggccgcgtttggctgagcctgataatgctccggcttcacgcgcactgacgccgactcttgcatgtccagtgccgttgcggggttggcactgcggcccgggcctggcgctgaggagcctggcccagcccgcttctgccctccgcggagcgcctggccgtgggtaagcccaggccaggttgtcccggggacgcagggccgcgcagacgtccccctacgtcccggggcccctgccccaacccgcgtcccaagcgcctgctctcgcgcctgctgcaaggcaggacttcgcgcgcttttccccaacccatgacactctaggaaattcacagagccaaagttagcatagaccgctcgttgggggcttggccagtgagttgggaagtgccctggaggtagcgcgggaaacaaggggaaggagggagacagacagcagctgggcccctttgggctcagagaagggacaaggggagctcatctggcaagaatgatctgaaaaggcctccaagggtgggcgggattttgcggggggagggaggaatttccaactggagggacaatgacaaagggggtgaatagagcctgggcatcttgagaggaattaatgttaattcatttcctttttttgcgtggggggatagggtctctgtcatcgaggctggagtgcagtggcatgatcatggctcactgcagcctcgacctcctgggctaaagcgatcctcctgcctcagcctcccaagtagctggaactataggtgcgtgtcaccacgcccagctaatttttgaaattttttggtagaaattaggtctccctatgttgtccaggctgttctccaactcctgggctcaagcaaccctcccgtcttggtcccccaaagtgctgggattacaggcgtgggccactgggcctaccctaatttacatttaaattgtatcttgtgttgttccagagaagatttcaggtccctggaatcaaggtgatctgcttctgtcctgtgctgcttttctagtattttcagagccatcgtttcatttctttttttccagctgttgagttgtttcaggcaagagggtaaattcagtctgttactgcatcttagctggaagcacaagttcccaatatgggatgtatgggggagaggaggtaaaggaatcccccaggagggtggtggagggagaatgacctcatgcgaagtgactccagagacagatcaaatgctgtcattgccatcattgcatgtttttaagcctcaggacagaatggccaggtgagcctggcctagattctcacctgtgcctgccttccccttgtgttccctcgttcctgctcttctctccatctcctggtgcctagaatcagaggtcacctgttttaccccacatacatgttttgccctgaccccactcctgagagctacaggtaggtcttggtgggcttagaaggggatagtccaaattggcctatcccccccaagcatgtccctgttggtcatctggaatgtggtcctaactgcaaatgttccagctctgtgaatcctgcccccagtgtctctagaaaggcccgttataaacccacaggaattggaagctggactgggagcagagtcttctgggatcctgcatctgacagtggtgtggggttctaagagcccttttcctatacagcccggtttcccagataactaagcaatattttattcgtggctgcatacacaggcaatgaaactaaaga

SEQ ID NO: 317077 - DNA, 4001 bp, Homo sapiens
ggttatatctctagtacacttgagtttgtggattgagatcacatctaccataccagttaaaaatttttgttatattatatggatatatgtagctataatgacgtccatcaaaaaacaaaacctggaaataacctagtgcttgattaaaccaattatgatatacgcatatataaaaaccaactatttgaaatatttgtgagattgcttaattatataaagttattaaaatattctatgatatgaaaatacaaattagaaatatggacagtatgatccaattttgaaagaaaaaggtacaaataggcataaataataaacttgaagaacatatataacatgaatgactttaatttttccctttaaatttttcttcagttgttaaatgttctataagtaacaggtattcttcttgtaataaaaataatacaataaaaataaaataaaatgcaattcatttacactgaaaatatgacatactacttttatggagaaggtcagggagataagacgcccacccttctcaaacaattctgctgacatggtgactgtaataattcctatacctgctaggctattattgccaaaatgatgcttaaagcaaagctggagaaagagcatgaagataaaaacatgaaatgtcagaactggataataagaaaaactaaatatgcacaatttggaatggagaaagagaacaataaccttatacatttttttgaataatgtcttatataaaggaggtgcttagcaaagagtgaacaagcctgaaaacaaacaaggaaaggaaattaattgtctagcactctggaatataaaaagggcaaaggaagttttgctttatgaacttgatatattttccaaagaaaacattggtgtatccgttaaggaactccaacatatagactattgaatgtcagatgagaatttatgataattggaggctatctggagtaccctgttagaaactaggataaggaattctgattttgacttgataatcagaaggtttacataccaatatataatattaggatacttctgctgtaagtttggaggacaactagatagactgaggcaaaatgtactcaaagaagaaaaatattataatatggcaacatttaatttgaattgtattacatattaaatgtatttgaactagttattgctcagtgcttttctatattaactaatacatgataattaaagtaggtaacttacaatcactcattattatttagcacttaaatacttcctagtgtctcgataaccgcacataacattaatgtcagatatactaatgggagactaaatttcattagctgtaaattccacacactataacttccaatgccactaagaaacattattatatgtgctctgatcaaattgctttactttcagctgtcccttgaacctgaaaacaaatgtggaattcttatgaacatgaaacaactccacgtaagcattgtttctctgcctagttaaaattgtactcacccttgggagtgtcactgagtttatttctttgaagaatgagcaccttcagcaatggaaacctgtttctgaagctgcttctgtggcgtttcacccatgaggacttaggactgagtagatccaatgagagggagtggatggcattgttgctgaggtttaacacttccaaagcatgtaaatatgcaaaagggcttaaggttatttttgatatgagattgttactgaggtccagatgttttattttccactcttcttttttcgtgtgagactgtaagagaactctaaagaaattgaaacttacatccacagtggctgctgtctgtgatatgtccacaggtatatcacactttccggtaaaagaacaatttgtcagaatatattcattccattggcattcagaattgaataaaatattgctttttcttgatgcatttgtcattattccagtaaaataaagacctataactatggtaatgactctgaaatagaggtttttcataatgcctggaaaaaggaaaatgaattgacttattcacaataatatataaaaactaacagcaataagcagcaaatttaattttcaatttaagatttcggaaagttatcttgtcttggttgccaatttaagcgaatgtttgatttcttactggggcatgaaaatgtagctaccaaaatgaaatagccatagtataaaattacatttatgtcacattttaaagaaaggactcccctgatttttcagaaaatacatattcagttaggcctcacctctgcatctgcttttccagtagttttcactccacagtgtgctttgggatgaatgaaaccttaccaagattaaagacttccctgtttctttgcaggccattaatacagagcaaagtctattatgcttatctacaacatagtaatcaaccatgtagtttattacataaatgacaaccagttacactaaaccgtgaccctccataactctatgagtaaaaagtttaactcacaaaagaggctcttacttttcatgactagaagaaatacaagttttgctgtgtggcttgtgtgacttttcaaatcattatgaaatcatttagatacatacaacataatgtgttatcaaatacatgttctggctccaagccatgaagatgtaatacgatacagaaacattgagtatcttttgtaccaaacatttttgagaaaaaattcaaagtttttaaaaagaagtgtgtacaaattacaatggctgaatgtatcacaaaaataagtttaaaaatgggtaatttttgtgatttgttttaaactaaattccacttaaaagccactgtgtgtacaaataatcacattattgagtatatgagtttccaagaaattgtcccttcctttctgttctaatggcactcagtttagttttcatcactgcagtctgaaatactaaaatggcttaactgactttcttgcctctgcctcttgactttccttctttgtgatccatcctaggtgactccaaaggattattttcctacaataacgtatttcctatattattccttcatttgaaatcctcaaagggctccttattgcctatagtccaaatccctcaggttggtattcaaagcctgtgttatctaggtaaacttaatgacctagcttgataagttcatgtggagccactacaagatgtggcttctgcaaagaatgatctatgcatatcgcatactgaaattcactttcagttcattcccagttccaagttcaatgccttttcctcttagccacagtcttaagatggagtttcgctcttgttacccaggctggagtgcaagagcgccatgtcagctcaccacaacctccgcctcccgggttcaagcaattctcctgcctcagcctcccgagtagctgggattacaggcatgtgccactacaactcactaatttgtatttttagtagagatgaggtttctccatgttggtcaggctggtctcgaactcctgacctcaggtgacccgcccaccttggcctcccaaagtgctgggattacaggcgtgagccaccacacccggccagccacagtcttgtgtatccttccagattcatctcacatcttatggcctggtcatttttcctgctttagcctccaaatttgtctttattcttacagaaatctttcagtaaacactgaaggaattgatacacattagtaacattcagcgttgctattgttttgctttgtatctgttctgaactcccaaaaaaaaaaggaacattatctatctatctatctatccaatgttttacatttttaatagtctgcagtctgtcactgggttatgttgtttgtgtgtaaatgaatgcatggagtgaagtgaatgaaatttacaatgtaactttaaaacttttgtttcatacaaggtcaatcctcccatattttcaagggcatttaaattcaggtacacatggccatgaacagcaaaggtagcctacagcatggaggagtgatttatttttacag

SEQ ID NO: 317078 - DNA, 4001 bp, Homo sapiens
gacaatctctgctataagccctaaataaaaaaataaataaaaataaataaaaataaaaaaaattgttctttggttttaaagtgaggagttttaaagaaatctccaaggtaccgcaaatgataaccaaaagctacattctaaccaaatgatggagtgtaggttataattaatcaggggtgttttattctaacatatagggaacctgaaaacaactgtcaaaatcttgaaggggttgccattctaaataatggatttctagtcttggccatgaaaatgatcactttccaatttttcagtgttacaggtctctccgatgattaaaatctgttagtacacttttaaaaggagagaataacccaggtgatgtaaacaaatttttaaattctagtatctactatgccacagttcagtgagagactgcctgatacagcacagagtactcacttgggaggcaggaaacctgagttctaatcccagctctgctacttaattagctgtgtgacttggataactcataatttcacttctcatggccccaggttcctcatctgcaatataagggagttatgccagatgaccacttaagtctcttcctgccctaacattcaggtagtctaacgcattaacgccagtgacacacacacacacacacacaccacaaacacaagcctctcaagatttctgcacaatatttaagcaagtaaaattaccaaacatctctaaaacttttttggaaaacactgcagcaatgtgtatgaaggcctaaaacagacctttcagatgacagcatctaatctgataatttcacttctgagaatctagtccaaggaaataatctaaaaaatagggggaaaagagtttatcaaagcactatctgggatgctaagatgatgtaaaaattcaaaaacaatctaatgtcccacaatcgggaaatgactgaataatttacgggacctaaactgggacccacaatgataggacaatcaaaagaagatacaaaattagaataatatttaggaagagtttttaaatggaagtggaaaactacactgttaagtgattaaacatgtacactcttagttcaagtagaagctagcacatacaagagaaaatgatcgtaggtgaaagggttcagtgaatattattttcttcactaaagtcttctatgtttgcaattttctacaatagtcacgtattactaagagcagtggggcagggtaatccgcatcatcttaatcctacacaccttaaaaatgcctgctatgcaggtgtgcggacacgcatacgcacagaaaaccttgggcgataggacttaagaccatacaatcgggttcctcgacctgacaacttggtaagacaggcgagtccagcctttaattcctgtggtcaggcgcagccaccccgatgtaggagagggttcgcaattccctgaagccctcctggaagacaggcgaagcctaggcctgggttcgggatccgctttcccgccgaatcttgggattagcgtcggggctccctggggaacttcaacaacctgaattgatctcggacgccaactcggtaggagccgggacggtgccgctcctctccgcgcagtctaggcgcctcgctgagggcggtcccggcgcccaccatcagacctctcccagccattccatgcgcggagagcttggacgcggcatttcgcggggacccgccacccagcggtcccttcccggagccccagcctgttcaccgcaggccctttccggggctgcctcgcccggcctagggccgctgcagccgccgctccacagcgcgactgaacactggggcaccgaacctggggctgcgcccggccccgtcgtcggcccgcgcagcggtgcggctcacctcgccggcgggaaccagaaccctcactccaggcgccccacgagcccggccgccgcggatgatcccagccaaaaccgaaagcgccgaggcaggggcacttttctgcctcagccaatcagtgctcttctctgctacggcagcccgctggggccgaaaaagcctgtcagcaccaaagcgcgcaaatccaagattcctggtttgtctagtagcaaaattggtgcagtggagttcctctaacagaaatctgagtacaaaacaaatacaatacaaaacaaaaacaaaattccaggaaactagaagtgatcttttgggcaggatttatttacagaagtgtaaaaaataacttgaagtcataggaaactggaatttactgtttaagtaacggcattgtgtacccagaaacgtccttgaatagtttaaagcaaataaataaataaatgaaacacctcaagtctttaaatctacctctggatattgattaaatgtgtgaagacttaagccattttagcaagagactgtttccatggcaatgttaattgatacaaaaataatcaaaatcactcaagtaactccaaattataatgacattaattgtgttacattactagttcctattggaaatggtgtgcagacttatttcagtgctactatgggaacttggtttggaattttgcatgaattctcaatactctttctattaatggaattgaaagggaaaaagaagagaactgttacaccaggacttgattcgtttttccccctccacatatactctcatcagttgaaaacttatactttaattatatttatgatttgtaacactatacacagagtgataagatctttcaacacagatccttaaccccattaggtgttataaaatctaagatgcaaaatttttttcgaagataaagagttcctcccttgtaaacttcttttggttaaaggcagaagaaatgaacttttgattgatatcagggacagaaaacaactggatatgatttgttaaagaatagagacttccttatatccttctataaaagttcagtttggataaagaccgaacagttactgatttattgtgagggctgtatttgaagttcttgcaatataaaatacaatgtaaataaaaattttaagaaaagtaccatttaaatcaaataattacgtgcaaagaacaaacataataggataaaaagccctgttcctaaaaactttctttgcaaacgacatcaaattgcacattccttactgattgtttaaattattaaaaaaaaaaagaaaatttttgattcaaacttctttccctttcctacagagccctaatcgagccgttaacactagtgtggtgggtagggagccatgaggagttttaagggcctagttcatctgctgagcagctgcaaccttctctaaggggagtagctgggtaagggcccagtttgacacacggggtgggcatcctgaattaattcatgagctaacaagcttataaaaagtgtggctgttcccaaaagcccctcagcagcttataaatgacttttactaactcacaaggcaattttccgtatttcccaggtttttgctttcagcatcttttatgatgcaaagaaaacactgcaagacttttggtgaatactagtcttcaaaaccctgaatgtaaacattaatttattaaggagccttaaagtcataaaaatattttggcaagctttagtttaacttatgtagtttagtttcatttagttgttaggactgatgaacctacactgacacatcattatcatccaaaggccaaagtttacattagggttcactcttggtgttgcacattctataggttttgacaaatgcataatgaaatgtacccacaattacagtatcatacagaatagtttcactgccctaaaaattctctgtgctccacctatttatcccttcctccccactggcaaccgctgatcttttttctgtctccaaagttttgcctttttccacaatatcatatatttggaatcataccgtacacagttagtggtgcatacactgcaccaccccactgtgtagcctgttcagactggcttctttcacttagaaatatgcatttaagacccctctgcgccttttca

SEQ ID NO: 317079 - DNA, 4001 bp, Homo sapiens
gactcaggtgtagaggatctgagctggagcctacatctgctaatgtcaaaaaagtcattaaaaactaaatgacctcaaagcaccttaacttcccagaatctgtttatctgtaaaatggatctaatacctaactcaaagcattgggtggaaagttaaataagacaccagatatgaaagcttcatccctgcccaattgtagaaaggtttctctgtgacctactaatttgcacatcaatgctattatacccagccccctcctaaacccatgctcctttaaatatgaccatcaacccacccatttatgttcataaattcactccaaccttctctggctcctcaccccatggctgcctactttaccaagttccctgataacatgcccttaggtttggttctgagattggaatgattttttttaaatcttcttccctctatatttttgtattacttattcaattttttttctttttttttttttttttgagacggagtctcattctgttgcccaggctggagtacaatggcgcaatctcggctcactgcagcctttgcctcccaggttcaagtgattctccggcctcagcctccccagtagctgggattacaggcacatgccaccatgcccggctaatttttgtatttttagtagagacggagtttcaccatgttggccaggctggttgtgaactcttgacctcaggtgatccaccctcctcggcctcccaaagtgctcggatgacaggcacgggccactgcgcttggccttgactattcttaaaatattcttgcatgcacatgcagacactgacctacacatcattaccaccactaccactcaaacagcccacctgaggggcctagctggcaaccccaggatatcccccactgaacactgtgaccctgagcatgccactgcctctataaacttcaagttatctcatctgtgaaacaagaagtcaggccaacttgacaagactcaagccccttccacgggtagcattctgagaaaccatgggtatggtgcaagagaaggacagacaaacatactctgtccaccatcctgcctaaacctttgtgtatgaggctgacaagggttacaatgggtgacattcacaaggagagaatctctcccttgttccttgcaaaagccctgggaagtaggtgcacctatctccactaaacagatgagcaaactgaggcacagaagccatttctctctgcctcctaccccacccacggcatcaccagcactgttttaaacaccatcccttcactcgagtaactaccatgtgtcaggcactatgctagaccctgggagcctcgggcacagtgtgagtaagtcccaagtgggccctctctgctagaaatcagggttgcaaatacagaccccacctcatcctcctccctctctcctcagaggtaggtgcttcagagaatcctaacattcatggagcacccaagccctctcataggaggttaacacatttctactcatgtaatcctcatcacagttctccgagttagattctatatgttatgacagatgaggaaagtgaggcgcaaagaggttaaaaaacttacaccaggtcatcccacatccaggtagtggcaacccagattcacacgcagtagttattctgatcctaagtatgtgctctggaccgctacatcctaaggcctcctctttagggactgatctcccaaggctcagagaagagccctgtctccaacatgcagcaagcctgaagcccagtcgggcggtgaccaatcgtcctggtttggccaggcccgagggagttcccaggacgccggaccttaagttttaaaactaaaacgagttggtcaccctaagtccaggactcctgccacttccccagagcaggagtgagatctgaatggaactccttcctccatgcgtaacccagaggggctgacggtggaaatcccgtccctcccctactcactctctgagccccagcctcccaggtcggacctctgggccaccacccctcacctctcagccagcgcccgccaacggtttcaaccggccgcggggagcacgtggactcgccgccgccagcccagcgccgcagctacctgcctctcaggcttcgcggtgcagaattcgcttctgaaccacccagcgcgcctgcgcaccgcggccacgccccccccagtggaagtgacgccaacggaagcaggaaggcggttccggcaagccaagggggcgttgtcgtgatgattccgcggccagcggatcgctgcgagtggccttgaaggcagctgctgcaggtgaagagtaggcggcggggcagagagcggcctccgagggtaaggtggccggccttgcgaaggcgtgcggggctggcgctggtgggaatggcccggaagggaagggaggccgggcgcccgaaggtggcccagaagggcatggacccaccgctccttcccgtctctgggcactcgaggatacccggggggttggcggctcctgcgagagtcagcgagcatttgctctgtgccgggcatcacaggggacgcggactgagacccagacggccaggttccgggcctgggagccgggccttctccctggtgcagcttcctcggcctggaaaccccacccgcgccctctcatctccaggctttgcccgctggaagccagcccggcccgcctccgctacgcgctgcccatctctcggcttctgtttccttccacgctgtagttgagagtagcgcttaagacgacagagcccacagcctagctcagtttcattacggtgtggcctctttgtgcctcagccccgcatctgtaaagcgaatgtcatagcggcacctgcgtccctggaaccttgtcgtatttcatgagttggtgcatgtaaatcgcttagactagtggctgccacttagtaagtactcaataaacgttagctcttctcagcccttaaaacagggtctggcacacagtggtggtcactaggtgtttgttgcttaaatgaatgaatgaaagttgagtggaggatgcacagagtattgtgagaaaccttcactcccaaggtgtgtgtatatgggtgataaggtttcactctgaaagtgagcagtgttgggcctggaatagaaggtgtattagtttgctaggactgcaaacaaaatactgggtggcttaaacaacagaaatttattattttctcacagttctggaggttagaagtccaagatcaaggtgtcttcaggtttggtttcttctgagacatttctccttggcttgcacgtggctgctttcttgctgtgtcctcgcatggtctttcctctgtgttttcacatctctggcgtctctctttgcatccagatttcctctttatgagaacgtcagtcaggttgtattagggcccaccttaatggcctcattttaacttaattaccttcttacaagcctgatctccaaatacaatcacattctggagtgctgggggaacagtttaaccataacagaaggaattcacagaaatggacaaggagggaaatactttccaacagaagtgacagaatggccaggaggcttaaaagcagggtgctcaagatgttttttgtgttcagggcacatatgtgtacttcagtcttgtttgtgctctcgtactgtttttgggtttggttgttgttgtttgtttgtttgtcctcctgaatactcaaagaaagtgagccctctcatttttttagtctggcaaacttaactcacatttcagcatagatgtgtcttccaggaagttttccctgaccctccctcccaaattaatttctgcttcctccatttaataactttggtacagggctgggtgcggtggctcacgcctgtaatcccagcgctttgggaggccgaggcaggcagctcctgaggtcaagagatagagaccagcctggccaacatggtgaaaccctgtaaaccccatctctactaagagtaccaaaattaggcgggtgtggtggcgcatgcctgtaatccc

SEQ ID NO: 317080 - DNA, 4001 bp, Homo sapiens
aaagttaaataagacaccagatatgaaagcttcatccctgcccaattgtagaaaggtttctctgtgacctactaatttgcacatcaatgctattatacccagccccctcctaaacccatgctcctttaaatatgaccatcaacccacccatttatgttcataaattcactccaaccttctctggctcctcaccccatggctgcctactttaccaagttccctgataacatgcccttaggtttggttctgagattggaatgattttttttaaatcttcttccctctatatttttgtattacttattcaattttttttctttttttttttttttttgagacggagtctcattctgttgcccaggctggagtacaatggcgcaatctcggctcactgcagcctttgcctcccaggttcaagtgattctccggcctcagcctccccagtagctgggattacaggcacatgccaccatgcccggctaatttttgtatttttagtagagacggagtttcaccatgttggccaggctggttgtgaactcttgacctcaggtgatccaccctcctcggcctcccaaagtgctcggatgacaggcacgggccactgcgcttggccttgactattcttaaaatattcttgcatgcacatgcagacactgacctacacatcattaccaccactaccactcaaacagcccacctgaggggcctagctggcaaccccaggatatcccccactgaacactgtgaccctgagcatgccactgcctctataaacttcaagttatctcatctgtgaaacaagaagtcaggccaacttgacaagactcaagccccttccacgggtagcattctgagaaaccatgggtatggtgcaagagaaggacagacaaacatactctgtccaccatcctgcctaaacctttgtgtatgaggctgacaagggttacaatgggtgacattcacaaggagagaatctctcccttgttccttgcaaaagccctgggaagtaggtgcacctatctccactaaacagatgagcaaactgaggcacagaagccatttctctctgcctcctaccccacccacggcatcaccagcactgttttaaacaccatcccttcactcgagtaactaccatgtgtcaggcactatgctagaccctgggagcctcgggcacagtgtgagtaagtcccaagtgggccctctctgctagaaatcagggttgcaaatacagaccccacctcatcctcctccctctctcctcagaggtaggtgcttcagagaatcctaacattcatggagcacccaagccctctcataggaggttaacacatttctactcatgtaatcctcatcacagttctccgagttagattctatatgttatgacagatgaggaaagtgaggcgcaaagaggttaaaaaacttacaccaggtcatcccacatccaggtagtggcaacccagattcacacgcagtagttattctgatcctaagtatgtgctctggaccgctacatcctaaggcctcctctttagggactgatctcccaaggctcagagaagagccctgtctccaacatgcagcaagcctgaagcccagtcgggcggtgaccaatcgtcctggtttggccaggcccgagggagttcccaggacgccggaccttaagttttaaaactaaaacgagttggtcaccctaagtccaggactcctgccacttccccagagcaggagtgagatctgaatggaactccttcctccatgcgtaacccagaggggctgacggtggaaatcccgtccctcccctactcactctctgagccccagcctcccaggtcggacctctgggccaccacccctcacctctcagccagcgcccgccaacggtttcaaccggccgcggggagcacgtggactcgccgccgccagcccagcgccgcagctacctgcctctcaggcttcgcggtgcagaattcgcttctgaaccacccagcgcgcctgcgcaccgcggccacgccccccccagtggaagtgacgccaacggaagcaggaaggcggttccggcaagccaagggggcgttgtcgtgatgattccgcggccagcggatcgctgcgagtggccttgaaggcagctgctgcaggtgaagagtaggcggcggggcagagagcggcctccgagggtaaggtggccggccttgcgaaggcgtgcggggctggcgctggtgggaatggcccggaagggaagggaggccgggcgcccgaaggtggcccagaagggcatggacccaccgctccttcccgtctctgggcactcgaggatacccggggggttggcggctcctgcgagagtcagcgagcatttgctctgtgccgggcatcacaggggacgcggactgagacccagacggccaggttccgggcctgggagccgggccttctccctggtgcagcttcctcggcctggaaaccccacccgcgccctctcatctccaggctttgcccgctggaagccagcccggcccgcctccgctacgcgctgcccatctctcggcttctgtttccttccacgctgtagttgagagtagcgcttaagacgacagagcccacagcctagctcagtttcattacggtgtggcctctttgtgcctcagccccgcatctgtaaagcgaatgtcatagcggcacctgcgtccctggaaccttgtcgtatttcatgagttggtgcatgtaaatcgcttagactagtggctgccacttagtaagtactcaataaacgttagctcttctcagcccttaaaacagggtctggcacacagtggtggtcactaggtgtttgttgcttaaatgaatgaatgaaagttgagtggaggatgcacagagtattgtgagaaaccttcactcccaaggtgtgtgtatatgggtgataaggtttcactctgaaagtgagcagtgttgggcctggaatagaaggtgtattagtttgctaggactgcaaacaaaatactgggtggcttaaacaacagaaatttattattttctcacagttctggaggttagaagtccaagatcaaggtgtcttcaggtttggtttcttctgagacatttctccttggcttgcacgtggctgctttcttgctgtgtcctcgcatggtctttcctctgtgttttcacatctctggcgtctctctttgcatccagatttcctctttatgagaacgtcagtcaggttgtattagggcccaccttaatggcctcattttaacttaattaccttcttacaagcctgatctccaaatacaatcacattctggagtgctgggggaacagtttaaccataacagaaggaattcacagaaatggacaaggagggaaatactttccaacagaagtgacagaatggccaggaggcttaaaagcagggtgctcaagatgttttttgtgttcagggcacatatgtgtacttcagtcttgtttgtgctctcgtactgtttttgggtttggttgttgttgtttgtttgtttgtcctcctgaatactcaaagaaagtgagccctctcatttttttagtctggcaaacttaactcacatttcagcatagatgtgtcttccaggaagttttccctgaccctccctcccaaattaatttctgcttcctccatttaataactttggtacagggctgggtgcggtggctcacgcctgtaatcccagcgctttgggaggccgaggcaggcagctcctgaggtcaagagatagagaccagcctggccaacatggtgaaaccctgtaaaccccatctctactaagagtaccaaaattaggcgggtgtggtggcgcatgcctgtaatcccagcactttgggaggctgaggcgagtggatcatttgaggtcaggagtttgacaccagcctggccaacatggtgagacccccacccctcgtccttactaaaaatacaaaaattagctgggtgtggtggtgcatgcctgtaatcccagcta

SEQ ID NO: 317081 - DNA, 4001 bp, Homo sapiens
cggtcgcccaggcacgactcgtcccagtccgtttctcgtgggtgtttctcgcactcgtacagcagcagcgtcttcatgtggtagttgttgagcggctggccgggtagctccaggtggcggtcccgcagagtcttcagcactgagaggcacttgtttcggcagccgcccatcagcaggcggttctccgcctccccgaactgtagcacccaggcgtcgctctctgccgagctctgcttgccggtcagcgagtagcactccttcgagagcaagttgaacccttcggccttgacctcggccacccgattggggccgggccaagggatgtggggcataggccactgtgccgcgctgcgaggccagatcccggtgcacttgaacgccggagtgatttgcaccacatagcgctccctgatgcgcaacttgacctcgctggtgtccgcgatcatcttgaccacatcccgatagctgcacttgtccaccgcctgggccaccagcgtctggaaacgcgagcggatcttacgcgctgagagatagcccgacgccgtgatgaactcgacccagagagacatgctccgcttccgcccatcgctcagtttgagcactgcgcagccgggcagcgagccgtcgtccacgaagttgaagacgcccatctggtttaggtagagcaccacctcaaattcggtgggcgaaatgacctcgagcccctcgtagcgggcatcgatctcgctcaaggagctgatgaagcgaggctcctgcacctccacttccttgagcacgtccgagaccaccttacagacctctcggatggttttggcgatggccgccttgcgcgcctgacagcgctcagtgtagtacttattgagctggtaaaccagcttggcctgagcggcgatcatgttggggcacaggtccgggctatacaccggcgtctcgcaatacgttgagggatccaaggctcacgcactggtggtggcccagcggctttcgaaagaggcggtgcgctccccgttaagccctactttcactctcgttttccacctgggctgaccggctgataccgtagccggcttgttttttccttttccctctttcgaaacctcttttcttctgcagaagaattaggggagaaaaggtgattttctaaaaagaaaagtacctcttggaacctttttgctttctcttgatatgtaaagatgaccgtgtgcgagagaagcggggtgggcgtgaggaaggagaaggagagggaaaaaactcaggataccaaaaggttaggcttagatgtctgcagccgagattgtccagaaatctggaaatgaggttttttaagtgccaaagtaaatttaaaaataaaagcgaaacattcagtggttcattcttaaacttctcttccacgctgataggacttcttcgctcagtgtaggtgagtgccttcttcctcaccctcccccaaatggaaggtgcaggaggtaattaatgtccagagagctgcgaagtacaactcagtccgccgtgcacttggaggtttgctgacgccccacagtctcagcgtgttggtctcgtctcttctcggggggtcgtgttatcgcagttttcctcttttcctactggaggcgttgtttggactgggtttgtttgtttgtagtgggttctccttgtgtttctttaggtgcaaaccgctggaagttgtttgataatcatttctgcttcgtaatttatacttttggccctcacaaaatccgttttagtgtgacgaagtcgttgcttgcgttgcatctggggtgtagttataacgattcagggttttccttcttctcctctagcttgcttttacagattccactttctgagtcgtctctccccctcctctcccctccgacctctttctcgccccgctctccccctgcttctctcccccgccccccttcctcgtgctcgctctctcttctttcctctaactctctctgtctctctctctccctctctctttctttctctctctccctcgctgtttcctggagttatttagtttatgaatggtcccagggccatcatgagggggtggagcttcagttcctacaatcgctatccgagctgtcagtgctttagccaatccgagagagaagacaggcacgcttggcgaacggtagcagccaccactgcacttgataaagaaacagggtaaagagagaagtaagaaaataggaggagataatgggagtcaaatgcttgcacacattttacagccgttcctctttatcctcctctcttatcagtagcaaagaagaaaaagagtttatatagaagggactctcctggagatggctggaataacgcgagggagagtagcaatggttcagaaaggttcactttttttttttttaaatgattctatcaacattgtgtagtagaaggtgcaaactgtaacaaaattactttggcttgaaggcaaatgggaagcgaaaggggaatctgggaaaggacctaatttttccaggttttttcctcctttaaagtcatcctcctttctcttcccctcccctcccattgttgccaagaatcagagcagttgctgtatatgtgcaccagtgagggttggagtggatataaggtgagggtttataaatctctttttagtaatttcgatatgctgtttaaaaacagggcagggcaaaaactagtccaagcaccttgtttgataattatttcataattaagattcacatgtatttaataccattattttatcgttacaagaattaactagttacgagagagaaaatatctaagttgtgagaaatggtgcaaacttacatgtcgtagaacttagtaggatatacttttaaaataagctactaaaattgcttcaaacttaatgaaaaacaaggcaagtaaatgtaaacctaaagttttcttaaaatcttactgttgtaaatctaattgtgaatgtattcttagggggtacaggtacagagtttcatttgtaaaatgattttattttcataattgactcttgcttttaaaagacttcactgccacaaaaatctataactatcctgttattgattacacagatggcttcactcctccctaggcatttcaatgaaaggcatgcatgtgcttttagtatatgtattatcctaaacgagttgtacccactgtagcctttccatacttttgggtgaaaaaaaaagctagaacattgtttctgatttgcttgatactgagggtttatgtatgaacctaagatgtctggattctgaatctttttaacgtatttcaggtagatgtgattatttttagtttgatttgggaggttatattccagccctgggttatgcgataaaaataaaaatctatgcgtccatttgggtgaagacttcgttttagaaacctggtagttcggctttttcaaaaccccttgggagggcttgacttaccctcttaaagtccggccgggtgaacctgaattgaattgcatagggaagttaatttctttctatctacttggtatcagacaattgggcctcttggttctttcttacatacctggtgcggaccacaggcagtttgtcacccttcctctctcgttgccataagtccctttctaaggaatatttgcttaaaaaaaaactatctcggatttgttgcttagggtttgtcttcccgcgattaggaagaagagtcagaattaagtgtccgcgcgactcttggactccagagctttagttaacttctctggagtggcagagacttgggctgcttgacctccagccttctccggggaggccgcgtgcgtcccggaacgcctcgccgcctaaggatctaggggacctcgcgccctcggagttcgcgcctgtgggagcccggctctaacccgggaggccttgccggcgctctgggaactgcctgggccggagggcactgcgctgccgggagagcgcgactggccgggaggggctccgtggttgcttctccgggggcagttactgggcggagactgg

SEQ ID NO: 317082 - DNA, 4001 bp, Homo sapiens
caacaaaagaaataatttctaaattaaaaaaaaaagatggctgctgtagtactttttaaaattttagaagatcaaatgggagaaacacttgaacaattagaaatgagaatcctaagtggagggtaacacgaaagaaaaactaacaggaattctagaaaggaaaaagaaatcgatgaagaacaagtattcacccaacaggtaatacatcaatgtcttcagctaaagaaaaacgagtgttcagacagaaaaggcttactgaatcactggcagaatttttgaaaacgacaaatagaaatacgtgaaaaacaaacaaacaaaaaaactgtgagtgttctgttatttagtagctaatcttttctctttttgaagtttagttctctggttgaatccaatttccttgatcttaatgtaatgataacattagactacagaaaattaattagttacagaaaattaatacattatattgagaatatgtagtgtatattgtctcagatagtgaacaccattataattatgtaaaattccaacctgttccatttggccacatttactgcaaaagccacttctaagggagttgatgaagactatttttttagccatatcagatttctaacatcaaaatattcagcccactcacaatgtagtgggtgggggaagagtgtatttcttccattttatatattattttcttcctctcaattgaaaatatatttgagatgtcagtacacttctatgtgcagagcggaaaaatgactgcttaagatgctagaaaatctgcaagactcaaattgtttccaatgattaaaatacctttcagttgttccaccacattatttaggtattttatgagctcaagatcagtagttacaagcaaggtgagtccgtatttctgcactcgagtaaaggtttcagatggatatatgccacgctgatataaaatgctgttgatgccgaatgctgcaagcaaaagaaatgttacagaaaattcattatccctgcataactctggaaaataaaatatatttagatgttgctatattttcattaggctatacagctataaatgactgaacacacgtgtatcttgctgaaagcagagtaggtacaaagtggcattaaaaatccttaaaagtcttgcttctaagtaaaacagataattgctttcacgtggcaaaaaaaaaaagccaaagtgtatcaacttattattgccaaatttcacctcattgtaatccaagtccaaattcagattatgaggctagaggatgtcaaaataggctgttgcattcgagttagcaactgactgaatagtcactgtgctccagacaagcctttatcttcccctttccctcccaaatcctgccaggttcctttagaacgtgcagctggcctgttcgaaaacaagggttcccaaagtcttgtctactgccagcctcatgcccaataatcactttgagtgggagggtgagggtgctctcgcagttaaaaaaaaaaaagaaaaacacacacatacgcatacactggggcccaccccagtcacaccgtgtcctgtatcggaaagtaaggggtgggaggtgggacggatctgcacttaaaggaagaaacgctccggaagaggctacgccgcgaggtaggccccagcagcacgcaggcctgcagctccacgttagcaacgcgtctggaggaagcgcctgcagccgcctctccccagattacttctctggtatcagaggccgagctgtgggcctactgagccgtcacgactccgttccccccgatatattggcctgcgcgagaacttacagaagaactcggccacgatttcggcgctcccgcgcagggtgattccctgctcccgggagagctgcagcgccatggccagggacacaaacaaaagcacgcgcttccactccgcggacagcaaccacagcggctccaacagcacttccccgccaagcgtttcaaaagtaacgacgcagcacgtcgtcaggtcctttgcgcaggcgcgacgagcctttaagcccagccccacgcagcggggacctgccctttctctcagccttcctgtgatgtcgcgggagcggccggttcgcgcaggcgcagttggtggacctggtcgcgctgtgccgggtgtgacactacggtaggtgtaggttaggatgtgtcttctggtcgtggtctactagttggggccgagggaagaagatgacgattccaatttcagtagccactctctaggcttatgaactgaaagaccaaggagcacaatttccgagtttcaaagatactttcaaactgaaaggaactgttcgccagctgctcgcgaagtggcccatgtgacccctagtgaacggtctaaacttccgctagatgctttgggaattcgtaaagcgactgcgtgcgcggcagccaagccacagctttacagggttcgccttctgtgtgggaacgcagcttttcccgagaaattgggttagggattaaagagaagaactgcatcctttttactgccctttttccacgtctgtcctgggcttagggccctcctcagaggccagaggggtaggcgagtccggggcggtagggggctgcgtccggaagtccaggctgcgttctg[450 bp omitted]gggtccttctaagccctctggcagaatttcgttgtggttgttggactgaggtccctttttgtctcgccagctgttggccagaggccagctgtgtgtcagctagaccttttacaggccttctaacacttcccatcttcgtggctttcgggagcccccagccccttttaaaggctcacctgattaagtaagactcagtcagatctcccttttgatgaacctagtcccagaagtgatatctgctcatatttgtaggttctacccaaactccaggggaggggattatgtagatgcgctctctaggggccaggaatgtggggaactagcttagaattctgcctgtacagcgttgtatatatcatgtttcgattagttggaagagtaaggcatgggtgtgataggtaacaggttgacttgacccagtaaaatttttttccttaaatcctttaatctctgtgtgtgtataaatcacaatctttgatatgaagagcaatgtcagggaaagtgaggagtaaagaagcaagggagttggatatccttcaccccttccactgggagcttgggtagagctagaattttggcgtcacgctggtagaccatggtgcccatgtctttccacataaaaactccctctctttctaaggaattttatgttaaaactcagcactttaggaaaggttttcttgagtttcatgatgatgtgctttttaagttacctgaagctacacataattgttagtataacctggaaattctagaaattaaaaggctggcacaattacgatttttctatgtacagaggaagtactaaatatctgtactctatgaggagacataagacatgaggtttagaaggaatggtctgtgtcttttgaggagtttgtagtctactttggtttaaatatttatactttttttttaaaggaaaattggaagc

SEQ ID NO: 317083 - DNA, 4001 bp, Homo sapiens
tgactatctgcatgactattttaatcagaagctatgcaatcactctggaatacaaattacattcacgattacaaaacagcagaagacctgaagaagaatcctttccggagaccttccatctcccttcctagttccttcaatacacaatgaaaggatttctggaaacttttcctatctagtgtttcccacattcaccagccagtaccagaagtgacaaaccaccacggttctgatcttcaaaccttcttgtgtgttagctgaaatgacaggcctggaggtgcactgcgtgagacaaagtggtcagtggttaggactccctactaatatcaccacaatgtccttgtatagacttctctcagctgcagggtctccatctctaaaccaacagagatccaccaatgtcactgagtattaaaaaccaaccacctacatcttggagggatctagcaagaggctagacctttggtaacgtcagcaacattgccctcccttccttgatcaaaagaagtgctggacacacaagcaccatgaaaccccactgcgaaaccattagtgtggcgggcgcgtggctcacacctgtcagcccagcgctttgggaggtcaaaaggcaggaggatcgcttaagtcctggaatccaaaaccaccctaggcaacagtgaaaccccgtttctttttaaaaatatgaaataaaccgctagttaataaagaggaggagaagcttgcttctgctttcctatgaagaccagctacagcagggtacagcctgacttcagcagcgctaactgtagcagggaccttttaatgaatgctaggcactgtttgaaacaatacgtggtcactcatttcaccctgaggtgacacaggcgctaccactgcttaaacctgacaagaataaacagtcaccaaccgggccctgatgtctcccagtaaggacgaatacagagaagcctgattcacaccccagcaggatggctcacagcctgtgctcttcagcccttcgctgaactgccctggggctgggggaacgcacagcaacctggccatactgcatcctccacacctgtcgccacaccgtccgtcctcagacggacgtgaacaccagggcgctctgggaggagagagaaactacgcagctctccaggaaggcaacacagaaccacgaagctcagccgcagctctaggaaagctatgaccttgatcttttaaggaattccttcccaggtgcttcatatcaaatcctctactaactaggtaaagaacaagtatcggctccttctactaggagcacaaatttcattctaagaagtgcgacgtggctaggtgaccacccaaggtcacgcaaccggcagccggacggcaagagctgtatttcaggtttggtgacgcccatcaaaaaggtcgctgggtgccatcaggccgtgaggtttctccctacagttcctaactagcgaccggcgcagccggcacctcccagccctgggctcccgggagggcggccgggcactggctgggcacgccgcgcactccgtctgcctgggcgccagagaccccacgccccgcaaactccggcttccaccccagccccaaattcgccacccttagcgctgccagagtcgtcgctggctcggctcacgcagctcttcaagcagaggggccacagtcgggcgcctggcagggccaaagccgccgcccccgccacacctgcccggcgcggaccgggcgcccctgagaagcccgcacggccccgcgaggccgcgcccagctcccgccgccctcgccgctggccctcccggggcggcccctcgcggcccgagggcactggctggagacgccttcgctgccctcagcctgcgcggcgcaggcgcccaccttgagggtcgggtactcctggaccttcagggtcatggacaactgagccgccgactcctgcaccgccatcttgaagcggccaaaacattagcgggcgggggacgcgcgagcgcgctgcacgccgggaaatgacgccacgcgccggccggagcaggatgggggcgggccgatgcccctgcaccaatcgtatccgcccagtcggccggaggcggaagaaggcgcgaaccaatcactgccgggtttcctctcgttcagccaatcaacgatagccccggctggcggtttccaccttgaattcgctaccgggttcaggccgcagacgccggagctggggatgctcctggcccggggcgggccgatggggtgcgggctgcggcccgggcgggtggagctggggccgagcgggctgggggacttggcgtccgtccagttacttggggctcccgcggggtggtcccctgtgggtccctcgtgcctgcggtaccaagggcaacgccaacaaaacgcctggccgcatgcgcctgtagccagctatttttctttggccttattttgaccgatttacagctgctggaatcctgatgtggaacctccgacttcccaacggaagaggaaaggcccagtacctaaaactgatttatggacagaaactcccgaagcatgagaagcgtgtggcctctccgccctctccttgcagggcgggcagcgctggcatccaggtcgtgcgctgccttcatttcagccacttcacattctcagcctttcaaacaccacccgtctccctcctttccaaaataaaactgaaattagattttattaattaggaaatgacgtcccaattaaaccaccttgtgtttcacataacacatttctaaacaacttttaaaatatttggtgtttaaacaaaggaaaaacatctaaggtgacacagcgatgaagggagaacctccgcttggaggctgctacatgttacagccgcaagacatccgacccgcactgtggaatctttctctgtcttacttaaacaggagttgggactaaggaaagtgttattcctcaagtgtgtggctgcagactccagtcttttagacatttgaagtaagttttacagtgaggtgcacaaatcttaactatacagctttaatgaattttcacccatatttgcacttttatctaaccgtgtcctggttgagatttaggacatttcccgtggcacagaaagctcctctgccccttcccgggctatatccccatcattctaaccctgctccccgtaacagcgttcctgaccttcctatagagatggaagcatgcactctgtactctttgcgtcctttcacggttcgcatcgtgtctgccactctccgggatggtcccagtagtacacaggagcactgcagcagttggatggactgcactcctcttagagactgccttcacttcaccagggattcaagattaacccaaaggaaaggacacgggtttcatttccatggtaaaatgatcctatcctagtaccatctacagtcagaaatacttaggaattataaggcagaggtttgcacgttggagaggttgtttaaccctctacaacctttgagtcattcattctaggttttcttatgttggaagataaaactgtatttgaattagtccttttgtaaaccaaaaagtgtctgagacagatctcaatcagtttagaagtttatgttgccaaggttaaggatcatgaccagtgacacagcctcaagaggtcctcagaacacatgcccaaggtggttgggttacagcttgattttatacgttttaaggagatgtaggcatcaatcagtacatgtgagatttacattggtccgaaaaggcaggacaacacaaagcacagcggggcttccagctcacaggtggattcaaagattttctgattggcatttggttgaaagagtgcttatctaaagatctggaatcgagagaaaggagcatctgggttaaaaggggttgtggagaccaacgttcttattacatagatgaagcctcataggtggccaccattagaagcaatagatggcaaatgtttcatatctagatcttaaaaagctgctagacttggccgggtgctgtggctcacgcctgta

SEQ ID NO: 317084 - DNA, 4001 bp, Homo sapiens
tgccttccccagtcgtaagaaccatccattccctgtggaaataagccaatcaaggagaatcttaaagtcgttgttagttttctgtccctctgagagaagcgctgctgagttcttctccgcccgtttcctgtgctctacggtttgaaagcggcacgacagaatcacgccccagcgctccccggcctccgtggccgggctcccgcaggaaacaccacctgcggtcctggctgcactggtggccggcagctcaccacacagcgcatcagcaacacggccgtgctgccgcccaagagcagtgggcccaactctgccgtcgcagctgtgccagaacaagcgctccacctcgcctcctctccagccgtgcccaaccatgggaggacagactctcgggtaccgcctgctcccccggccctgggcacgcctcgacctcgtgtcagccactgtgcttagccgtgaggccacgtgaggaaggcagggctgcagtgagggagacctggacgcagctcagcgcttgggcttcccagaagtagggacagccagggcaacagagacaggactggcctcagccgaggaaggagccacacagcagggctcttccctagactcactttccccccgaaagcaggggcaggaggcgggtggcaaggccggccctgagcccgttcccccggctgccactccccactcggcctggccccagctgccctccactcagacatcccccagcgccgacgtggacccaccgcgggtgacagggtgcacacgctctcgtccacaccagacagccacacaggaggctttgcaaatggcagccagcatcaccgtctgctaccgagcaggactcacccttgctggtgagcaaatgagtcaggatgttgagaaggagggcagggaagctatcaagacacaacacgcttaaccaactcacaaagcagtgacaacaggagacggactcgaagccaggcaccgtgtgtggcatctggaaccaagcttgctggtgccacgcagcctggggtcccatcatccacactgcctgccttcaagatttctcccaaggattcggcactgcttaggaaagacgggaaagattcttttcgtctgctctacatctagtggatgggaagtcacagcagacagcacttcagctctccataaatacctgaccagtgcaagcgagctcaacgagacccactggggaaggcccccccgaggccctgacaccacagcccgacaccggcctgcaggactctcccactggagaccctatctgagtgtgtcctgccacgaggtggaatttctaaaggacgcaaggcatatactcagtctttgctctgcctgtgcaggcgcctcacaagagcaggacagaaagtcttcgccattagaccattagacaaagcggcacaaccaccctcgctcgcgcggaggaacccacacagcatccgcacaccagcacattccagaccgccaccagaaaaggaaaggcctctctggacgtcccttagctgcattcaagttctacgcgggaacggggcctttctggactttccaacccctgccgggccgtccgcctcaccgcggtgctgacgctgctcaggcacagggcagagctccgggcagctggtgtgctgcagacaggaaccctttgctcccagtgcaagggaaaaggccctgcccagaacgcgccacggttacgcagaacgcaggcatgaaggaggccggggaggggctcaccggggccacggtgtcttcacaactggaagaccccacctccctgccagtggctctcagggtccacatccagccgcttactcctcaggcctcccacgcctctgcgcacgctcctcccacctccctgcctctgctcctcctccagcgctggcccggggctatccaatctgagttcaggggatgagcgcagcaccccctctccctccagcagggcagctgctgacccagacagcagctcctccccacatccacgccccccagaggagccaggccagccccggaaagcaccgcctcctcttccgggggactcagcacgtgactccgggccctaaaagctcccctccactggcctgggctggctggttagcaagagccccttcacaggctccttaaagggcatttggtgaccgagtgagtggaatttcagaaatgctaaagactctaactcgagccaaattatcactcaagaatgaggacaaactgaagttactttcagatacgcaagggctgaaagctgagcacacacaaaccttcctggcagaaaaactactcagaaatattgcttagtgatcaaacacaataaatccgtggacaaagacaatgtaagacacaagaaacagcaatgcagagaggggccagcagattctaagacacaagaaacagcactgcagagatgagcccgcagaagatacagctcgcccaaatgaggacaggcaacctcacagaccgtatcataggaagaacagtgaaaaggggcaaagcattaaaaatagattcctaatagcacaggcaacagaaagagacaaatgggactacatcaaacttaaaaactgcagagcaggaaaaaccaacagagtaaaaaatgggaaaaaatagctgcaacccagggatctgcatatggagctactatccagaatgcacttttaaaaacgcctacaactccacaaccaaaggaaatatccaattttaaaatgggtgaaggacttagacacttgtacagagaagataaaccaatggccaagcggcacatgacaagatgctccacacgaccaaccactgctcaggagacacaagtgcagacgtgaggcatcacctcgtgcccgttaggacggcgatcactcaacaccgaaagctatgccacggcaggaagcggagcagcgggacacgcgtgcagtgccagggaacgtgcccggcgcagcgtgtagagcagcgaggcaattcctcagaacgttaggcacaaggctcctgagtccccagtaggccacgagaactgaaggcagggtcccaggaggtatctgcacacctgtgttcatggcagccacgaggcagaagccacccacatgtccatcaccaggggaatgaagaaagaaaacgtggcagtcacacaccacataacgacattttggtcaacaacagaccgtgcaggtgatagtggtcccattaagattaggatactgcattctcactgcaccttttctatgtttcgatgtgttccatgcaaaacaccaccgtggaacagctgcctgcagtattcagtgcagtgacatgctgtacaggtttgcagcccaggagccacaggctgtaccacggtgcgggcgtgcagcagccacaccatctggctcctgttagttcattccacgatgttcacaccgcaaagtcgcctaacgatgcatttctgagagtttttccatgtaagtgacacatgaccgtatctgcacaggtaatggttcatttcaggcatcaacttgatgggatttgggatacctagagaacctgtgaagcattacttctgggtgtgcctgtgcgggtgtttccagaggagactggtgggtgagtgggaagatgtcctccaggtaggtggtgccatccagtccgctggggcccagacagaacaagaaagtcagaggataagcaatttcctgtccctcctggagctgggatcctgccctttggcatcagaactccagggtctctggcctttggatgttgggacttacaccagcatccccccagggttctcaggcctttggctttggactgagccacgcaccagcttcccagggtctctggggtgcaggtctgctgcgggactcagcctctgtaatcacacaagccagttccccaataaatcccctcatctacctctatatattatgagttccgtccccctggggacaagtaacacaatacacagtggaacagtattcagccttttaaaagaaggcaatcctctcactcactgtaacatgggtgaaccttgaagacattatgct

SEQ ID NO: 317085 - DNA, 4001 bp, Homo sapiens
actccacatccctggatgagaagcaaccccaatttttgccaaaaacattgtacgtgtatgttgacaaaataatcccaaagttcatccagaataacgaacagttaaagaaatttccaaacaggagaggagtgaccggggtgtgaggctatcagacggtaaaacacaggcctggccggtgatcagccaggctgctgcggctgcaggcgccaccacacgaggccaggccgggcagggacaagggtgcatggggcgtgggctccacacgggctggggttgggcacagcaagcctcacacacgcacgggaagccacaagtgcacgacccacacctctcctgtgtgacagcgtttgccttccccagtcgtaagaaccatccattccctgtggaaataagccaatcaaggagaatcttaaagtcgttgttagttttctgtccctctgagagaagcgctgctgagttcttctccgcccgtttcctgtgctctacggtttgaaagcggcacgacagaatcacgccccagcgctccccggcctccgtggccgggctcccgcaggaaacaccacctgcggtcctggctgcactggtggccggcagctcaccacacagcgcatcagcaacacggccgtgctgccgcccaagagcagtgggcccaactctgccgtcgcagctgtgccagaacaagcgctccacctcgcctcctctccagccgtgcccaaccatgggaggacagactctcgggtaccgcctgctcccccggccctgggcacgcctcgacctcgtgtcagccactgtgcttagccgtgaggccacgtgaggaaggcagggctgcagtgagggagacctggacgcagctcagcgcttgggcttcccagaagtagggacagccagggcaacagagacaggactggcctcagccgaggaaggagccacacagcagggctcttccctagactcactttccccccgaaagcaggggcaggaggcgggtggcaaggccggccctgagcccgttcccccggctgccactccccactcggcctggccccagctgccctccactcagacatcccccagcgccgacgtggacccaccgcgggtgacagggtgcacacgctctcgtccacaccagacagccacacaggaggctttgcaaatggcagccagcatcaccgtctgctaccgagcaggactcacccttgctggtgagcaaatgagtcaggatgttgagaaggagggcagggaagctatcaagacacaacacgcttaaccaactcacaaagcagtgacaacaggagacggactcgaagccaggcaccgtgtgtggcatctggaaccaagcttgctggtgccacgcagcctggggtcccatcatccacactgcctgccttcaagatttctcccaaggattcggcactgcttaggaaagacgggaaagattcttttcgtctgctctacatctagtggatgggaagtcacagcagacagcacttcagctctccataaatacctgaccagtgcaagcgagctcaacgagacccactggggaaggcccccccgaggccctgacaccacagcccgacaccggcctgcaggactctcccactggagaccctatctgagtgtgtcctgccacgaggtggaatttctaaaggacgcaaggcatatactcagtctttgctctgcctgtgcaggcgcctcacaagagcaggacagaaagtcttcgccattagaccattagacaaagcggcacaaccaccctcgctcgcgcggaggaacccacacagcatccgcacaccagcacattccagaccgccaccagaaaaggaaaggcctctctggacgtcccttagctgcattcaagttctacgcgggaacggggcctttctggactttccaacccctgccgggccgtccgcctcaccgcggtgctgacgctgctcaggcacagggcagagctccgggcagctggtgtgctgcagacaggaaccctttgctcccagtgcaagggaaaaggccctgcccagaacgcgccacggttacgcagaacgcaggcatgaaggaggccggggaggggctcaccggggccacggtgtcttcacaactggaagaccccacctccctgccagtggctctcagggtccacatccagccgcttactcctcaggcctcccacgcctctgcgcacgctcctcccacctccctgcctctgctcctcctccagcgctggcccggggctatccaatctgagttcaggggatgagcgcagcaccccctctccctccagcagggcagctgctgacccagacagcagctcctccccacatccacgccccccagaggagccaggccagccccggaaagcaccgcctcctcttccgggggactcagcacgtgactccgggccctaaaagctcccctccactggcctgggctggctggttagcaagagccccttcacaggctccttaaagggcatttggtgaccgagtgagtggaatttcagaaatgctaaagactctaactcgagccaaattatcactcaagaatgaggacaaactgaagttactttcagatacgcaagggctgaaagctgagcacacacaaaccttcctggcagaaaaactactcagaaatattgcttagtgatcaaacacaataaatccgtggacaaagacaatgtaagacacaagaaacagcaatgcagagaggggccagcagattctaagacacaagaaacagcactgcagagatgagcccgcagaagatacagctcgcccaaatgaggacaggcaacctcacagaccgtatcataggaagaacagtgaaaaggggcaaagcattaaaaatagattcctaatagcacaggcaacagaaagagacaaatgggactacatcaaacttaaaaactgcagagcaggaaaaaccaacagagtaaaaaatgggaaaaaatagctgcaacccagggatctgcatatggagctactatccagaatgcacttttaaaaacgcctacaactccacaaccaaaggaaatatccaattttaaaatgggtgaaggacttagacacttgtacagagaagataaaccaatggccaagcggcacatgacaagatgctccacacgaccaaccactgctcaggagacacaagtgcagacgtgaggcatcacctcgtgcccgttaggacggcgatcactcaacaccgaaagctatgccacggcaggaagcggagcagcgggacacgcgtgcagtgccagggaacgtgcccggcgcagcgtgtagagcagcgaggcaattcctcagaacgttaggcacaaggctcctgagtccccagtaggccacgagaactgaaggcagggtcccaggaggtatctgcacacctgtgttcatggcagccacgaggcagaagccacccacatgtccatcaccaggggaatgaagaaagaaaacgtggcagtcacacaccacataacgacattttggtcaacaacagaccgtgcaggtgatagtggtcccattaagattaggatactgcattctcactgcaccttttctatgtttcgatgtgttccatgcaaaacaccaccgtggaacagctgcctgcagtattcagtgcagtgacatgctgtacaggtttgcagcccaggagccacaggctgtaccacggtgcgggcgtgcagcagccacaccatctggctcctgttagttcattccacgatgttcacaccgcaaagtcgcctaacgatgcatttctgagagtttttccatgtaagtgacacatgaccgtatctgcacaggtaatggttcatttcaggcatcaacttgatgggatttgggatacctagagaacctgtgaagcattacttctgggtgtgcctgtgcgggtgtttccagaggagactggtgggtgagtgggaagatgtcctccaggtaggtggtgccatccagtccgctggggcccagacagaacaagaaagtcagaggataagcaatttcctgtcc

SEQ ID NO: 317086 - DNA, 4001 bp, Homo sapiens
cccctcccgccccctccaggccgctcccctcttaaccctcccagccgctccacctgccgggctagccccgagtcgcgagcaaagagcggagcgcacccgcgccccgcatccgcgcgcgctcccgcgagcacccccgcgcgcagccaccctcgctcgtttctcacccacttcaaagttcattcacaaaactctcagactttctcagcccaaagggggtgagctggggagaggaggcgagaggctctccttccccgcttcccccctaggggttgagggcctggtgcccgcccagaacctgcgacagcatcaatatttccacgcacccggcggatgtgctgagaggggtgggcgtagggggacgggtctggggaggcgaggcggcgcggctagaggtggggtggggagcggcgaagaggaggagcaaggtttcaactcaggggttcactctttcaaatcggtatcttaagaaagggaaggggggaaacttttccagcacctcactccgacgctcctctaggctccctccgcccctcgcagtcgtgactggcttctcccctctcgccccctcctccccaaatctgacaaccctgacagattaacaggtagcgacgacggcagctttttccctaagaaaagttgacgttaacccttaggcttcagcccacctcacccaccgtgcaaatcagacccttgtacccccatgtaagaagctccacgcgccccccaccaccaccaccacccccaacgcgcgccgcaagcccgctgcccgtgcgccctcaccatgatcagcgtgtggttcctctgctccgccgaggcagcctccgcatcttgctggggtttgctcgggtgctgctgtttgccggtgccggcgcccgatttcttggccctctgctccagggtccgctggtagaggctcacggtgtcccggcgctccagctccagctgctccacctgagcctgctggtacctgttctcgcagttgacgtggtgccgacggcagccctcgatgcgctggcggagccgctccaccacggtgctgtgcttgggaacggccgccgaaccgccgccggggcccccggagccgccgcatccaccggctgccgggtgattgctactcggagcagcgggagtactattgggagtattattcacaccgatcccggccccgccgaggctgctgttcaggctactgttgatgcaaatactactgccattcgcggcagcagcgggggctgcgaaatcccccatcctgctccccgggcacactattttggaagaactttttttatccacccccctatcagcctcctccttgggtccaaggattaaaatagtttaagtggaacgcgggggagacgcaagcacatggatggaaacggcgatcccgacggggcgaaaaaaacggggggggagattttggggtggtttttgtttcctttttttaaactgtaaaagctcaaggggaagaaaaggggggaacgttatcggaataccatcagacacctatcaacaaaaagaatcacaacaaactgagccagcagcaaatcgggttgcaactcaaggggagatccgctccttgcttgccttctttttataatccattattttctaataaattccaggagatttccggtggttggcaagcattttctccctacataccgaaaaacacaccccatgtacacacacaagcatatgcctccagtgcggacacgcgcgacacacactcactccacaccgcatcggaaaacggcaagcttgcttattgcattttccttccacaaaaaagttttggtgtttatgccgccccgtgttctcaaagtactttggctgctcagttgcatttcacaggaacctagatatcgaatcctcgggctgggggaagtaaacacatggacagtccgaggcgactgcaaaagtagatcggtgaagtcctttgcaaaacgccgcgcagagagcagcacctaacgctcggctgggctgccgctgccgccgctgctcctgccaccatcacaatgatcaactgctcgccgccgccgccgccgccgcctcctcctcctcctctcgctcctccacctcctcctcctcctccatgccagcggagtgatatcaggacgcgcgagctcagtaaacacggcagcggcggcggctggaggccgtgagacaggcccgcggacacggcgcaaaacccggcccggactctcacccggcaggagcgggcgcggcacgcaccagcacccggctcccgtctccgtcgcctcggcgcccggcgcccctcctacgcccccaaccacactaccgccccgccgagaagcccagagccgtcggcgacggagagaagaaagattctggggggatctcagaaataaatcaacttttgacctgtgtgtgtgcgtgagagcgtgtgtgagtgtgtgtgtctgtgtatgcgcgcgcgcgtgcgcggggacgcgcctggtagggtttccttattccaaggaaagtatcaagcgatcccaagttgttgttatacatttatgcattatattgcagaactgtgcatgaccaggcagaaacattgaagctttacagcagttgtctgtcatccctatccatgtggaaagaaaaaggcaaatgagtgacttgtttttaaaacccaggtaataagtctgcgctagtaacagcgctacttacggacacttgttccaagtctaggccagactgaacacacaaataccaaattctaaataaatagaaataggcatcaaaaatgtgtaatatttaactcactgtacataatgattgttgttactaagtcaattattgttttacttacccttggaaaaaaataaagcaagcagggacttggaggtgagactaacagtacatttaaacagactgttttgaacactaggtgctaatgacagcagtaattaaggtccttcgtaaatcaagtggaaagattgcagatttcatagactagaactatagaaaaaacacagcatttcacagtttgtcatgaccaaaacaaaaacaagcaaaaataacaggcctactttattgctggatatatttctttccatttcaatgaattcacaataagtacaattaaaatggactagcaactgcagaaatcaatctaaactttccattttattaaagcacattatctttcccgatattatctaaaaacaaaaataacaactaaggatcaaatattcttgaatatggacttaaaccattgcatatacatatttttaaaaattaagatggagaaattattatttctctaataatcagtaaactataaatcttgattgtgagatgttaattataagtcattttgtattatttcaataaatcttaagaattagtttttagggtaaaaatacaccccagttttctaaaatagccaggaataaaagaactttggatcttatgcattagtcatgagatctgatttaaaccatcttcatttcttggcattgcagattagcacaggatgctatttctaacctcataatgtcagcgataagaagctatatttttcttcaattaatcagttctatatagtgaacgatatttttaatattcactggatatatggcaaaatgggcagcaaaatatttaatacggtgtgaggctacttctaagcagtaaaaccaacttaagagagtgtatatttcattgaagttgccacactttttctgaaggctatttagttaatatacaaatttctgtatcaaactgcccttcttcaagtctcagtcagaaaatttaactggactacgtctgtagcaaaagagcccgttcagattctgaaaatatgtagagaattttaagaaattagaaaaagaggtagcaaagtggcctttatctttttcacatattcactaaataatatctctattaactcaggaaacacatggcttcgccacagaggggaagctatgactctgcattcgctttgctctctcttcaccgtagtttaattcttttttttttttttttttttgagacag

SEQ ID NO: 317087 - DNA, 4001 bp, Homo sapiens
atgctgtatgaagcaacctgctgcctaccctcaaaccacagggactatcgcaccctcatcaagggtcaccagaccctgggcccgggggccaggcagataacacaaatgagagaagagggtgagggcttggggacacctgggatgcctggtgtcagggggcactgctgacttagtgccagctggcacggaagtgcacagctgggttgccagagctggcagttttttcaagaatagacagaaattcaggattaaattgaaagcaatctctcccaggcatggaactcaccgtgaaccttgatctaaacaaggctgtgaatagcccggtggggttttggccctgtggtttatgccagcctggccctggccctggctagaactgccccattgagttttccacctgggtctttgccaggatactgggccaactgtgtcacctggtgacctcattacctggtatttctgctggtccgaggcgacgccatcccaccacagccggaaaaactcctgctccacagcgatgaaccggcgctgctggccgcgggccagctcttccaccactgaggtgtagacattggcggcgtacgcccgcatgctttcctggggaggggacagcatcatgccagccccggtccaacaagaccaagtgtccctggggcccctgccattcgccaggtgtgtctgcatggggttgggggctctgcccttccttccctgctgctcaccccccacacagctattaggcactcgctccataccaggctctccccactggatgggatcgtgctctcctgggggagagggacggggaaacagacaccctacatgggcagagacaggtgccctcccagcccaggggtcagggacagtttctcagaggggtgagcaagctgggccttgagtgtgcaatttggggggctgggccctgagtgtgccattgaggggcagcacaggaaagtcttaggcctcagtcggggtgtggtccagtgaccccaaaggggcctgctggggctgaaatgaggaaagctggtgctgagaggaagagctccccaggctgtccctggcgtctaggcgtctgcctccccaaggctgggagctccaaggaccacagctgtagtgtgttcccatccgagtcccgagggccctgcacacagggtgcccacagagtgcttacatgaatggaaggagcaccgagcagggagtcaggaggcatgagggttattcccgagcgaccttgggcaaggcagcaaccctctctgggcctcggttttctcctctggaaactggctgtagtgggcatgcttcccctaccctttacagatggggaaactgaggcttagggaccaaagcccctcgcccaaggtcctgagcagaaccaggaggtgaccacaggtccaccttcacccctgtcctggggggcggaggacgctgagctggcctccaatattcagccccgcaggggaccagcccggccccttcccagcgggcacctgacatccacctgctctgaagccagccccaccctctcctgctccaggcttccctggaaaatgggttaccactgtcaacccccaagcccctccccagccgggaatgcaggggtccctccaatctgcaccaccctccagaaggggaaatgggggttcagaggcaggaagtgactggcccgaagttagcgacgcaaccagtcaatggcagcgtggggtcctgaacccactgagcctccttctgcgccggcatcgggccccgggacgcaaacccacactcagatcccgcggggagagggaagctgcagcctcaggggcgcgcggggcgtggtcggcacctacctgcacagtgtagacccagcccacgtccatgtggctgtggggcaccacgaaggcccggatggggccggcggactggacccctggcggtcgcagcaacaggagcggtgccagcagcggcagccagcacagctgccccatccctgcggcaggccgggaaggtgccaggcccacttccgggtccgcgaggggcggggcggccgcgcgggcggggacgcggcccattggctgcgggcgggggcggggcccattggttgccggctggacgccgaccccgggaagctcgggaaggaggagctggaggcgcggggccctcagcggggcagggcgcctgctctttgcggtttagctctccatccccgtctccagctttctggccttccctccctgtccatcctttcagccccatctcccccaagcctgccagatctcccccaaccagaggagacccctcctcgcccaaagcccacgctctggtggttcctctcggagcgtgtgcctcttcgcaatacctgcatcccgccctctggactcggctccgggactctgaggctaccgtgcaaaattcggctcagcacggaccctgtgagctctgccaccaggaaccttccctgataaccctttccctcctctccctggcgtcgaaaccccatctgggcggcgccatggggggcttgttatgggactgtctcctttttttttttttggacaggatctcactctgtctcccaggccggagtgcagtggcgcgatcagggctcactgcagccttgacctcccgggcccaagtgatcctcccacctcagcctcctgagtagctgggaccacaggggcacactgccacacccagctaattaaaaaaaaaatttatagagatgggggcctcactatgttgcccaggctggtcccaaactcctgagctcaagcgatcctcctgcctccgcctctcaaagtgctgggattacaggcataaaccagcatgcctggctcaactgtctccattttaaggaggagaactggctttcagagacagtaactgacttgtccaagatcacgcagttagtggaggagccaagagaagctttctgggttactggatggtgacctggggcgacataggtaacctcgctgagcctcagtgaaatgggtccgatagaggagctgtgaacaaagtaaggatgcacccaggctgagagcgtgagcacagcaccccttgcctgcactcaggggaggtgcggtcacattggtgcagcctgtttgggactgttgcctggagtcagccctgtccactactccctgcccaagaaagcaagggtctgtggcttggggtttactgtctgagaaccacttggctgtgcccctgcctggcatttcctagcggaaccagagctgcagctctgagcaaaagtgctggtcctcttgtccattatgtaacaaatggaaactgagaacaggttctccaagcaggtctccctcctccttctgtcctgtccaccccctggggacccctgcatccccatagcctcaggtcagatggtctgagcctgacgtggacagtactcactaacacatgtccccatgaccggccaggctcacagctgggctccactctccagcctctgcaaccaggtgcggccacgtggctaagtgctagtcaatgggatgggtgggggcgggcactgtgctcctcttccaggctggcccctaacaacctcctgtgggtgagccctgctctcttactcacccactgctccagtggagggcactccgaggacctcagggaggttagagccaccaatggaggctctgaagaaccacatggaaccatgaggaacccaaagagctgtgacaagagggagaaataagctttaattgtgttaagccactgagtttatcgataaggcagtgtcacaatctttggcagactgtatctgccaaagatgggctccacaacattacccaccccccaagctctttgtagaatttggttgacgagaaaagccacactctaaaatatctcagaacgtttattctaagccaaataggagtgaccatggcctgtgacacagcctcaggaggtcctgagaacaggtgcccaaggtggttgggctatagctttatacattttatggggacagaagttacaggcaaagacatgaatcaatatatgtaaagtat

SEQ ID NO: 317088 - DNA, 4001 bp, Homo sapiens
ttcatactatgagcaaattcattttcattaagtatctgttgtaaccaaacgttgtttcttagcttcttagctctgtaatatggcacaataatctgacttactgaagccactcattatttcccattggcttaattctttctttctttttttttttttttagagatagaatctctctatgttggccatgctggtcttgaactcttggcctcaagaaattttcccacctcggcctcatagactctttctatgttggccatgctggtcttgaactcctggactcaagggatcctcctaccttggcctcccaaagctctcacgtaccagcacccattggcttaattatttcagtaaaatcaggcaaggaggaaccctacaaaataaacacaggcattctcaaagcagatataagtgaaaactcagagtatactgtggtcagctgtgttctctatcacaagtagtttgtcaacttaaaataaagtactaaagtttgggaatgatctactctaaaaatacatcggacaatggtcaatgtcatttacaacattcacctcctttctgatacacatctcaggaaaaaaaaaaaaaaaactactaagtaccaggtcagaaatttggcacaaccctagatgaccaccttgtcatgcaaataaacttagaatggtgctcctgaaagtcagccacagtgcttcaaaaacacatgattttttaaaacaccaaactaagcataccacatagtatagagaccaggctatggagttgagaccacctgggttagaattccatttctttccatttagttgctgtcaccttcctaatttctctgtgttccataattccatattatccataaaattcagatatgaacacttactatacagagttgttatgaggattggacaatgtatgcatcccacaagtagatcaattacaagtacattttgccccaagtaaagacaacacgtgggaacgctgtgcaagagggaacagcaaaagcagttggaggatggaagtcagtttgcaaacctatgcgcacaggcagccaaacacgaaaacgttccccacaagtagtctgtaaattggagactccattgggatacacacacacacacacacacacgccctgagaggaaatagcacctttcttcatcaccaagttagccttaaaaattatttacccgttgttagccacactagcactgacaaacccaactttactcttgtaggtcattctccacaacgtctgtgctgcgtcaatcccaaatctgactccctgacgcttaacagcgaaaataaaaaaccgagacattactcaatagagttaacccttacttaacaaaacgctgttgtcccctgtggcgtgcagacagtagagacagtaattcccgaccttatgcttgtcagtgacggcatgccctttgtatacacgcttcagtagagaacgactgcagtaagtaaactgctagtagcaacactgttcccctatctaaacttcccctttccagagttactgatgtcccaacatgggtcggtcgctcagtctccgtcaagcccgtaccccatagcttgggcatttccccccgcagatcacaagatgcaaaggggaagttactaccaaaccgacgagaatggcccagagctgggggctgccaggcggttcctgggcccctctcagcaccagaagaaggcgggcgcaggctcgccgcgggtcggccgcacgccatacctggatcaggccctgctggaacaaggcgctgtgcacgcagccagggaccgccccgggcagctccagcgagccgttcccattgcagatgctccagttgccacgcaagctgtaactgagctccgcggcggtggtgcctgcaccgcacagcgcgagcagcaggagcaggtggaggcgcatcttgagatcccgcgccaccgagatgtggagagatcgaaaggcagcgctgcaagggaccggcggtgaagccactcaccccctcggaagtagccgaggctttaggtccccgccccggccccgcccctaggtcagctgagcgctctccgggcgcagccgcgggcgggaggggaacgaggaggctgcgcctgcacccgctgaaagccgggcgtcgcgggtgcgggagctgcagcccccgagaatagctacaggctggggggcattgcggtctgagccttccctcggcgcttcttcccgccgcctcagtacatacaactggaggcaagaatcttgcacggtaattgggacagaaagatccctgggcgcgcagtggcacaaagcctcgggagatcagagaccgactgtacgtggagaccatagctggagagtcccctcactccttcagagaacccaaactgggagacaacccaccacttcccttccgccaaatttacacagaccctcgtctacctggtagcgtaacactcaccccgctgcagctcaactcgcgggtctcagagcctaccccgcccttcaaagagtaaacaagtactagcagtatctccatcagaaggttgttctgagggctaaccaagaaaatgcgactatagcatgcagcatggagcctggcccagagaaggcattcacgttagctattgttactagcggcctgcgtccttatgtttcataaagccccacggaggtttctgaggttctggaacctgcactaggcgcgcagctgagtttaaaatcctctgcactcactagctgtgggacctgggcaagccgcaaaatctccatctccgtttcttgaagttttcaaggtgttataagtataaaatgagtaaacatatgtgatcgtccctaacaatgccagagtacccaagaaataccactgacttatttcgggtcttgtagtcaaatggtctacctgagtcccatttttgcaataggatgtaacagtaatcctagaagttaagacggaattttacattgcataaaatagactgcctttctcctgtgttgacgctatctgccgtatatttatgcttcggaagaagtccttgaaaagaaattttctctcatcaaatctgagctttgtttcgccttacaatggccttggaattgcctgattctgcagacaccgggcaatatcttactttgcaaagtcagcattatttacaagccctgaatatcttggcttaaaggacagtatggattatccaacccaagccgctggctttacagatgagggaactgagttcaaagagatcggggccaggcgcggtggctcacgtctgtaatcccagcacttctgggaggccgaggcgggtggatcacttgaggtcaggagttcgaggccagcctggccaacatggtgaaaccctgtctctattaaaaatacaaaaattagctgggcgcgtggtggcacgtgcctgtagtcgcaggtgctcgggaaactgaggcaggagaaccgcttgaacccaggaagcagaggttgcagtaagccgagatggcactactgcactccagcctgggctatagagaaagactctaaaaaaaaaaaaaaaaaaaagatcaggtgacttgcctgtcacatagtggcagacaggattagaaccctcctcttcaaggtcctactgtcagagcccaatgatgctataggggaaacgctctcactgcttcaaagccttcctcactcactccagaagcatttttacctttgatagaaacaaagctctcaattcaaattatatgccataattcacggcattaaatggctagccatggtctgtgcaacactgataacacaaggtttatggcaacaagagcggcaaaggaattttttcataattcccagagatttcattaagccaaatcagaggaaaattcatccttgatgatacatatggatatattctgtttattaagaaatataatttttagaaaaacaataatagaagattctcattcctcctttcattccaggatgcaagcataacatcatttaggttacttcactttgacaacagagaacatcaaagaataatcaaagccctaataa

SEQ ID NO: 317089 - DNA, 4001 bp, Homo sapiens
agaactcctttgtctggctgagcgagctgtaattgctcttattagctcatcctgaaatgagatactgaaatcaatttccatccaaacatggaggtatcatattcacaagtaattctttaaacaaacaatgcttgattaacgactgctttcaaacttaggtttcattcatctaacaaatatttcctgcaagctcactttatgccatgtacccactttacgcctcatactcaatgcagagcatcacagacaagagcccttcctcatggagctcgcagtttaactagaggagacacacattatggaacaaattaattgcaggttataattagagctggagggtaacaaataagaaggggctcaatttagattataatttattaaaaactggtattttgaaagaaattggtatttttaagagcttttgtctcggcatatttcagaaatggatgcaatcaatattgcaaacttagaggctgagttcaaaattgcagtgactcaacagaaaaaaaaacttaaacattatgttacaacagaaaaaaaagtttttatataaaaatggcaatttaaggttgcgattcaacttttaacttagtaggaaactagtattgaggctactttggtagtcttaaaaccatataggggagtttgtaatactggatggagcccaaacatgatcatgtgcaaaacctcaaaagtaatataagatttacccctgctttatataggactgttctagaatcaccaatttcaacccatctaatacagtgtttacactgtgaaatgattccaaataaaaatactttacctggaaagtagttcttttggtaacttttggactctttgtatatgccaaagtggtgctaaaaacttcatcagacatagtgtattttttctcgttacctttataaaatagctaattattagaattcaacttctgatagtagctgaaatatacaaaacaaatcagacttcgcatgcttcagaatttattttattacatttgattctactctccccacaaaggtcaaagaaaagcatctgatatgaacattgggctacatcttcacttaaaaaggttcttgtaaagaaatagcaaattctcataacaagcttgtttaaaaaaattcaaatggaagttatcctaaaatagttttgcaactacttaaaaagtctgcaaataaatgattacaagttaatacgacaaaatgctgccaattaaaatagaacaccttatttttcacctctcttctaaagtataacattgccttcaaaataagtcacgtcttatttaaaaggccatcaaaaggatcgtcggcgtaaaaattatgagcaccaccaccaaaaaaaaaatgtatctatatatttgcatacagcgctattcaaagaaaaagatcgtaatgctaacccgcaaacagccagcgagatgtattgcaagccaatttttcctctcacaaaagtgttaaagagagccagacaaaacgacgaagctttcgcgatgagccgcattaaaatcgcggtttcccgtactcggagcagaggcctggcagggccgcccatagcgttgtgcgccccgggttccgttccctaccaggccaggtgacgtccgggtgctcgccgctcctcaccgcgccgtatgctgagcaccagcgaacgccaggcccgtgcacgtccaagcgcggtctctgtccggatcccccatggcccccaggtcccgctttctgttcccggccccggacgcccgcggccagttctccgcgaccctgagaatcaagagccaagcatcgggtaggagctgctcaccttggtctgggcctggcggcgcccgcagagccggtcctggaccgagcgaggaggaggggctaataacagaggcggagggcggttgctaggaaacagcgtcttcgggaggaagtgacttccccaccgccgggtctctcgggtacccaacaccgctcttcggcccaacgtgtcgctggggcaaccacccagacgaaggaagtgacatcaccttcctgggtctttggagaggggctcattattggtcgcttgtgtgcatgtgctgttgcctaggagacaggacccgcccaactcccacccagatagccttactcttgccaatagagtaagggtccttatctgcacgtgttgcaaataaagcacattcgtcgttttgccacagttaggacgtgaagttctctgaatcgaagtacggtgtcagtggatgggacagaatagtacggtagtgagtttgcagaaccctgtttccgactgcaggtttgaatcctggtacccctttcctacacacgtgattgtcccaagttaaggtctttatgactcagtttcttcttctgggggaaaacaaaagtgtactaataatagacacctgaaaggttgctgtaaaattgaatgaaataatacaagtggaacacttggaagagtgcctggaattgtattcgatattagatatgctcttcatgcaactaagccgcaaagggcctggagagacctcagctcttgtggacacaactgaaagcccatttgacatcttacttgaatgtaaaactccccctctttgtatacttagtgagtaatcttattccaatcaaaccaaacaaaatgatccactaggctaaaagagcatgtgctactaaagtaaacaaaatcaacatcatttaattcgcataggaaattcttaaagcaaataaaaaccaaaaacgtttattgaaagtctttaaaataatatgaatttttactatttttaatttttaaaaagcttaatcctagttgaattatctgaatgaattcattgactagtaattaaactcatacctggtattttttccacatctctaaaatatgttaatatttcactaattcaattttgtataaacaaatcacattgagatagaaatttaataaatcaatgtattgaaaaactaaatgtgcataacaagaaataagaaatttagtaaaatacaatgctgtattaatcagggttctctagatggacagaactaatagtatatatatattatattatatatattatataatatattatatatataatatatattatataatatattatatatatatgtccactcatctgtatccatttatgaagctgaaaatgtacaccacctctacacacacatacccagaatagaaaatgctccctattttctattaactcatggcactactgttgaacccttccaggttcacctcatgctcctggaacctcctttccactgtaaaacattctctcactttttcctctataatcgcattcttatcttagctaagcaaaactattttctgaataaactatctccctgagggcttttcaaatagggactgctgtagaaggaagatttctaagttctcctaggtcctcacatactcagtgactgctctcctattactccaaacccttcctcctcacaagccaatattctatgttctatttctcagtttctgtcatcaatagatatataggcccttctcccacattcactgaatatctacagccaacctatccaatacctgagatcacaccaaggtatggtgtggccatgttccattcaatagaattctttgctcaatactccaagactttcacttgtccatacccctaattgtggggctccgtactggaagtcttaaactgtaatactccactccaaaaggcccatggcttccttttttagttattcttctcttgttatttctatttaggaactcatcaagacatctagactctttttttttttttttactttttctttctttcttttttttttaatgcatgtatctcatctaagatgtccagactcttgagcttttcacatcttcccccaatttatcagttgctctctttgcttcctgcttccctttcctagctagcccaagtcccacaatgtagcttatggagttctttcttcagcactttcaactttctcacttcatcattcctctgggacacaaaacttgtccat

SEQ ID NO: 317090 - DNA, 4001 bp, Homo sapiens
aaccgctaataatggaagcaaggccagattctgtttgtagagtcctctacaaataaatagggttgtcttgactcttcaagtaaattacatttttatcattcggtttttaagtttttatgtcctacactgttatccccaaaccttccagaaacccagtatacgaacagccttatattagcagttctgtgatgaattattaaatagagtaaaatatatattctggtgatgaggtagagaggtaaaggagaccttcaccaaactaccttgttttagactagcatggtaataacatgaagaataacggccaatatttatatgacatattatatgcaaagcattttatatggatactaactcaaacaaactactttaagttgacttccccagaaccagaccctgaggcaaggatttgtgtgaaagtgatttaagaaaaagtgtttccaggaggagtgggagtggtacggtgggaccagaaagtgaaggaggccaagcaaaggtgtgaaccacttcagagggatgataactcaatcccacaggagccccagtgtaaaacaagcctgagttatgtgcaacccatgtgcctgatgcctatggagcaagggaggtggagtatttacattcctaaagtggcagtcattcattaaggctggggaaacaggggagggcacacaaattcccaggtacttttagatctcgagtccaaagcaggatctgagagaggagttgacaaaaaaagacaccagataccagctcgggggatgacagctcatctggggcctgtgtgcacaaagatggaagagaaatcgaacacgatatgaacaggacatctgttacataaccctcacaacaaccctgtaaggtagctatttgttttatgtccattttacaagtgaggagactgaaatgcagaaagattaaacgagatgcccaagatcctatagctgataagtgtcagagtcaggatttgaaaccagactatctggctccagagtctgcacactcctccaccatattattaaatcaagcactagagcagagcatgcagagacccaaggaagaactaaagccatggttaggaaccaaacaacagagaacaggctagagccaggaatgatttaagatgcagcccaaatatactaacgtgacccttggtaggagagagtgtgtaattagatctattaagtggttagtgccaatccaggtattagacatttgggttacacataatattcactttcactctaagcatgcaagagagagaaattattgtaggcatggaagcagctgtagaaaaagggaaagaacaaaacaaaattttctctccctcttccttttctttccctaattcctacttccttctcttccacacacacaaacatacaatgcgcacgcacacacacacacacacacgcaagtctgaaagcttctttcagtttgtttctgataatttattaaaaataattaggaaaattggcagagacattaaactcaacacaccatagcaagggaccgagtcagagattttcctgtaagctaagcttgcctataaaaatagcttggataacagatagctttttaattaattttaaaagctagttgcaaaggagagatcatggcggacgggaggcaggactggactgcagctcccactcggacagacagagcagcgtgtggaggcttgcatcgtgaacttttgctccagaaggactgcaggaatacattaggaatgccgcaagaacccatggaccctctaaagggtcctgcaggacccaggagacaccccaaatactacgagcgcccaaactgtggaagtgggaaagggaggtcgtctgcccccaaacacacagccccactggggaacctgaaggtctagattatccgagaagattctgaccttacctggagctgagtcaatttagagagctgcgtgaaatacaggggtagaggaagcagcggcaaaatccctctgggctcgctgggtcccctgccacgccatttctgcctggcctcacaggggtccttgaggagggctgctggaggcactgggaaagctgcagggagaaggaaaactccagctgaactttgtaacaatttcaactgatggagaagtctcttggccagaactcagggggagggcatgaatccagtgtgcagactcaacagagcagggaagaaggagagccctgtttattttcacagctgggaggcgggtagcctggggaaagtactcggtcctgcttgcccactgcctggagacagccttggtgctgctgctgggggcacaatgggagtgagaccagctgtttgcgttgtgtgggaactgggtgaggcctgtgactgccagcttgcccgcacttccctgtcaagctgcatgacacagcaaaggcagacataatcctcctaggaacataactctattgacctgggaacctcacccccacccccccaccccacccccaccacagcagccacagcaagacccacccaagtagagtctgagctcagacatgcctagccctgcccccacctaatggtccttcccaagccatcctggtaactgaagacaaagggcatatacccttgggagttccaaggccctacccactgcctgttcctccccatactaccacagctgatgctctcttgaaagcaccacctcccggcaggaggccaaccagcacaaaaattgtgcattaatcaatcaaagctaaggaccctcacagagtccttttcaccagtctgccacctccactggaggaagtactggtatccacagctaagagacccacagatggttcacatcacaggactctgtgcagacaacccccagtaccagcccagagcctgttagacttgctgggtggctagattcagaagagagataacaatcactacagctcggctttcaggaagccacatccctaggaaaagagggacagtactacatcaaggaaacacccttttgaacaaaaggaactgaacaacagccttcagctctagaccttccctctgacagagcctacccaaatgagaaggcaccagaaaaccaactctggtaatatgatgaaacaaggttctttaacatccccccaaaatcacactagctctccagcattggatccaaaccaggaagaaatccctgatctacctgaaaaagaattcagaaggatagttattaagctaatcaggaaggcacctgagaaaggcgaagcccagtgtaaggaaatcaaaaatatgatacaaaaagtgaagggagaaatagtcaatgaaatagacagcataaataaaaaacaatcaaaacttcgggaaacaatggacacacttatagaaatgcaaaatgctctggaaagtctcagcaatagacttaaacaagcagaagagcttcagagactcaaacaagcagaaaagcttcagaagacaaggttttcaaattaacccaatccaacaaagacaaaaaagagtaagaaaatatgaacaaagcctccaagaagtctggaagtatgttaaatggccaaacctaagaataatggtgttcctgaggaagaaaagaaatctaaacatttggcaactatatttgggggattaatcaagaaaaatttctctggccttgctagagaactagacatccaaatacaagaagctcaaagaacacctgggaaattcattgcaaaaaggttatcacctaggcacattgtcatcaggttatctgaagtcaagacaaagaaaaaaaatcttaagagatgtaaggcaaaaataccaggtaacctataaaggaaaacctatcaaattaacagcagatttctccacagaaaccctacaggctagaagggattcggaccctatcttcagcctcctcaaacaaaacaattatcagccaagaatttttgtacccagtgaaactaagcttcataagtgaaggaaaaatacagtatttttcatacaaacaaatgctaagggaattcgccactaccaaagcagcactacaagaattgctaaaagga

SEQ ID NO: 317091 - DNA, 4001 bp, Homo sapiens
cacagaagcttctctgagagaaatggtccttactgcaactattttaaatatgttgataagcattctgtgttatcttccagggtccgacaactagccgatgagggatagaaggagatattggatgttgtgctggcaatgcctggtgcacttacactcgttttccttccacctgaactgtagtctatcccatatgacttagcctgcttccttgcagtttgttcataaaagttatcatcaacatggccagaagcaggcagggctgctgtacagacactgtcaggctctgcaccaaaggcagcccatgtaaacaaccttgtgattgcttcagagcctactgctgtggcataagccattctttttctgtggctaaattgcagtaccctgggaagttatctgtttaagggggtaaaagcagagactaggtctctagatttaaatgtttggggagggtgagaaaaatatatggatagatagttttcttgtaatatctatagcctgatttacttacagattttccagtaaattacatttattttgttgaaggcacaaatacatagattctaacaaatatactgccatacttatttctgatttttttttcaaaagagctctgacatttgcaggggacacagtatcccagcacagaatacctgggaatcttgccatgaaaaaaagaaagctgactgctgtgactaggagatcactttcttaaagggaccccttacctatttgactgcagtgccaatgtttcctcttatctctaacctgacccctgttctgtgttcctctccccggctcagatttagcctagagttgctctgcaagagtaacgccaatagttttatatctaatatatatataaatactgttccttagtaaaatacatcttaaaatatttaaattatacttctcacaaaagtaaacataaatacatactaaaagacattatttttaatgttttatggaacccatcacatttttcagatatggaactaaggtcagcacttctaacaagcacagctgtttggtgttttttttttcctctctctctctctctctctctctctgtgtgtgtgtgtgtgtgtgtgtgtgtgtgtgtgtgtgtgtgtttctctctctctcccttcccttctgtagccctgcattggtctaaaaacccctggtcacaataagaatgctccctccctccctctgctacccctcactccaaatggaaaggtttcaacacgcccaagtctggaaagagatgttctgcacagagggaaaaactggtagcttcttgcttcaaagctagttcacttgattaacctgctttccaccccacctctctcgtctcttccatactccctctcccgccccaccaggagcaatcaatagacatcaccccaccctccaaaaacaggttagaacccagaacgagcaaagagccacctaccattccgtgcctgagaactacgatcctgatccggcagtgtttgccccagaaatcctccctacttgtttttcattaaccacattccagactaacatggaagagattctttggagatatggagattgtttaaaattaacgatggacaggtgatttccaagaaaacccaatcttaaactcactcaagcccctaggaattgaggggtgaggacaaaaaaggaaatttgtaaaaatgaaaaaagaaaagaaaaaggtaagcatatagcaagcaccacccacccccataaaaataaaaagtgaaggggaggttaaagaaaatagaagaagagtggcttgctgaatcaccctctttcactgcctggaaaccattgtgcagcgtgatgctgcctgtaccattgtggaacctaccagaggagacggacagagggcttggggaatggggttgctatggcaaccgaaaggagcacacatgacgtcaaagcccagagaggtctagggagggggatgagggggaaacagaaagaggaagcgtctatgtgcagctacagctactgtgttttccggtgaaatgaggaccaggcaaatgtaaaggaataaggttcgtcggcagccaacatcagcaactacgacatcaaggcagccagcctgcacaacctgaagaaaagatccattcgatgcagttctggccctttgcacagcagcacggaggagcaaataccagcagagcaaaacaccactggaaatgcaacctctgcttttcaactatctcttgtagtatctctaaacgtcaaacaagtaagagatggtaataacctcagaggagaagcaggcatttgagtgtcgcctgaaccccgaggtcatctgcacagcactattcctcttctctgtttccttgtttttgtaaaaatcctgaataaatatccactaaaccaaattcaacagactaatacttaggttgcaatctgagtgtacaaagaaaatactgattaatttgagttaacacatcagaattcttttttttttaattgcagataattttctagagaactgatgaaaattgtactgttactatttggggcaaatatcgcaattttatttcagtaatttgctctgcctttaactgttatagggtatttttaaagtctccaaacagttttactatccataaataatagtttcttagaatgacaacagttgactacttgcactataaaaaaaaattaggtttaccaaatttgttttaccttttttatgtaagaaaaattttcaatacaaatttcgcttaaaccaactccagcctttggacttctcaaattacgtaatctaattcaattccttttttgcttacactcttttgaggtgggtttctgtttattgctaccaagtagtgctgagttgtaaatgattccacattatgttttagaactagcatacttatatgaatatgaagcttcttccatatgttaccagaaagatacaacatgcaagagatgcaaactcagcagtactgtagacactgaaacacatcataaagctgtaagaaacgcatacgtttttgttgtctttgttgttgctgctgttgttttatttggggagaaaatttagaaaaaggaaggcttgagtgagttgtatgtcattgtagttcattggataagtgtttggatgtccctttactctaatttcaatttcaacaagaatcaatcaagactatcttctagtcttctcaatgggcctacctgcaagataactacctcatgcaaaaatatggattgatagccaaacaactttataacacaaaataattggcattctggcttttgaggtattatatactaagtttggacatcaaaagtcagttccccaatcccatggaaattaaatcagtttgtcgaagagatgtctgcattcccatatttattgcagcactattctaatagccatggaaacaacttaagtgtccatcaacagatgaatgtatatatattatgcataccacacacaaacacacatacacacacacacacacatgctggaatactattcagacttataagaacaggaaattctgtcatttgcaacaacatagatgaacctagaggacattatgctaagtgaaataagccaggcacagtgagacaaataccatataatctcacttatatgtgaaattttaaaaaggacaaacttgtaaaactagaaagtagaatggtggttaccagtggctggaggacggaaaggtggacagggaaaggggggacattggttaataggtacaaagtttcagttagaaaggagaaataagctctggtgtactattgcacagcacagtgactatagttaataataatgttgcctatttcaaaatagctaaaagagaggatttcaaaagttcttactacaaagaaatgataaatatttgaggtgacagataatgagcctgatttgatcattctacaatgtatacatgtatcaaaacatcacattataccccataaatatatacaattattgtcaattacaaataaaataaaacaattttttaaaagtgaatgtccagtaacgtaacatg

SEQ ID NO: 317092 - DNA, 4001 bp, Homo sapiens
attgcattgatcatgtggctaatcttgcacttacctttatttaacatactgaaagaacaaattagtatataactcttcataggaaccatcctttctatcatttctatattcctttctagaagtctcatgtttgttgcatggccatattagatatgagtgtgcagttcataaaatttcaatttcttggtgaggcctttgctgcttggcctatttaaaagggtaaacctatcccaccatacactgaccagcatttttaaatattccttctttgctttgccttacttaatagcacttatcatcacctgacattttacacattgacctgtcttattgtggatcgccttgctcttgccaatagagcataactccacatgggcagcaatttgtctgttttcttcaccatctagatctgttcctggcacattttattcattcaacacatacatgtcaaatgactgaattaaaaaatcatcagggtagagtaacagaggaaaagagaaatactgtcatggggcccgaatctgcatatttgcatttcaaatatctttcaacttaatactaacacatttgtgtcttctcagtgccactggtagatggcgagcattaggacaagatccctggtttataaaaccgcactggtaatgtgttctgtgtaattttcatacataagaactttgtagagagttattatagctattatactatagaataattttacttgtaatgaagttatcttttgatttttaagaaaataaaattttatttataataatttataatttattatatatttatatctaaaatgtatttgatgtatttattataatttatttattaataaaagttattaaaataatgaattatctcctatttatctttattaagaagaagtggagcacagaaagaattctagaggtcttggcctgtgattgaaggagcttagattctgaaatgaagaaagtcctttactggtctacccagctgagttccgatgagaaaaagctcttgatcctattctcaagtggtttgcaaatatgtactcacatacttgcccacccctgaaaaaaataagatgccaacacacagtgaattcactgaacaattagaggccaccaccaggctacagctgaaataaaaaggagataacatgaataaaactcaaccgttggcaattaaatctaaattataaatctaaattaaatctaaattataaagaaatgtagcatggtgctttgtaggttttttttttctggcttttggctttgcttgtcttgtttctttcttgaagctctcaatttggagcaagataaccaaatatggtaaattttctaactagggaaatatttataaaattcatcacttccacatcatatggtttttaggtgatttttaagcagaaagctaccatgaggacaatgaaatcgaatgtagcatattggcaggataaacaatcttaagaggcaggaattgcaaagcaaagaaagcctttcttactcaagtacagacacattttctttttccaatcttacaaactcccactgccagaagtttaaaaataacaaaactcacgtttttatggttcacacacttcatgaggaccagctcccggtacgctctcttggcatgtgtttggttctgaaagggtctgctgagcttcttaatggccacatttctgtcaaggacagcatcatacgcggcactgtagagatccaagagcaactcagaattaagaacaaaagattccttagaactcttgcctacttgattaaggatactggtaaagaaaatgctatttcggaatcttagatactgtctactctggtcacatgccaatcaggctttaagtaaagatatgagtgactggcataagaatattctacatgctaggaggatgaagaagagttggaggaagggaagaaggagaaacaggagaaggggggaaggagtagaagagggcaaaggagaagaaaaagatcttgccaagaatatagcatataattgcctcagtgagtgggtggaataaagaagtaagacaggcattcaaatttcccactagccatgtgactatggcaagtcatttaatctctctgagcttgaatttctcatctgttaatatatgatatttaatttttatagctataaaatttcattgttctttgtttgttttaaatgaacattttctatacccattcacaagaaccaggtgttttgtttgttattgttttttagaaacagagtcttgctatgttccccaggctagtcttgaactcctgagctcaaggtatcttcctgcctcagtctctttagtagctgtgactacagccacatactatgtcacccaactaagaaccaatttttaagatgtgatgttaattgccataaaagcactggtgggctgatgatcaaagtgtactctcattaacaataacaaagctcaaaataagaaatgcaatcagagagttttagaaacataaataactgcatttaaatacaaagacaaaaataaatgctattcacatgtgaagctttcacaccgagattgaaaatttacaatgctttgaaaaagctatctaaatatttggtgctatttctctcatatgcagagtacatgagtttagagatcaaatgagaaagtgagagaggctctttttgccattatacctaatgatgcactcacaaaatatgtgacccatccctgaaactttgagtcctgctgggttttgtcttagttgtcaggaggaaatgcaaaaccagaatccactacaactgatctactaaattagaagtaacattgaccattgaagcctcatgccacagaactaggggcaaaaaatggaatttctgtactgtaagaaaatgatagattcacagaataaggttgaaaaaagtcttagagttcacctggtccatactttcatttaatactcattcctctctaaaatatgtccatgaaaagtttcaccagtctctgtttgcccacctccaaaaacatggaaatcattatatctaagcagctctttctattgttcggcagctttgagaatagaaatgccatcattctaataaacagagttatctttctgcagtttccactgacgactgttagtcctgccttccagggcaactcaaaataaaatgtttcctttccattattaaccataatatatgaaatctattaaaaggctgcacacaatgcgtggcctagagtcaacactcttaactcttagcttttagcatttttcccctaagtctttactttcttaaattaaatattaccagtcccctaccatcacttgtcagatgtggtttcaagtcccgttactatctggtcagtttcctctgaataaactccagtgtgtcaatatgctctgaaaatgtggaccttgtgctaaataaacattgctactctgggtatagagtgttactgaagattagggtagagctagtaactctctcattcattcctttgctcattcattcaacaatcctgttctgacattgtttatacagctaagtctgtcctggaactctttaataatgacattccacactattctttttcactttttaaaaaaatttattttatttaaagttcctgggtacatgtgcagaatgtgcaggtttgttacattggtaaatgtgggacatggtggtttgctgcatctatcaacccatcacctaagtattaagcccagcatgcattagctatttttcctgatgctctccctcctctgcttcctggccccaacgggccccaatgtgtctggttcccgtccctgtgtccatgtcttctcattgttcagctcccacttataagtgagaacatgcagtgtttggttttctgttcctgcattagtttgttaagaataatggcttccagttccatccatgtccctgcaaaggacaagatgtcattcctttttatgactgcatagtatttcatgatgcatatgtaccacattttctttatccagtctatcattgatgggcatttgggttga

SEQ ID NO: 317093 - DNA, 4001 bp, Homo sapiens
cattaaagaacattatgagaatactctctagttcaaggacactattttactccatgtggttttaaaaataatattgtactagctatcaaataagtcaaattatatctatttataatatgcttatactttctgagaaattttctcagtattctagtggaatgtgaagaatctatgtacttttgaccttcttggataaaatatttttgaaataaaattaaagatttcatacataaaatgtaatctgttcttctcaatatacatttttatttaccatgttaaggaggtaaaacatcttatcgctaaaggtaatatcatatgccaaaaaccatgagccaaacaccacagtacctcctgttgatcattgctagctgattatctgatcagagttatacacatattgtatgtaaatgtagatttttatatagtgtacaccccatcatgtaagcacgtcagaagctcgtacgttcataagtctatttcaaaaagagtttttgctattacaatacttgaggaaagtagtcaacatgagcaacaggttctctaagaaccttaaagtaaaaccccattatcataaaaacatagtacaacaaagttagaaagacgacttcagataaaacaggtggagcctattgtgacaattagtcaagaaacaatgaaataaaaaaaactgtatcacagaagaaaacgttgctgacaaccccataagtcctggattaaaacaagctctttgctcataacattggtctctcaacatagcgtgacataatcagacatataattatgcacttcccagtagagatacgcatgtaaaagctacaatgagcttttccaaaatcaaaactgacacagcaccttctgatagtcccaccattcatatttagtaaagcctccctgtattatctcacccagtttctttttaacttccaccacattgattattccaataattttctatcaaatctgttctgaaaagactcaaactttatcaaaagagcaatcactaagaaaaattatttcaatcctgtttcagaaaagcttcattagaatcatctatctttaaagaaaaaaaatcatctgaagaaaaattagcctctttcaagaaaaataaaataaccctttgaattattattgtgattgttgctttcttataccatagcattatgttagatgctgggataccaaactggtataccaagaatctccttaatgttcaaggattatttacatttaatatacattaaattcatacatacaaaattactatttaaagtttaaatattttcgattgtagtggatgaaaacagaaaaagtcactgaacccccaaagtagcaaactttcacttctttccatctttttcacgagatattccttttgtaaacacattgacattagaaacagatgttctgataggtaccaccgcttccttgtgatctgaaaattgaacctcctaaacaaggaattcatcaataaaacctgtgtccgccaagcaaaaagccagggggttgggtgttggcatgttggctatatagcacttataggcgagacaactctaaactaaggtacctgagcaggttcagaatcttttttcgtcaaacccacagagctctataatagaaaacattttgatctcaaaaatgtttagcaagcaaatcttttctggaactactgaataacaataagaattgccaggaaaacgtgaggctctctaactacatattggccatgcctctgattccattcacctgtcacaaatctccaaaatcagcgcttcagaaaccagagaaaagagcgagagtgagtctcccttaactttgccatttccctcacaccatttggggataaaacttgggcgtctctctgcctcgactggtcactccacttcctggagctccagaaactccctcagcacctggataactgcgacactcacccgtgagcgcaggaccctcctggcgtcttaagtcccagctctcagtcccgctggccgcaggaacacaatgacatctctcgcccaggagggcggttgcagggaaccgaaatcggacacaacagttgcagtgaacccgactcagggttgagcgcatcagcgctaaacccaagacaaaggctgccctgtgtcttccgtactcagcgctctcctttggtaatcggtccccgtccccttcaagcccacactaggagcgcgtgagcctgtgaagtggctgtcatcgactccgcgctttccgaggggtgcggctccgtgactagtaccacgccggtgtaaacagcgcgccgcgcactggggatccgccagaaacggcgcgcgcgcagagcgggcgctgggggccaatagtagcaactaccccaggctgcgggctggagccgcctcctctcaccagagaggcgcctactgggcgagcccgccgcccgcaggttgggtggcagcacccgccgcgaaccccagccacgctccccagtggacccaccaggcaaaggcacctgctgcctgccctccagggctgatgctgtgccaagccccgctcgggatcagggacaagccgcccaggactaccagccggagagaaggggctcccagtgaggctgattgaatgaatgatgtttgcagtcacttaccggcggagggtgaagtagctcaggcggccgccaggctgcgtgcggccggcatcccggggcgcgggcattctcccatcctttgtcagttgcgggtggagcgctcctccccagctagcggacgagcagccgggtggcaggcagcccggctctggctcggctccccagtcctctcccctcctctgctccccctccccttctccgtccccctctctgagccggcattcactgggctcccatgatgtcatccagtggaaatctgccatgctcaaagactggaataatccagcgctcacgcggggaacgcagagcaggcggaggaggcaacagagcctctaggagttcccagaactagcatctccaggttaactggagtcaaggacaggacataggggagtctgcggaaagcaggctccgagggtgtatgtgggccgggtgggcgcggtggggatggggccggggatgaagagcctcttctttgccgtaaagattcctaaatcagtacttaaactgatggcagatgccaaggataaggagaaagtttttttctggctgctcagtagctcaggtgccccatctcggtgatggacacctacactgcagccacgataataattagaacccctggaaccctcagagccctagtcacaatgagaaagtttaggatgtctgaccaatgacagcttaaatgatgagcagctaaagtgagggagaaagatgtgtactgtttacaggcgggagtctgaggcaaaacattaaacaacgaggggacctcaacaatctatgacatgaacaccgaaaagaccgctggtctgaggcaagaaggcaccagtagcaattcactcctagccttagtattgacctcctgtcttcccaccatatactaatggacactcgagaagcgactctcttgtggcctcacccaaagactgtcatcaatgatgaaactatttaaatcacaaggtttattgaaactcataaaaggtgcgatgccaaatcttttgctcaagattctatataacatcaatagaagttttattagaggaatagacaaacagcctgagtatttttgaagattccgctcttttcatggaaacaggcagatacaccagatctgagacccagccctacagcaatctagagcagcttcatgtcaaaaactctcctgttcagggaccagatttcaacagctcatggtttgtgctctaatcagtccaagcttcaaggaggctcttgagttcccaggattacctaccacctgtcattcctggaagagactaagcttgcagagaaaagtaccagcagccagtgctgattaggcagtcttcagtgagagtgctgggtgggaacgtgcagcctctgccgctgcattcatcaccattatccttta

SEQ ID NO: 317094 - DNA, 4001 bp, Homo sapiens
ttgagttaaaaagagcaagaacgctgccacatagctagaaaatatccacatgttgaaacctttcggtatatgtttatcagtaaagttaatgtggcccccttccctacaggctcttgcaaccccactgatacgtccctgacctgtttctgtgtcctttgagtcttcaattaccctgctgagtcaaacaattggagaacaaattaaagccaactgcagagaatgttattttctgatacaaaaatctgaccttaaagaactcaagccttgaatatctttctgtcaggatgccagcaaatttgcattgaaaagtctaacatttcacacagtctcactcttaattcccccactattactgtcataactagaatgagtgcaagactcagctgagtcagcccctttaccaggataaatcattattcagtttaaaggaaggggatatctaattgtacttggtaacagctttcacacccatgtttacatctgcattattcttttcatacccaccttttctccttttatatccaatcagaaaaagaacaatgtaaataaatgttaagttttgagggtaggtgtcaaacacgcacctaactcactgcaaaaagaactatatatggatgacatcaagcctttctctacagtgactgacctgcatacttctaaattatcagacccatcgtcataggtggcaggaggcttctgaacagggttattcacctggagccctgcatcattcatgtccttgctgccttctggaactcccagtatttcagtgctggaatctgtttctgaaaatgtcttcttcattatttcatttttcctaagactttgcaagagctgaggatctctgtggtgatatctgcctttgctcttctcatgattccttgaggatctcttaatttcagaggacccttgagtcagagaagggttgcattcttggtaccttgtatgttttcctctgtggagatttaaagagcaactctcacattcaatcagctcttgttgctctttacctttggatcccagatcaacgagctcaattccgttaggagtggaagacccagctaagttttcacacggcttattattatttctcctccttcttcttgacagtctgaatttaacctgggctcttctttttgcctgaatccaatgactctcatctgtggaagatgaatctgaagaatctgtgtaaagctccctccacctggggcttgagatttgaaggtgaaagtcattttttctccctcttatttgttcttctgcagcatgctcatatctctcagaggcttttctcctcctcctaggtctttgtattactgatttcttaccagactccttcctagcagggctcagcaccatgacaggggtgcaatactcaaatgactcttctgacatgtcatgcaagatggcagatctagacagagcagcaggcaaaggatgggaaatgggaatggagaggaaagccatggaaaaacagagagagagaatgatgaaaatgacagcatggaccagaagtagataaataaagatcaactgaagaaaatgaactaaatgaaaaaaaatagccagtataaattttctatggaccatgtaaagcagaagcaagagacacacattctcagaacaaacaacaagaatacgaatattgatccaaagaatatagattaagataatttgttcagcacttacctgcagatgtcctgagtggatggacagacagacaaccttgactggctcctgggagctgtccctgttgttgggctgcttgcctggagaaacaagttagataatttggcatcttggttaaggtaatacatggttgatatcttgctttttttccacatatttaaaaaattacaacaaacgtggctgctggtcatgttgcttataatgcagaacagagaatataggaagtttgaggttggttttgcaaaagtaaaacttatttgaggaacctggaacagctgagatgctgcgctattttgctgttacttcatttacgagagaggaagatgattccacaagtttctattctatttactgtaatcatttgagtggaatagctcaatttgctttggaaacaaatgaataatacttgaagatcctatgatacatggactaaagcactattatgtgacaaggataataatagtctgagaagtctaatcaaacagccattaggttgctagatacttcctgaagctaacatcaaggccccatgagatatttgaaaatactttgtaatatttaaaagcctgaatttattgctattaaaatttcattaatgaaactaataaaatatatcccttgcaacactattggcctttcatatcttttaaccctataaccatactaagtctgaaaataagaaagcctgaaacatcagattattagcataaagttgagtgcatttcactaaagtcctacctttgaaacagtattttcttcactctatttgactttaacctgttgtatttaatataggttatgatgataaataaaaaactagaatgtagggataattttctatgttccaggcattgtgctgtagctttatttactgtctctttaattctacaataatctcacaagtggaaagtaataataactaacagttttgagtgaataatatgtgcttatcagtgttctaagccatttccatatattcattaatgctcacaataaatctttgtagtaaatactataattacatacatgttacagctgaggaaactgaaaaattggggctgcttctcactgataggtggtaacgctgagatctggaccaggtatctggctccactatgggtggagatctgggtccagattcaggcctgtttgactgcagagatgaaatgcacaatttcgtcaccaagaaaataacagtaaaggtaaaaagattaccccaaatttcgaagtcattctaaaaattctcatattggaactatgtaatcatgattctgaaatccagagaaaaaggaacaaattctaactcaagagatcaggtcatatttgaagagaaggtatagtaggctaaataatggtccccccaaatatctcaacatcctaatctttggatagtgaatattttaccttttatggtaaaagggactttgcagatgtgattaagttaaccatcttgagttgaggagatttatgcaaattatactggtaaacccaatgtaaccattaggatccttatgagagggaggcagtagagttagtcagagagagaagatgaagaatatgaatagaggtaagaaaggaggaagatactacactgatggctttcaaggtgaaaaaagggaaaccctgaggaaggtggcatggggaagcttaaaaaggctagaaaatgagttctagagtttccagaaggaattcagccctattaacatgttgattttagcccagtgggatctctatttggcttctgacctctagaactataagacgacaaagccccagggaaatgcagatgcagagactactggatcccaggacgtgatgtattctggtggtggctctgctctcaaaatggtgccatgttgcagcaggttaggtcccaggaggtggggtgatccctatgatagtagttataggaaattaataaggaggtaacgatccagctaatcttaaaaggcaaataggaattattttaaaagcttaaaaatatttaaggtagaggaaaccatttgttaagagacctaaagacaccaccaaaaaactcctggaactgataaacagatgcagtaaatttgcaggatacacatcaacatacaaaaatcaatagtgtttccaaaccccagtgaaacaaagtagatgagaaagaaatcaaaagagaaatcccatttataatgatgaccaaaaaaaccccacttaggaataaatttaactaagaaggtgaaagctctctacaatggaaagtacaaaacagtaatgaaagaaattgaagaggaataaaaaaaaatgaaaagattctgtgctgatggaatggaagaatt

SEQ ID NO: 317095 - DNA, 4001 bp, Homo sapiens
tgcagtgagctgaggagcggcctggaagcccaaagagaaaacaaatggtacacgtgggaaagtcttgtgtggctgcagtaaggaaacgagtctgaaggagagaacgcaacatgcaaagcctgggagaccacactaaacatcttgatcttatctcaagggcaacaagcagccactgtacgtttttaagcagcagggtgctgggagtcaactttggctaagacttgtacagggccagtctttcagcaagtgcccatgactgagagccagctcccctcaagcacaatgctagatgctgctctaaagttcaccagccccttcctttaccacttagcaccacctcaaaggtgtctcctcctcctcctcctaaacggtctgtcctttaaatcatttatttctggctaggcgcagtggctcacgcctgtaatcccagcactttgggaggccgaggcgggtggatcacgaggtcaggagttcgagaccagcctggccaagatagtgaagccctgtctctactaaaaaataaaaaaaatagcatggtggcaggtgcctgtaatcccagcaactcgggaggctgaggcaggaaaatcgcttgaacccgggaggcggaggttgcagtaagccgaaattgcgccactgtactccagcctgggcgagagagtgagactccatctcaaatcatttatttctaaatctttgtacatccgtgtggtaaaagcattttgtccatgcagtctgaataatcgcttgcaaattatattcatttaccactgtgctattagatacaatacaaaagtcacaaagttgggatttttatttatttatattttattttacttttttgagacggagtcgagctcttgtcacccacgctggagtgcaatggcgcggtctccgctcactgcaacctccgcatcccaggttcaagcgattctcctgcctcagcctctcgagtacctgggattacaggcgcacgccaccacgcctggctaatttttgtatttttagtagagtcagggtttcaccatgttggtcaggctggtctcgaactcctgacctcatgatccgccagcctcggcctcccaaagtgctgggattacaggcgtgagccaccgcgcccggcaaaactgggatttaaaatgtggaaaagttaactccaatttgaacgtacattactttattactacacaggaatagctcatcttccactttaaagactactggaaatcaccagagcacttattttcacctctctatcttccctcaatatacagttcacctttcttgctacaaggtaaactccttgggcaaaactgagagattgggtcacctgtgcctccctccctccctaacctccagcattcctccttcctcagctcttagtaccaagctgcgcctggtaacttaagtcaatttccgctcttaagagtccctttaggatcgtttaaaggtgaagcccagcggaaaggatacaggatacagcagtgaaactctcagctccgaaaaggcttgagcctcttactaaacatgcagggatgcaagaaacggtgctcggggatgagactaaggaccggctgggaatctggaagggttccaagtttggggtttaggcaaacttcgggttcacgtttccacaaacgtcgagtttacgcgcccccgccagcagacctgaattgaatacgggccacggggaagcctaaagcaagtgacttactttaagcctcagtttccccatttgtgaattagttgctcggatccctggaggagatacgcgtacgcgcagttcacgtttcagaaaaaagggaaggctagggacaaagacgcccatgtcttatattacctcgaaagatgactccaactcgtccaccaaagtactgctggaaggtctaggagcgcctggagctgcctgaagaagcgaagcttggcccggaaggcccggcggggcctgagggggaccgggtggctgcccagaaaacataccccctagtggagccgccatgtttggaatggcgcaagagagatccactgcgcctgcgcggaagccggctcagaagctcacgtggctggtgtagtaggcgtggtcacgtgacaggaccgagcgatgggaggattctggtgcaccccggaaggaggatttttaattcttctgttttcttgtctatcgcaaaacagagtttacatgtattttccttttttcttagcttaagaattgaagactttggccggattagacctggttgtgtggagaggagaattaataactacagtggagcgagccctcctgcgagagtcaggatactactatgctagtcccgactctgccccaaatgcctggagagactttggctaagtcactttttctttccgcgggctgtttaccgttggtaaaaggagagggtcacccactcactccacaaacatttgttgagtcattggttatagcgggaacaagacaggcaaagttcttcctgaattctggtcggagatggataacggaaacaactttgttgaggttcccaatgtgcccggcactgatgtctttaaatatttatggttacatcaaagagaaagtcactatgctaatctttttttttctttcttttcttttttctcagggtctcgttctgtcgccctggccggagtgcagtgtcatgatcagggctcgacctcccgggctcaaacaatccccctacttcagccacccaagtagctaggaccacaggtgcgtgcagtcgcgacgggcttttttttttttttttttttttttttttagttgagtcaggtgttttactgagctcaagtgattctaccgccgcggcctcccaaagtgttgggaatacagtaatgagccaaggcgccaggctgctaattttttttttttgagacagagtctcgctttgtcgcccaggctggagtgcagtggcgcgatcttggctcactgcaagctccgcctcccgggttcacgccattctcctgcctcagcatcccgagtagctgggactacaggcgcccgccaccacgcccagctaattttttgtatatttggtagagatggggtttcaccgtgttagccaggatggtctcgatctcctaacctcgtgatccgcccgactcggcctcccaaagtgctgagattacaggcgtgagccaccgcgcccggcactaggctgctaatcttgtagtaacctgcttttaacatttgcttatctctctctttttttttggtgacggagtctcgctctgtcgcccaggctggaatgcagtggcgcgatctcggctcactgaaacctccgcctcctgggttcaagcaattctcctgcctcagccttccgagtagctgggactacaggcgcccgccgctcggctagtttttctgtattttagtagcgccggggtttcaccttgttgcccaggctggtctcgaactcctgagctcagacaatccgcccgcctcggtcttccaaagtgctaggattacaggcgtgagccaccgtgcccaaccttcttatttatctctttaaaaccaaataactttttttcattatatctgattttacagttattacccagcacacttactgagcgctccacttcccaggcactatttaatgatctggaggttatagcaatcatcccaaatctctggaaggagacagacaagcacataaatacatagcaatattgtgcagagagaagagctgggaaggaaaatgaaacccagtaaggggatggctagtgagaggggtgttctttgagataggtgattggaggaggcctctccaaggagatctggactgtagtgactggcatgaaaatttaactaggagtgctttctacaccgaaggatccctgaagaagcagcctgcctgggatgtttaaggaaccacaggaagctcattgccagaggagtgagccagggcagaaatgttcagagaaaaagcaggagcttccctttgccaaccaggctcggatcaagtcatcttcccagcctcagtttcacttag

SEQ ID NO: 317096 - DNA, 4001 bp, Homo sapiens
atgggtcccctctgctatcctgtctgctaccagctgcagaggatattgattgagtcatcgtgttgaaggaggtaagaaggacttgaaatgagaggacaaaatacagggtgatcctgggaaaagggcagagtcatctttgagaagcagttacactgtggccacgctgatacctacagaccatccacccacacagtgggtgagcagccattgagcacaccactgcctggcgaggtcctgcatgtctaccatgaattatcttgtaagagtcaccctctttgatgcgtcaaaagctttttttagccagtccacactcctatgtggccagcctccttctgaaacgtccaggacactcaatgcttcccaaactttgagatctggaagaggtattcaggggagctgctctgctgcaacttcctgacaaccttgcacaactccataccaaccatgtctttatggattacatatgggaccagaattgactgcagtacaacctgagtcttggcaaagtaccctgcaattcctcctgcagcaggaaaggataagcaagctggtgaagagatgccatgggcagttcccacccacctccctaccttgtggaagatgaccacaaggccatttctcattcgtctctttagtttcagttgagcacaggacttttgaccttgctcccttagggttcaactgcagacttctttgtgagtatacctatttggctaaggggtagagctgactcctcagtagcagaacgacctaccacctgtgccatctgtcatctggcctctctgttcagtgtcattctatggaattagagatgcagggagctgacaccatacaggtgatgcttatgttttttgtgtatgtaataaaatgtctgactgtatttgacttcatggtccccctactggctgaatctgtggaagtgtggtgtgtgaacctagcagctgcattcaggagcttcgtaacccagttaccaaccacactgctgcccggggaccacttaattgcttgacgggttgtgagtgggaaagtcctgggagtctgcacttgggtagaagtggagattacaaaacccaccccaattatccaagttactcaaaactagatgggttatcctggaaagcatgatgagtcaggtgattgggcttcccactagcttaaaaatatgaaataatacgccaatcaaaagactctgagactaagcactgagtgttgagtggaagttctactgccaagaaggaaatccatttcaaccaagagaggatagactttgggaggtaagacttggcgggaaagtcgggtgagacatttttttttaaagccaagactcacagtctttgtcctacattggagaaagacagtgctgggtgttggtttggcaggcactgtgtgggctagttggttaggcatcaggtaagggctgtgttggccatttgtggttgctttcgtaagtggtcttgtgctgcatatatgaggtgtgcacgctgggattatggtgcccagctgctgtctgtgtgaatgagggctcccctgcagctttatggtgctcaggggtctttaacttctcttcttgggccatccttacgggactatgaaatctggttgcccctgcttctatttgtatggagcacccttgcaggcttacggggcctcagggtccctttcactaggagccagatggtactgtcatcacgaggctaggtggccacattaggataaataacaagtatcattcaggattttcttttcatttccacaaagcagcaacaatgaccaaaaacagcacacatacatgttttgcccacttgcttgtcttaatctgatttcaaaactctcttaaaaggcattcaaaagactaaattcaaactatatgtacctcaggtcttactttgctattggttttgaaataacttgaaagcctgagtcttaccagtctaccttttcctctttctggtgtggatagctgccggcaggccaggggagcactgcatttgtttatgtaaatgggtatggtcagaaggagcaaagtgttgaagttcctaccttgagtatgtaaacatgttgtgatgaaaatggcatcttctcttggggaaaaaaaagaaaaaattcttggatttcagctttaaaactggataattacgaaatagcacctgaggttaggctttctcaaaagcagacactgagacatgggtctgagtgcctctagttaacttggtaagtgacctcagcaagcctacgctagagagtggggcagggaggcaggagaggaggaaagctaacaataagcagatggccatgtgggcaatgggggctcagtctaataggtaagtatatatataaagaggcacacagaaataagaacataaatatggcactaggcacagtggctcatgcctgtaatcccagcactttgtgaggccgaggcaggcagatcacgaggtcaggagttcaagaccagcctggccaacatggtgaaaccccatctctactaaaaatacaaaaattagccgggcgtggtggcacatgcctgtaatcctagctacttgggaggctgaagtaggagaattgcttgaacccaggaggcggagcttgcagtgagccaagactgcaccactgcactccagcctggcaacaagagtgagactccgtctcaaaaaaacccccaaaaaacataaatatggcaaaatattaacaatgagtgaatctacgtgaaaggtctaataggcgctctagtcttccctttctgaaggcctgacatttttcaaaataaaaagttaggaaaaattgagccaggcatagtagctcacacctgtaatcctagcactttgggaggctgaggctggtggatcacctgaagtcaggagtttgagaacagcctggccaacatggcaaaacttggcctctactaaaaatacaaaaattagccaggcgtagtggtgggcgcctataattccagctactcaggaggctgagacaggagaatcgcctgaacttgggaggtggtggttgcagtgagccaagattgcaccactgcactccagcctaggtgatacagcgagattccgtcataaaacaaaacaaaacaaaacaaaacaaaacaaaacaaaaacggaggatcatggcggatgggttgggaggaaggactagattgcagctctggacagagaagcatgtggaggcttgcgttgtgaattttagctctagattgactgcaagaacaaaccaacaatcccaacaggagccacagaccctctgaaggacgtggactgctcctgcaggacctgggagacacctcaaatactgtgagtgccccaactgtggaagtgggaaagggaaaccctcctctcccaaacacacacctccacgggagaagctgaagttctgtttgtgggagaggtttccgattttaccaggagctgagtcaagttagagagccagtgaaatacaggggtagaggaagcagcaaaaaagccctaggagttcactgagtccccaagcagcctattgttgtctggcatcacagagatccatcagaagagtggccagaggagcagggggtaaaactccacagggagaaggaattctctagctgaacttcataacaatttgaacggagcagaaagcctcctggccagaactccggggagggcatgaatctggagtgcaaacttcacaggctggggaagaactaaagcccttttctttcacatctgggagttggatagccttgggcaggttttcaagcccatctaactctctccctggaaacagacttggggatgttggtggggacacggtgggcgtgaggctggcccttcagtttgcatgggagctgggtgaggcctgtgactgcaggctttccccgacttccctgacaacctgcatgactcagcaaaggcagccataatccaccatcccccactacagccgcagcatgactagcccaaggagaatctgagctcagacatgcctagaccaacccccacctgatagtccttccctat

SEQ ID NO: 317097 - DNA, 4001 bp, Homo sapiens
gatctcataattcagcacatgtttattgagaacctcctttgttaagagtgttaagtgctagatgctttctgtttgcttggttctttttaaaataactgaattaggtagatgctactaatttaaatagacgttgcttgaaagaaaaacaaatgaagagagcaagagattatctgaaatataattgaatttgtaaatacttactggtgctgcccaggtcacactgaaaaggagtagtcccacacagaaaactcgcatctttgagaatctctgtaaaaagacaacaatatcttaccacaaagcattgccagttataaactgcagccataagaagagataaaacacataggaatatataaacacccttccccttggcagttcatatccttttgtgtatgtgtgtgtatagactatgtataacttgcttatacccgagtgtggacattttaagaactttcatatgtctagttattccaatgtgaaaatgaaaattattcaatatcattaaaacagtaaagtcagttgatagaaatatattttatagacacatttatttgctctatcatcagctcttcttcctcttgtctttagaaagagattgtttaattatttgtgtaattcaaaatgacattaagttgatgtagcagctcataacacactctaagtttgtcagggtagcagattgcactgtgaggaaagcttatctgcctccgggctggtgccctaatctgtgtctcatgttcattagcaatgtgtctgaattagtagccatccatgggctggagagtgaactaatttttgcaacactgacattaatggctaacatttattgaatactaaaatgagccaagcactgggtctaagaattttgcatgcattcaattatttgagcctcacaacaaccctacaagttaggcggcgttactatgcctgttgtatagattaggaaatagacacaaaaagatcaaataacttgctttagaattcacaaatattaaggggcagaactgggattagtatccaggcaatgtggctctagacccagttttcttcatcaagactctctgccaccttaaataactttctattcttttatcttattacagaaaaatccatgtacagttgacttaaaggcaaatcatattttatattgggctcaacaaaatgatgttcaaaatactaacatttagttacaaataaaggtatttgtttatattttggtaaatataccaacaggaactagtgagctcacttaagtagccattagattggaaaaaagtcaacatgtctttggactattgatcttattattatattgtgaaaacaataaatttatgccactctgagatttcttgaagaaaaacttgtttttatgggaaaaaataatctaaatattcttgcaatctttaaacacctcaaggaaaagctggtatttggagaaatgattgtaactattaaatatattctaaaatcctaggctatgtttttctaaattaatgcaattagaaggatctaaattctaactatagtttacccttccaagcattttatagatcaggacaacgtaagtaacttatgaaatgagttaatgctcatcagtagaaatatcaacacagatgaggtttcaaagtatgaataagatcagattttcctgattgcagtttgttaagtgaagggatagaagaaaactgaagtctgagttactgtggatcttgataatgctaataacaaaaaaaaagagaaagttgctatcaaatcatcaattttagttgatgatttctagagcatggtaacgcatttcctattttataaaacaaagcaccaaatattacacagttttgctcagtagagaagattttcaaaagtaataaaaccatacttgggtggcaagcatcttaaaaacgtaaacaactatgatataaagctatttgctgtcaagaacatgaaagccaaattacctggtatctttcaccttcagaatacctggcttcttgttgcaggattagaagtctctgggcattttgctgaaatttaaagtttgttagagttcccaatggccaatcagcactggctcactcagcgctagcaaacaatttgttacaagcgcccacagataaccatagggggtgaagtaattttaatctaaaaatgtgtttgtggtagaaagctactatcaaatgttccagaaagtgggataaacagaaaatataaatacctcagtttggacatcatgttgtcagataatcaaaattgatttcagaactgctaattaggactgactgaatacctaacaagtttagaaatggaaaacatttttgctatccttttatgtagaaagtttatgatgtcaattttatctaagtgaaattcagcaacatttaacaaaaatgttttaggtgcctactgtgtgacaggcattggcgaaactgcagtgaacaaaacaagacagaaaaaaatccctgtcttcctggagcttagaatccaataagggagacagataataaacaagataaatgagttaaatagattagatagtgacatatactaagtctaaggagaaaaagtattgttggggagtaacaagcattgggggtggggacactgggttgaaattttagataggaagtcctgggaaggcctcaatgagaaggcaacttttgagtaaagaccttgttatggtttcaatgtacgtgtccctccaaaattcccatgttagaacttaaacccaaggtgacagtattgagagatgggctctttagaaggtgattaagtcatgaaggcagaccccagtatgaatgggattaatgaccttataaaagggcaagaagaaactagctagtccctttttgcccttctgcttgtctgcagtgtgaagacacagcatttgtcccctctggagatgcagtagcaaggtgccaaattggaagaagagatagacagccctcgtcaggcaatgaacatgctggcctcttcattgcggaattcccagcctccagaactgtgtgaaataaatttctgttttttataaattacccagtctgtggtattctgtagtagcagcatgaacagactcagataagcctgcagccatatgactgtctatgggaagaccattccaggaagaagaaataagaaaaatagtgccccagaaataaaagccttgtgacttgttccaggaacagagaagaggccactttggttggaggcctgagcaaggggaatagcaacaaatgaggtcagaagggtattagatggcagatggtataggacctgtaggtcattgcaatgcttttgacattgctatgagtgagaagaaaagtccttggaggttttaagcacaggcatgattgaggagtgactgaagtaggaaaaaggcagagagaatggctaggaagctcttgtaataatcccagccagagatgatggaggcttgaacctgagtgcggcagaagggatgatgagacgtggtcatattctgaagaagtttggggaaaaatggtaataggatttgctgaggtaccagatgtggcctgtgagaaaacaatcaagaatcaggatgacaccaaggttttgacctgagcaactggaagagtaaagttgattttttcttcatattggaaaaaatgcagaagaaaatggttttgaggaaaatattgtgagtttggatttagacaaattttataagatggacaatttaagacactcaatttcttaatgaaacaagtaacaaacctatactagaataagcctttccagtgcgattgcctgctctcttgttttgcccaaactggctaccaaaataattgtaatagtttgagaggttccacttaatataaaaatattataatacctgtaaaggtcattgacattatgactatatattaaagcatcaataagaaattatgtaagagttatttaacctatactttgtgataagaactacctacagtgaaacacacctttaacagttgtatattatatatacaaatgatatataataagat

SEQ ID NO: 317098 - DNA, 4001 bp, Homo sapiens
tagtaataagaggaaatgttcctaaactttatattaattatcgtcaaggcatcttttatagttttatcctttattgcatttcttatgttgattcttatatgatcatgtgaatataaatttggacaattatatcactcttcaaaaatataaaaccagggcaaacagttctggaaattggactataggaagaagaaagcataaaaatgagatgggcagatattaagcaaaagaaagaaatgatagtatggggtgtcagggatcttcttacagaacacacacacacacacacatatggattagaaacatacttgacaatatagagtacctcggtacagttttgatttattgtgacttataacaaagtctttctagtctaactgcatcttgatgaatattaaccgaattgcatagcctaataaacattcattttcttccttttaaaaatcatttagaatttggcttataattctaagacgtatgcaagtggctgagtatatactaatttcttaagccaccaatctatcatttaaaaattcaggtaattactaaaatggcatctatatacctggaagaaaacatcatatttaatgattcacagttacaaatgttgcctctgcatccttgctgagctgctttcatttgaaatacgcatccctcccttgtcccctctatacccccaagcagatgtcttaggcttgaatgtggccctgtaatggagatggcattgtctgcctctgggcaggaaagctggcatcctcttctgatcagtggtcactgaatcaatgttgacatagcacatttactggaaaatgatgagaaagccccactccagctgcttcttggaacatgttgctcaaaataaaatcttcagctggccaacttgagctaggtcagcaagactcatttttccaccgtgagaggtgggagaggcacctgagcctctaggccttgattgagtgaggtctgtgcatggggtctcgcaaatgtgtgttgtgagcagtacagcctccacagtactgtactgcacacccttgttgcacagagtgtgtgcggagaagggaacacatttccccaacttccactgccctccatgaggccctctgcttccctggtcatcctcatcagcctggttaccctagcagtcacccactcactcaggacctatatataagtatgattggcaatgggatgactatttgtttccatggttctccaaccaaaaaggttattctgataagttaggatgctgctcagacattatctaattagcactgtgtctgcattgcagaaaataactaacactcagcattttcacaagataatttggtcacatcctgaatattcaactgggtgagtcagagggaagaaaagacacacaaggaagtaggagcttgatttgggttaagcttggaggtactacgtcccacctctagcctcgctgatgaagagaaaatcacaagtaggatcccacagtattggggtgttgcaagaaatacagaagagttcttgtctctttgcatttttatctatttactaaatctagctggttagctttaaaacattcatgtcaaattctttaagtttacaggaaaatagtcaaagattattttaccatgttataatttgagtctttgagtatcactcattagtatcagctgatttgaaatgctgcggctgcctcttggttttctcaaaaaatctgtttttggtgttccttaaaagacaatgttgtcagatctcataattcagcacatgtttattgagaacctcctttgttaagagtgttaagtgctagatgctttctgtttgcttggttctttttaaaataactgaattaggtagatgctactaatttaaatagacgttgcttgaaagaaaaacaaatgaagagagcaagagattatctgaaatataattgaatttgtaaatacttactggtgctgcccaggtcacactgaaaaggagtagtcccacacagaaaactcgcatctttgagaatctctgtaaaaagacaacaatatcttaccacaaagcattgccagttataaactgcagccataagaagagataaaacacataggaatatataaacacccttccccttggcagttcatatccttttgtgtatgtgtgtgtatagactatgtataacttgcttatacccgagtgtggacattttaagaactttcatatgtctagttattccaatgtgaaaatgaaaattattcaatatcattaaaacagtaaagtcagttgatagaaatatattttatagacacatttatttgctctatcatcagctcttcttcctcttgtctttagaaagagattgtttaattatttgtgtaattcaaaatgacattaagttgatgtagcagctcataacacactctaagtttgtcagggtagcagattgcactgtgaggaaagcttatctgcctccgggctggtgccctaatctgtgtctcatgttcattagcaatgtgtctgaattagtagccatccatgggctggagagtgaactaatttttgcaacactgacattaatggctaacatttattgaatactaaaatgagccaagcactgggtctaagaattttgcatgcattcaattatttgagcctcacaacaaccctacaagttaggcggcgttactatgcctgttgtatagattaggaaatagacacaaaaagatcaaataacttgctttagaattcacaaatattaaggggcagaactgggattagtatccaggcaatgtggctctagacccagttttcttcatcaagactctctgccaccttaaataactttctattcttttatcttattacagaaaaatccatgtacagttgacttaaaggcaaatcatattttatattgggctcaacaaaatgatgttcaaaatactaacatttagttacaaataaaggtatttgtttatattttggtaaatataccaacaggaactagtgagctcacttaagtagccattagattggaaaaaagtcaacatgtctttggactattgatcttattattatattgtgaaaacaataaatttatgccactctgagatttcttgaagaaaaacttgtttttatgggaaaaaataatctaaatattcttgcaatctttaaacacctcaaggaaaagctggtatttggagaaatgattgtaactattaaatatattctaaaatcctaggctatgtttttctaaattaatgcaattagaaggatctaaattctaactatagtttacccttccaagcattttatagatcaggacaacgtaagtaacttatgaaatgagttaatgctcatcagtagaaatatcaacacagatgaggtttcaaagtatgaataagatcagattttcctgattgcagtttgttaagtgaagggatagaagaaaactgaagtctgagttactgtggatcttgataatgctaataacaaaaaaaaagagaaagttgctatcaaatcatcaattttagttgatgatttctagagcatggtaacgcatttcctattttataaaacaaagcaccaaatattacacagttttgctcagtagagaagattttcaaaagtaataaaaccatacttgggtggcaagcatcttaaaaacgtaaacaactatgatataaagctatttgctgtcaagaacatgaaagccaaattacctggtatctttcaccttcagaatacctggcttcttgttgcaggattagaagtctctgggcattttgctgaaatttaaagtttgttagagttcccaatggccaatcagcactggctcactcagcgctagcaaacaatttgttacaagcgcccacagataaccatagggggtgaagtaattttaatctaaaaatgtgtttgtggtagaaagctactatcaaatgttccagaaagtgggataaacagaaaatataaatacctcagtttggacatcatgttgtcagataatcaaaattgatttcagaactgctaat

SEQ ID NO: 317099 - DNA, 4001 bp, Homo sapiens
tggtttcacactacctttttaaaatcttaacagaagattgtaatacatattaattcaaaatgccacctacttttaaagttattctactcagatggtacaactgtcaaaagcaaacactgtttcttaatttcaggtcccacacaggccacaacaagatagaatttgggaattttaaagaatctaaaggacgtgtactaggtctaacatgagtaatgctcaacatgttaaacctagtacaggtcctttagattgttcggtaatgctatttttagatcaagcaacactcctccacgtgcaagtttttccaaattatactaacaaggtcaaggatcatatcctatctaaaaacaagactgtataacacagctaagaccttttgcaatcgcttatctacaaatattgtgacgtaaagattgtatttatttatatctttacgtttttatgttttatgttggaaaacacttttattatttgtattgtgttcatatatctgccttcattcttattcatatttttatttatggcagagttaaatcgtactagaatcctttaaaaaataaaggactttacattataacagcatttcacgttccttggataatctgggtctcagaagaagcttgtgaaacttacaaagaaagctataatcatcccctctgtacagtgtaacactggaactcagaaagattaagtaactttactaattcaagatcgcacaataactggcaagggcagggccccaatcaggccttctctttattccggctctcctccccacaggacgctaccaatttaatatttgaatattcatgtgcctctcttcactaaacctggactgtaactaagagccatactattgccgcccagccctcatcctgggtctcgaaatgcagcagcaacactagtactcttcagtaaacagaaacacgagcacacgcttcagtctggaccccattcaacgctgggtttgctctactgcacaaaacttaaaatacactacagcattcacgcctaaccctcaatggaactgtccttttcactctgggaaattcagtcacaggtgactcatcccgttagcttacagttttgtaaattaataattttatataccgaaagaaaagaatgaattacacagacctctcccttccccacccccaaagttgcttaagtgtcaaagcacggtagtaaagcacaaagaagtggggctggagctagctagcgttcctcctctctgcgactccgacggtcctcgggccacccatctctcagagcccggcaggtagcttcagccccccaccccgcagggacccgacggacggcccggcgcctccagcgcccagacccgagccccgccggtgctgcggatgtggaggctcgcgacgctcgggctgccctccttcccggcgccgctacctgcctccggcagcccgcacacctggcggcccccgccccagcgcggggaaccggccccagaacgcggaggtctagcgcggccacgcgaccccgcacagcccgcttccgccccagcccacatggccgcggcgggtggcgcccccgcccccgcgtgagcccagcgcggttcccgaggacccagggaccccaggaggcaggagggggcggtggcgacgcgggtggggggaggaggaaacgcggccggggggaagaggaggagcgcgtcccgactcgccgcaagggcgggaggagccagcaggggagaagcgaggaggggtcccgcagcggcggcatatccgcggggcagcgggcgcctacctgcgagcagaagtacgagccctggatgcccagcttgatgcaagtgggacactggagcttggcctcactgctgcagccgtctgtctcgcacacccgcgtctccacggccgccatgctgcctgcccgctggaagagcgcctcaccgaggaagaggcggcggcgggagggaggaactgccgggcggaggggaggggagagagaccgagtcgggggaggagctgggcccgccgctggcctgggcgcgggagggggaggagccagggccggccgggaccacgcagcgcgccccgccccggccccgcccccgccccgcgcgcgcagctggtgccccgccccgccggcttcgccccgccccccgccggcggtgcctgcgtgcccaagcctcccggcggcgcgcacattggggctgtaagggagctcggcagggcccccccattcggcgccttcgggcgtcggccagcagagaacgcgacctgccggcgcctgacggtgaggagccgccctctcgcggcgcactctctgtgcctacagtcagataagacagtcgtcttcactgacgaacacccaggagccctgatcatccccgacacccgcaggaggctagagagggcgctgcgctcctctgcgttggattcccccgccgctccttggagaacagtcccttgggttaagttctgtttctcactgacattgtcgggtctgaggcctaaggaccaccgctcattcacagaaaggagagccatagagctgtcaacgggacggtgggctgggattcacatctgccctccctcctgccagactttttttttccacacaccaccacctccccttcaaaaccgatagtgctagtaatagtaacacaactgtcaggtattcaatacaaataatttttttgtataatcccagttgattgcttcagcagtaaataggggagaattgtgctgatcctgaaatgtcagagtcgaaagaagctgtaaaggccttcccctgcgaacctgttgcttcaatcttttcagctgtattccaggtcggttgtgttgtaactcatgcttgagtgcctccttgtcactagggaagagcgaaaaactaacatttactgatcacaaaaggctgtgaactttgttattgtatttttttaacttctccgtacttaatacaccagaaaagctcatactacttttatttttaagaactttgttttggctaggagcggtggctgacgcctgtaatcaatcccagcactttgagaggccagggcatccagggcaccaaggccagcggattctttgaggccaggagttcgagaccagggtggaaatatggcaaaaccccgtctctacaaaaactaaaactaaaaactaaaaaattagccgggcatggtggcaggcgcctgtagtcccagctactgaggaggctgagctgggaggatctgttgaacctgagaagtcaaggatatggtaagctatgatcctgccactgcactccagcccaaacggcagagcaagaccatgtctcaaaaaaaaaaaaacttagttttgcaatataagcagtaaaaatgatgtaataaaatcaagtaatagaaatgtttacatgcatacatacatatacttttgtatacaagaaaaaaatcaataagtatgtatgtatgtataaaatattttttaaataaaaactgcaccataccatataaagtaatttacttacctgatttcttcagttactatgatgtcaactttttgtttgtcgtttggtttttctttgagacagcatctcatcctgtcaaccaggctggagtgcagtggtgctcacagtgagaggtgacagcgaggtgacagcatgctggcagccctcgcagcccttgcttgctctcggtgcctcctggcctcagctcccattctggccgtgcttgaggagcccttcagccgccgctgcaccgtgggagcccttctctgggctggccgaggccagagacggttccctcagcttgtggtaggtgtggtggcagaggcacgggtggcaactgcggctgcgtgcgtcgcttgcgggccagctagagttccaggtgggcgtgggcttggcggcccgcactcagagcggccggccggccccgccggcctcgggcagtgaggggcttagcacctgggccagcagctgcggagggtgcgccgggtcccccagcagtgccggcccaccagtgctgtgctggatttcttgccggggcttacctgcct

SEQ ID NO: 317100 - DNA, 4001 bp, Homo sapiens
agccaatttcctgtgaagcaatacacacgatttaatataaaatgagcattccaaatctgaaaatccaaaatccaaaacgctccaaaatctggaactttttgagtactgacatgacattcaaaggaaatggtcactgaagcattccgattttgagttttggtatttggcatgctcaaccagtaagtaatatgcaaatattccaaatcctgaaaaaaatctgaaatccaaaacacttctggcccaagcatttcagataagagatattcaacctgcaatagcaataactaaaaaaggcagataagacagtgtttgcacagggttgtgggtaccatgttaaacattttgtaggcatcagcttatataacttatttattctatgctctaataaaaatcgatccagttttactcaagctaagtcttactatttatagacacaaggctgaactttactaccttaaaatggtaacataaattttgtttggcagtttggaaaattttgcaaaatacaaacaaatgtaaacaaataatggttataaggctggctaagtagagtgcaaccaattcataaaagactttaaaaggtagagcccctggcatctgctgagtgtaaaacactaaacaaataattgtcctatgaatgtatattgagtcaaatagaagtttgaattcaatattaaggagtaaaacgtcttctgtggtagcaacaaagagctacttaacatttttgaagataatacgataaaagaagttggcgaaaagaagacttagaaaggatacttgatttgcccaagatcgtaatgccagcgggataaggaacaaaggaacaaatctgactccaagtttccacggttttagccatattccacaaatctgttcatcagaccataaagaggataggtttcagaagtccatttactaaaaccaagtttcattactgaaaaataactgcaagatgactaattacactctatgagcattgctcctatcacttttactgatctgaatagtagaatggaaaatacagcctcgattttaagtagaactgtgcacaatctgtattttctgcatgtgcactctactaatcagcaaatgttaacttactcatacacaagaaagaagtgaaggacaatggtttagaagacaagctttggggagacaaacctaggttctatttcccagcagagaagtgagcgaccaggagtaaaattccttaacgtatggagcctttttcattacttgataagtgaaggtaataatacctgtttcaggagattattgtgactaacacagagtaagatttcaaatattaactgtggatgtgacaaggatactctatataagatgcagaatctaaaatttacactcaggctacttccagtgttgtcttcagaaagatgtcaaagaaaatactgtaaacgtatttcataatgaaaccacaatctcaagaatttggggctgacgacgaagaaaagaaagaaatagatgaccatttaatagtgaagagaaatgtaggggataacatgacactcatcctggcgtgaacatgccagacactcggtgggagttccacaaagcttaaaggctaatcctggcattcggtttagcaccacaaagaccgcggaaggaactggaaaaacattcgggacaccgcgaaaattgagaactacaaaggcagaaccagggatcaagatcgcaggaccagaaaggccttaacagcggcaggtagagaagggacagaaaaaggcggggtgtggagggaggaggcggccgcgcactcgcattctcgatccctcccacaggggacaccagggccgcggacctgctgcgcgaggagctgtcgccgtaacttctgccgctcccggatctcctgcaagcggctatccatgttccaactccggcttttcactatcccgagtacttgtcaatctccagtgaactcttatccaacctttcttccgagtctgtggaacaaaattcaccgggagcttacgaacagagtatcctcatagctttcctcagtagagacttccggcgcggccggaattggctcgcttggcccggaagtcccgcctccttctggacgcttgctatgtgacgccacttggaagggacccagtaagggatctgttgcgccacaggggtctccagggccctcgcaggttggggtggtctgagctagtctgaaggaggacagtcagctgacttctcctttatctctctttcccaggatagcaggttcccttggtgtattacagtttctgaagtgttgattcccttttcaattgattccacagatgacagtcctgacgtttaaaaaattgccagataacctttaatttttttttttttaacagaacacaaacttaagccagattgcctaggattgaaccttggcctctcacttcctagacgagtggccttggctagttaaccaccttcgtgagcctcagttttgtcatctgtaaaatgggagtcataagtgtctacctcacagagctgtgattgaaaggataaatagcaccttgcacatagcggtgtagaagtgcttgttattgttaatattttatttaccttcacgcaggtaacagccacaacatctgcccactcttccccacaccttactgtcccttgaaatgtttcccattttactatagtatgcattttttggcttcttccctttagggaaatgagtatgtgatagtaaagcgtgtcttggtttatgtcctaggagtcagaagctaagagactcctttttgtgcttgtacatttgtcttaactgaaaataacccaaggataaggaaacaaatagcttcctgaaattactcggattgcgggggtgaggggtgagggctggggggtggtgattctgtcttcataggatggcagcaaaggccaaagtcttatttgagttattaccattattattcaccacacttgccatcttatttcaagcctacagtggcggaagtggagtaagacatcatgttgcctcaagtttaattggaaatcgcggtaagtacttaacaaaattagtaataagtctgttctttcagagtagatttaattttcagaaataatattaagtcatccagatcaaaaccagttgagtcaggctgggccaaaagtgggcaagactagattctacttagtcatgcccacttttatagaaataattataatgtatttccgaagaactaggtctgaaagacaattttgaacaagtagtcctaaacaattccttgagtaatgtcagcactacttggatactgtaaaatatttatgtccatatgagttaaagtgtatttctttaaaaatcagttgtattatctggcaatcatttaagttgaatactgatttaaattttaccaatggtgagaataggcaattattcacttaaatatctgttgatattgattgagcattttatatggcaagcactgtgataggccctagagtctataaagtctgtcaaagattaaaaactaaagtcggtttttctttatgagtttactgtctaatggaggatttttctttttcctgataagttgctatgcaggttacttgcttgtaatctttgaaccccatactcacctaccctctgcttcgagatgatggctaggcagggagtccacaaactacatttcccagccttccttgttagatggcttcctgtaagactctgcccacaggaggcacaggcaggaaatcaaaaggtggaacatgggaaagctattgtccatttattttactctctgcttctggcatctagagcgatgactatgtcccttacaaagtctagagccagttggagcagcccctcctttccttaccttaagaaagtgacacccttaacagtgagtgagtttgctcttgtgctatgatactactacttctaccttctgttccaccagctcaaggactggtagccatcctgcagtttaaaatttctgatttaatcttacttctccctttttgctcttctagccttcaatatctgctta

SEQ ID NO: 317101 - DNA, 4001 bp, Homo sapiens
aaaacaaaagtcttccagatagagatcacacattagcctctcctgatcctgtggaattgaagtgacagcaccaggcaagcaaagcaaaccagctgctgctcctgccaatgacaggaaatagccccattctctctgggcctggaggggctggcatgaataacagctctctcaccttttcagcagaaacgagacatgaaattgctcctttccaggctaatcacaaagtgaatggcagtgtgctccttgagtgactcaccgatgatttttgaacgcctttttgtgcatgtgcatgccatgtacacacacatgttccggcacaaatcctaacactgtctgaccttgctatcggtagtgaggatgccttttccatctagttcttctcatattcactcagtctgagtgagaggctcttcaacatttttcacctacaggacctaaaggatgatgtggtggggcacagagggagaatgaatacccgctggccacactctggttgtgtcataccctctggtttcacctggtttctcatctgtatacatgaggattaataacacttcactgtagggcttattataaggattagaaataatatatgtcacttggtgcagcgacttagtaaatggcagcagttgttaatgaaaattataattttgttagtttggttctaacagtagtcttagtgtacctaggtaaggttctaggatattagtatcatttttcttttttttgtttttttcagacagagtctcgttctgtcaccaggctcgagtgcagtggcgcgatctcagctcactgcaacctctgcctcccaggttcaagcgattctcctgcctcagcctcctgagtagctgggattacagatatgcaccgccacgcccagctaatttttgtatttttagcagagacagggtttcaccatgttggccaggatggtctcaatctcctgacctcatgatccacccacctcggcctcccaaagtgctgggattacaggcatgagccacgcgcttggcctagtatttttcatactatattcaatcacctctttatttaaaaaaaaaaacaaaaaacaaaacacaaaaaacaccgctccatataaacttctagcctattggtttgaaaatggaaatctatgtccatattataatatggacatttcccccttcaaaaatgaaaagttaaagactgtgggtttaccaataggccattccagctctcagattctgatattttttgagcaagaatctctcgtttctgttgttttctgtgtattgcttggttgttaggtacactgctttgtatattatcccatgttgcttatgctctgaaattaccatcatgcattgtaattacaaaagctgagctggaacatcaagtactagtatcacgagttctttttaaaacttgaaagttttaaagagatttaaaatagctaactgatttatcagcaaggctgctggctacaaaccagagtgctgaattctgatggagcagttctctgtggcaaaggcttttgactggcggccactagcttggggtctactgacaggctactactatagtccatcttagcacccacaaacaaaagaaaatggagccaaatataactaccaactagttcaatgccctcaatacacagatgaaggagggacggtgcagagtcagcttgccaacgctgagtcagcagttacaaggaccttttcgctaagataccacatatgtatctcagacgcagtaagatactacactttgggataatcctcgaaatgttggaactgaaattcaggccccagtgctatgctattcccacagttctcttcctctctaggactgaggagttcagtgccccaacccagctttttaatacccagggataacctttgctttagggtccatgtaaaagggagatccaggtcttgggtctttcttccctttgattcagtcaccgtgggttccctagcgatagctcagccctgcagaaagacctgctaaggtacctggcctgcagtgtctttgttaccatggctattgccctccattcacaagtgtgacatcactgccttctgacttgtcctggaggaagtggctgtaggaaccaaaaccagtgtgggctaggggttgtgttccctcacctttccactgtcagtagtgaaggttcttgttatagccactttttaaaattgagacagagtctcactctgtcgcccaggctgtagtgcagtggcgtgatctctgctcactgcaacgcctgcctcctgggttcaagagattattctgcctcggcctcctgagtagctggaattacaggcacgtgccaccatgtccggctaatttttgtatttttagtagagatggggttttaccatgttggccaggctggtctcaaactctggatctcaggtgatctgcctgccttggcctcccaaagtgctgggattacaggcctagtcatagccacttaataatagcaggactttgggcaaatttcagtaaatgggtatttgaactataatgtcttcaatgtgagttctaatttaactttgctatggtcccacaattcctcttggtgggtaaaagttcgactctcctaggttaaacgcgattcataatatgtaatattttgacttaaaggaagaagctttataatgctctacaaccttgactggctaaccaaaagcaatgtaagtgacagcactacagcaaaccccacatcctggccaattagacggctagcagcctcaaccattcggaacacagctgtgaaccagaagtaggcaactgcaagaaaactccattcacttagctcctaaggagatatacagcattagcctctattcttttttcagggcaattaagataaaatgagggaaagagatttaaaatgtaggttttcctggagcagaaactcttttggggattgctcattggttaaagaattgtggaacaggagggcaatgtgaatggaagaaactaataagctgctactttagaacaatgttcttttcactcccccaccccaacccctctacttcacacagtaaatgcctaggaaagcagattaactccttctggtcaatctgaccaggattgggttttcagacaattacttctcgcatctaaaacaagaaatgcaccgattcccgaagacccaatcctctctctggctagtctttcccggagtgaggtgactcacactttttggtcagaaatgcatttattaaaaaccaagcagtctcctgttgtcccacatccttccttgttattgcatcctccctccctccctgcctcagcctagaaactgcagccaggtctccaggaatcccagccagtggctgagacttgcactgaggtttctttcagaagtgtggtctttaaatccacggccaatgaattaaatggacatttaatgataaacaatggctatattgtttattccagccatctccatgaaagaaaacaaaactcccttaaaaattgaatatattatttaggaaaatccattttacatttgtctctataatgtattggatgtattatattacaaaattccaagaagcctttaaaaagacttctgtgtttgtcctttgtcttctgtgtcaatgagggaaaaaaatgaattaattgcttctttgaatccttaaggatatatattctctcctgccttagaaaaacaagacaagatgagatctttaaatcatttgcatgagaagaactaacatcacgggtgctggctccaaagctcctgtttatattttattatgacatttgatacaactttaaagcctacctcctcctctctccttctcatcctcttcttctttcagcagcttgccaatggaattataccacttgaactgtgggtcagggatgccataaacactacagttaatcaaggcactgttcccttccttgactatgatatggtcagttctggcaatgattacgggcacagagcccaagaccacgttagtgccatttaaagtgctgttagtcacactctt

SEQ ID NO: 317102 - DNA, 4001 bp, Homo sapiens
gggaatgtcacctgaggatatgagacctgctgttcaggataaggtgtacatgcaggcagtacttcatgaaagattttaaacttgatgcatttttatagaaaagagaagcacaattattcaatatttgtgttggagttttcaaacttatttttctataaatgtatttagaaataaatttaggatgagtgaacatcaccaaccagactatttggctaaaatgggggactgcaggttctaattcataaaaatggtaatcatgttgttgctactgctgttgtctggatgtttcaagcctttcctattattaaacctcggttatgcagcatcacaggacagagccaactctatactgggggaaatcaccccagagagtatccagaattagagctggagccatctcaggcttgcaagcaagcaccaaccttaaagcctacccacaactcaatgaaaagtcaatgcatttctaaagtctattaaggtctataaagaatgtaaacaattgttttgtaataagcttaatgaataaaacaactgaacccactaagtggtacttatagaaaagaggcttgagaatttagctttagttagcagaactagttcccactagaacaggattgtttatcttgcccctattagatacaataatcctaatagtgttaatggtactaaatgttttaggaataaacaactgtagaaaccacactgggacctacaaattgcactttctgtgtaagtaaaatgtcagaagaactacactgttataacttacggtctcatgaaacgacatttttttccatcttgtatttcatcttgaaggattttactatgttcagcatagtagcaactgaaaaaaatgtgtttcatctagaaacaaaagtgagaaaactacaaaaaacactgagcttctgcaatgctcggtttccaagtttttaacattaaatcgaagataacgcaaaataaagattgccacagtaaccaaacttttctgctaagtatccttaaaaataatgacagttcgatcgtatcttaactgttttctacaatgtgagcagataatacacctacaaacctttttttgctaccttgctttataaagcttgcaagtttttttttcagggctggagaagacagcttaatgatcaagcttaaaataaatcggttctgcaatcactctgtattttaatccgatgaagcacgtttccccattccacgccatgaagcaattcgatgtcaacttgttatggagtcaaatgcgacaaactccgagagcttcagtagcgaggcggcggctcgcagcacccacagccgcccgcactcctgcggcatcaggacacggcgccctcccgacgcggaacccgcattcacgttctccggagccctggccagcgcacgctcctccctgtccgggtaaactgaggcacagcgatgagagagatccagagcccagcgaaagcccccacggctgttcggcgtccccttcccccacgacacctaggaggctcgccggcagctggcagtggattccgcgctcctcgccctcggaaggttacggttcgagcccaggatgcggcagtccccaaacggccagcccccgccccgcacggatctcgaagcatcctgcgaccccctggagcccgctgcccggaccctgcggcgtctcgcagcgcagcctccgccgcagtctcagccagcccaaacacccgaaagttcggcggccccggcgccgactcggccgccgacccggtgcggggctggctcccacccgtgcccctccgccccggcccgccgggggcccccgctaacctgacaccgccgcgccactcaggtggccgccgtgcacccctcgccatggccagcccgacagcggccgctgcgccgcactctgcgccggacgcccggtagcgcctactgcgggcgagccgcctccgccggcgcctcacagcgttgcgagctgcgccgccggctgccgggagcgcggagcttcccacctacaggagcctgggccggccggggccgagcatgcccagtgcggctcgccgggcggcgcggaggcgcgggtgtagccgccgggttttcgcggcagccgcgggcgggggcagcggggcgggcggtgcggcgcgagccagtcggtgctgcggagcggccccgcggaggagccaccggaggctgtagttgccggggagtcccgcattcagtccgctcagcctctgggccgggcctcggcggcccccagagccccacacccgcaggcccagggcctccgcggcagcgcgggactctcactccgctctctctcccgcccggggcttccaccgcaacttctgtgggcgtcgcatcgcacgcgtgttcaaggacacccaggaaaaggcttcttagggtcccatcctggggcgctaaatgggaaccagtcaacccacccccaagcctaccctgtctccttgcaatcaaatgcaatcacgagcaaaccaccttgcttccgaaagcttctcaggccttcccgggcgactgcgctgtaagtcttaaacgtctcttaaagcaaagtccacagatggaagagtctggaaaaaaacccagcgggccgttccctggtgactttctgagtggtggggttccaggaatttttttttcattttctttaaaaatattatttgtaatttccacgttttttctaatgaaccataagttgattttttaattaaaaagtagagtactctaaaattattaagtacctacagaagtttcgctacacgatcctgcaatgttagtggcttcttctcctccttatctccctttttttttttttttttttaattttaaaagagaacagagactctcaatttctggggcgggaccaggctccttcccccggctttttagtgcccgccctcttggccacaccccactccggcctttttactcccgtaccgccctcttcccggtgggttgctgcgaaaacccggaaaggtggactttccacattgacgctcccggcggctccggcagccagactgggcatgttccgccgccgggtcaggcattgctgtgccaagagaggagctttagcaactctcagtctctctgctcctctctgttcctggcaaactggcaaagtagtgcctctgaccccacgccccgaggtcggacctgcagaagtgggtcaggacccgactgagcatgctccgggcagtgccaggctgccgcacgcggctgcatctggttgcccaaggttgatgtagccgcggtctctcgtcacgacatcgaagctcgggaaacggatggaagcagggctctagagaggcacgattgcatcgacacgtgggcaggtcgcccatgccaagggccatgttggtgggtgggtgcgtgggatctgtcgtatgagtgagtcaaagcctgattttttcccccaaaaagattgaaatgagatatcatattttaacattagttttatggcatcttgaatagcaacacattttagctcaaggaatttttcagctgtccttttgagaaacgtaaattttctttgtttttaagtatttaataagcattctttacaattgcaccacagcgcgaactttccacctgctttattaattatgacatttgtgtccccactattaaaatattccgcagtattatatcccgttttcttctccagcatttctgcattcactctgactctatttcctcccctcccccatctcttttaaattctcagacaacctgcaaaatgcactcttgctatcttagaaaccacttgaggtcggtgtggggaacttgcttttaattctcatttagagaagacagtactgaaatggagaaaagtcacagggaaagtacttttacagattgtagattagtaaagaacccaaagagagcctttcattgagagcagaaaggcgaatggaattcgctgttttctgtctaaggaggaggaggatgggcaggcaggtcagctgcccagtggggcttggtgtgatagtgggagtcacccttcatttgaa

SEQ ID NO: 317103 - DNA, 4001 bp, Homo sapiens
agagagcggcccagcctccctggcatctggggctggcacacaggggcactttacatcgctatggaatcaagcctccagcccctaggcctgtgggtcccagaccacagccctacccgtttctccaggggcagcgtctctggcaggaagcagaagatgaacagcaggtcggaggctgcgaagagcagggcaaaccagggtgccatttccaggggcagggaggctccgagcatagggcccagggtgaagcccagtgagaaggccaccccaatgaccgcctagggaaaagaccacccgagctgcacagggagacccaggcccagaagtcaccaccaggaccccaaaggcccagcctgtgcacttaccatgccttgactgcgggccagaggcgagcccaggtcagcaacgatggccgtggagaggctgacgttccctttgctgatgcccccaatcagcctggaggccaggaaggccgcaaagctccgagaggtggcccagactgcatatgaggtggccacacccatctgcccaggggcaggggccaagaggcaggggcggtcgcttaaggccaggagtggctcagagtagggcttggcaacccagacaacacccctcaaccctgccctatttcgaagcatctgagggccacttgcgttctcagtgccttcctaggggccaggagcagctccttgaaagcctggctctggaacaggagccactggtcccccgagaaccccctccaggatgcgatgagggccaaccagtggccatgaggggcccacagccacctccctctccccacctaaccccatggggctactggctgggtgggaggaggcttccccatgggcacccaggcccaggaacataccaggcacagcagcatcaccgggcgcctccccaagcagtcagaggtggccccagtgagtggcgcacacagaaactgcaggacagagaatgccgagccaatgagacctgagagacagatgtcaccatcatggggctgcctggcaccatgagctgtggtcttggggccctcaaggccaatgtccagccccgtcctgagggtccagtcatgctgggccctacactcacaggccatggcccttgagccgagggggccccaatggagagatgaggaaggatctgaacgtgacacgcggaggcaagggatcatgcccagaagccaggacatgtgggcaagggcaccagacatgccagcccagggagtgggaaggcaaggaccgagaattggggaggggcctgggctggaccacgtccaccaaacataggaccgtagagagcccgccaagggcacagagccagccatacctccgaacaggacactgttgtacctcttctccactggcatcccgatggcggtggcaaaccagtccaccccgccctgccaggagccatagagggggtcctaggggatgaggaatcacgataagggctggggaggtctgatgggcctggggggcagggggcactgtgggccgcagggcaaggactcacgtgggcacggccgtggctctccaacagcccgggcagcaggggcagcagcagcgtgaaggccaggaggtccagcaggaggccgagaaagacaacggtgaccacgcggcgctccggcggctgctggtggatgggtgggcgcggggtgcagcctccaccccctccccatcccatggtgggctgctctgacctggcctgggtggggtgcggcgggtcgggttagcggggaagccgagtcctccggggcctggcatacccccacacccgacagccggcgagcaccctaaaggggctgatggcaggggctctggcctacggacgcaggggccgttctggcctgcgcgatgcccccgccccgaacccaggcagcaggaaacgcaggcttcggggattgcacaaaaaatagccgcaaaggcaacggtcctgagagaccagggtgagcacatcgcggacctggccccaccccaccccacggccgcgcctcccacgccctcgtaacagcgagagaaaacttgaagccgcggggaacccggatcccgatcccgatcccgatcccgatcccaaccccaaccccagccccggcccgcgccccgcgattccggcccctggcccggactcggtctccctggcgggggccatggggtgcacaccggacgcaggagcacccccaaccccgcgcgcctcccactccgccatcccgcgtgcgtcccggtcccgcccccaccccgcgcgcccccggtcccgccccccaccctgcgcgtccccggtcccgtcccccaccctgcgcgccctctaacccccacgccgcgcgcctcccaccgcccccaccccgcgcgcccctggtccagccccacaccccgcgcgccccctactcccctaccctgcgcacctctcacccgccccacccccgcgtaccccgggtcccgtctcctcccccaccccgcgcgtcccctgtcccacccccaacccgagcgccccctacgccccccaccccgggcgcccccggtcccgccccgcacctgccgcggctgcgcgctcgggacggacggtcgcacagacgcggaacagggcaccaggcacgccgccaggggcgggacggccacgcccggccacgccacgccccggaagtgacgtacatctctgcacgttctcttccggccggagtcagtggcggggttctcgccggtcctgcgggtcgctgcttggctgtgggttagcagcaccctgagcggagcggaagagctgcccgccgccgcgtaaccccgaggccgagactcctggcctggcctccttgggcccacgacgcctgccccgcggagcggacccatgggcctgaggtttgtgtgcggggcctcaggcgagcgctggcgcagcctgtcccccatcgtctgcgccctgcgggcctggccctccccgtggaaggaccgcgggcttcggggccccacgctggggggctgactcctgccacacacacagcggtggccgcgggcctggggcggcagcacagccattctgctcgggctgcgtgagctgaccccgctctctgtgcacctacttttgctgcgtttggtgctgagcctgaagtcccaggacaggcggctgagggggaaagatggtgtgaattgggtgggcagagacaactgaaagccacaggacccggttggcacctttttggccgcctgcgcctttgcctgcagccccgctccctgggtcacccgaaggaggagctggcgctctttccgggcgcagaagcacccgacccacgctggaggaaacggtccctctgggcaggagaagctttgggcctggctggagcacactcacggaaccacgccaacgcctggcctgtagccagctcccacctcccctcccaccttctaaaatgcttgcggatctcacgtggccgaccctaaccagatacacatggggaaaggaatcaggtggcacacataccgcctttactccatagagaacttccaattgtgggtaagaacaaagccccacctcttcctaatagatgcagttttccacctgcagccaaaaagacaacctgttattagcttttttcccagaggacaggcatctctatgaaactgccattgcaaaatttgccgacagtgagataaccagctccattttgcttctaacctccatgccctccttgtttactgctgcacgcaggttgaactgtgggaggaacttagtttaaaacaaagatgataacagccctttcccaaaggaaacctttcctggggattagcctgcttttgtgggaccaacagattagccacaagattagaaactacggttgaagagtcacgcagcgggaggctacaggattctgaccctccccaaactgctcctggcgataacatcaccatcgtaaagcctaagatcagcacttggtgggtcacctggcaccacccaggctcatctgatgttgtggcacccaggaactgactcagtgcgaaaacagcttcgactccctg

SEQ ID NO: 317104 - DNA, 4001 bp, Homo sapiens
tatttcgaagcatctgagggccacttgcgttctcagtgccttcctaggggccaggagcagctccttgaaagcctggctctggaacaggagccactggtcccccgagaaccccctccaggatgcgatgagggccaaccagtggccatgaggggcccacagccacctccctctccccacctaaccccatggggctactggctgggtgggaggaggcttccccatgggcacccaggcccaggaacataccaggcacagcagcatcaccgggcgcctccccaagcagtcagaggtggccccagtgagtggcgcacacagaaactgcaggacagagaatgccgagccaatgagacctgagagacagatgtcaccatcatggggctgcctggcaccatgagctgtggtcttggggccctcaaggccaatgtccagccccgtcctgagggtccagtcatgctgggccctacactcacaggccatggcccttgagccgagggggccccaatggagagatgaggaaggatctgaacgtgacacgcggaggcaagggatcatgcccagaagccaggacatgtgggcaagggcaccagacatgccagcccagggagtgggaaggcaaggaccgagaattggggaggggcctgggctggaccacgtccaccaaacataggaccgtagagagcccgccaagggcacagagccagccatacctccgaacaggacactgttgtacctcttctccactggcatcccgatggcggtggcaaaccagtccaccccgccctgccaggagccatagagggggtcctaggggatgaggaatcacgataagggctggggaggtctgatgggcctggggggcagggggcactgtgggccgcagggcaaggactcacgtgggcacggccgtggctctccaacagcccgggcagcaggggcagcagcagcgtgaaggccaggaggtccagcaggaggccgagaaagacaacggtgaccacgcggcgctccggcggctgctggtggatgggtgggcgcggggtgcagcctccaccccctccccatcccatggtgggctgctctgacctggcctgggtggggtgcggcgggtcgggttagcggggaagccgagtcctccggggcctggcatacccccacacccgacagccggcgagcaccctaaaggggctgatggcaggggctctggcctacggacgcaggggccgttctggcctgcgcgatgcccccgccccgaacccaggcagcaggaaacgcaggcttcggggattgcacaaaaaatagccgcaaaggcaacggtcctgagagaccagggtgagcacatcgcggacctggccccaccccaccccacggccgcgcctcccacgccctcgtaacagcgagagaaaacttgaagccgcggggaacccggatcccgatcccgatcccgatcccgatcccaaccccaaccccagccccggcccgcgccccgcgattccggcccctggcccggactcggtctccctggcgggggccatggggtgcacaccggacgcaggagcacccccaaccccgcgcgcctcccactccgccatcccgcgtgcgtcccggtcccgcccccaccccgcgcgcccccggtcccgccccccaccctgcgcgtccccggtcccgtcccccaccctgcgcgccctctaacccccacgccgcgcgcctcccaccgcccccaccccgcgcgcccctggtccagccccacaccccgcgcgccccctactcccctaccctgcgcacctctcacccgccccacccccgcgtaccccgggtcccgtctcctcccccaccccgcgcgtcccctgtcccacccccaacccgagcgccccctacgccccccaccccgggcgcccccggtcccgccccgcacctgccgcggctgcgcgctcgggacggacggtcgcacagacgcggaacagggcaccaggcacgccgccaggggcgggacggccacgcccggccacgccacgccccggaagtgacgtacatctctgcacgttctcttccggccggagtcagtggcggggttctcgccggtcctgcgggtcgctgcttggctgtgggttagcagcaccctgagcggagcggaagagctgcccgccgccgcgtaaccccgaggccgagactcctggcctggcctccttgggcccacgacgcctgccccgcggagcggacccatgggcctgaggtttgtgtgcggggcctcaggcgagcgctggcgcagcctgtcccccatcgtctgcgccctgcgggcctggccctccccgtggaaggaccgcgggcttcggggccccacgctggggggctgactcctgccacacacacagcggtggccgcgggcctggggcggcagcacagccattctgctcgggctgcgtgagctgaccccgctctctgtgcacctacttttgctgcgtttggtgctgagcctgaagtcccaggacaggcggctgagggggaaagatggtgtgaattgggtgggcagagacaactgaaagccacaggacccggttggcacctttttggccgcctgcgcctttgcctgcagccccgctccctgggtcacccgaaggaggagctggcgctctttccgggcgcagaagcacccgacccacgctggaggaaacggtccctctgggcaggagaagctttgggcctggctggagcacactcacggaaccacgccaacgcctggcctgtagccagctcccacctcccctcccaccttctaaaatgcttgcggatctcacgtggccgaccctaaccagatacacatggggaaaggaatcaggtggcacacataccgcctttactccatagagaacttccaattgtgggtaagaacaaagccccacctcttcctaatagatgcagttttccacctgcagccaaaaagacaacctgttattagcttttttcccagaggacaggcatctctatgaaactgccattgcaaaatttgccgacagtgagataaccagctccattttgcttctaacctccatgccctccttgtttactgctgcacgcaggttgaactgtgggaggaacttagtttaaaacaaagatgataacagccctttcccaaaggaaacctttcctggggattagcctgcttttgtgggaccaacagattagccacaagattagaaactacggttgaagagtcacgcagcgggaggctacaggattctgaccctccccaaactgctcctggcgataacatcaccatcgtaaagcctaagatcagcacttggtgggtcacctggcaccacccaggctcatctgatgttgtggcacccaggaactgactcagtgcgaaaacagcttcgactccctgtgatttcatctctgacctgaccaatgggtacttctgactcactggctgccccccacccaccagcttatctttaaaaactccaaaccccagatgctcagggagaccgagtaataataaaactccagtctcccacacagctagctctgcgtgaattaccttttctctgttgcaaatgccctttcttgataaattggctgtctaggtaacagggaaggtgaacccactgggcagttacacttttatccacccttccagctggatcacgcgccctcttcaatgacatgacacgcagctagagtgtatgagcttgctgccggcaccttccgtcctggatcgcatagcaaggcctcaatggacagccaggtgcctggtccggtcccacttttttttctgtcctgttctcgtttcctctttgcttggccaaagagggttgggccagggtcctgagtgcaaaggcttggcttggtgaattaaagtggcagtagccgtgtggcagagaaaatttgtagatgggtgaaatcctgggcctacacagtgacaaagtgtatatagacagccagcctagttggtggatgtgacaaccccagactcttctagatttgtggatccgtgcacctgccag

SEQ ID NO: 317105 - DNA, 4001 bp, Homo sapiens
aacagccgccctgtcttcctttttctgcaggacggggccaggcacagaacgagctccccaggcccagctggtgcctgcctggccgagcccgggagagaaagcccaccctgcggagccgagcccgccgctccagcctcagccctgtcctggttcctcgggggcctgagtggggcccacagctgactcactgagaagagatgcgtctgaagcgtgcggggcaacgtgggaggacgatctgtctgactcccttcctcatctcccagcctcgaccctgcctgcgctcgcccccttgggtcctttgagtctcatccagagcactgggctgccttccggggtgggtgttgacccaagctctgctccgcctggccctcatgctgctggttggaacccgggatccctggtcactggctgcagatgagtaacctccagcctcaagggcacttggctggagtgaacatggtgcttacggctcactgtggtgacccaggcagagaccatgacgactcttggtgtcagggtgagatttctgtgtgctccatgatgactcgtggatattaataaaacagtgaagaactgcagcaggaggcccttgactgtccaaggaacgccccacacctacgacacccactgactcttggaccatgaaaccagccctgcaccctcagacactccacccaaagccagttatggcttccccagtgcctggacatggtgggccaggacgccaagccacagcagtgagttacggctcgtgccagcattgtgggcagcaggcagcccctgggcccatccagcagatcccgggcctgtctcggccagaggctggccctccatacccagccagcaaaggaggaggggagaggccccggggtccacctggaagagccctgacccaggcctgagagtgactcctgcccctgcccccgagcttcctgaccatccccgtgacctggcgcctccctgagctgtgggtcctgctgccaactctagctgttcattgcacgttggccagatactgcctgaccagttcctgaggctccgggggatggctgatgagggcacacagggcgggaaaggctgcagcgtgcaacacctgaagggggtgggggcaggacggaacccagcccagcccaggagccgcccctcactcagagtcaggtggaggggagggcggctccaagcgcgcctctgctgtgtgcctgctgtcctggggctgggaggcgtggaaggagagagggccaacgcagggccacctgtatgtgactggctggggaagagggacccaggctggagccactgaaggctgggaagggctgggactccgtgactggcagatcccccggggcacccagccctgctctgtgccctgggcccagccacctccaggacagacagtgcccccagtgcccgcaatccctagccacctccagaaggcaccccccgcccccagccagcacctggcacctcgggctgtggccacaggaaaacaaaacccggctggtccgagggactgagggtcccggagccacctgtccccgcccctgcccctaccgtggcgttggagcagttgagcaggctgatcgcgagcaggaacacccagcggcgcgcgtaggtgcggtggccccgctgcgcgcacagggcccggggctcggccaaccccgtctcggcctccgtcggccccgccatcgtcggcggcctccacgggtctccgccggtcccgccggccgcccgggcttaaggaccttcccgcgtgggccgggaccgcctgcgggcggaggtggggccgggccgggccgggccacggggggccagttccgccccaaggactacggaggagggtcccgccccgtcccagttaaaggagacccaaaaaagcgggggaagggcgggcaaaggtgaagttggaccctcctccttcggcctcaggctggaagtccctgccacaaaaaccgaatgtcccttccgggaagggccccggtcacagcctgtgtgcttctcagcaggaaaggcggcctggaagtcactctgcccagcagaagctctgcacttcctgaagggggctgtggaccccaagttcctgaggttcaagccagccacagggaggggccagaggccagcctggaagaagaggctgggctggctttgcgcagagcctcaaatcagaccagtccctctacagcccctgcgggaagcaggcatggggtaggagggcgaggggctgcaggccaaggctggagggaaggccagaaaggcctgtgggccccaccctggggtaggcagtccgccacacacgcaccggattgttacctgcattttacaatggaggacacggctctcagaggagtaggcacaggtttctgtttgtttaggatggagaggcctgtgtgttggaaggcagaggagggagtttcggcttagtcttttctgcaagaacctgctgatcccacaactgtgcctggcccaccctgggggaacccaagaggctccaggccctgttgctgaggccagtataggggtggggtggaggctggcctggtcagacgtgcaaacaggatttcccccaaacagggaggctctcttgacccttgaaaccatccccgtttcctgaacagtattattcgtggtttttgtcttaaacattcatctcctttgccagggcctgtccattttccacacctgagtctgaacaggctaatgatgaggccccagctttcactgtgcagtcttctgcagggattgtgtgtgtgtctcagatagagctctccactttgggatttttttttttttgtagagtctcatccagtaacaaagagaaaatggagctcacccggggtgtcctgagatgggtgggccccaagggggttccattctctgagacgtgtgatggagccctgtggtcctcactctctttatctcctctgccttccccaccgtctagcctcccccctcatctttgttccccattcccccaccagttccttctgttctccttctcctcacctcttgctcgccctgccctgaggacccagccccctcacaaccttcctccatagtccagtgccaatgttggcctagggccttcaacatcccctaaccccacctggcagagggggagttgcagtgcaggcttccctgttgagggacctcactattgtggagcactgcctctgacaggtggtgtctgagcctgtcaccatgaaatggggcagccacagtagctacctccatcgttcagtctctgttgagcgtgcattgtcgaggggtgtcaccatgaaacggggcagccactgtagctacctccattgttcagtctctgttgagcgtgcattgttgaggggctcctcctccctacatgtcggaactcttgggttgagcaggtgagctcagcaacattgcagaatgcaagatcagcacacaacaatcgcttgcattgatgtataccaacaagaaacatgaaaaccaaagttaaagacattcataattactccaaggaaaattaaatactttggtataaacttagcaaaccatctacagaacttgcatgctaaaaattacaaaccatgggccgggtgcggtggctcacgcctgtaatcccagcactttgggaggccaaggcaggtggatcacaaggtcaggagttcaagaccagcctggccaacatggtgaaacccagtctctagtaaaaatacaaaaattagccaggtgtggtgacatgcacctgtagtcccagctatttgggaggctgaggtaagagaatctcgaacccgggaagcagaggttgcagtgagctgagatcatgccactgcactccagcctgggcaacagagtgagactctgtctcaaaaaaaaaaaaaaaaaattacaaaccatggctgggcgaggtagctcacatctataatcccagcactttgggaggccgaggtgggtggattacctgaggtcgggagttcaagaccagcctggccaatatggtgaaaccgtcttcactaaaaatgcaacag

SEQ ID NO: 317106 - DNA, 4001 bp, Homo sapiens
caccagagtagctagatacagagtgtcgactggtgcattcacaaaccctgagctagacacagggtgctgattggtgtgtttacaaaccttgagctagatacagagtgccgattggtgtagttacaatccctgagctagacataaacgttctccacgtctccaccagactcaggagcccagctggcttcgcccagtggatcccgcaccggggctgcaggtggagctgcctgccagtcccgcgccgtgcacccgcactcctcagcccttgggtggtcgatgggactaggcaccgtggagtagggagcggcgctcatcggggaggctcgggccgcacaggagcccacggagtgggtgggaggctcaggcatggcgggctgcaggtcccgagccctgccccgcgggaaggcagctaaggcccggcgagaaatcgagcgcagcgccagtgggctggcactgctgggggacccagcacaccctccgcagccgctggcccgggtgctaagcccctcattgcccggggccggcagggccggcctgctgctcccagtgcggggcccgccaagcccacgcccactcggaactccagctggcccgcaagcgcggcgcgcagccccggttcccgctcacgcctctcccaccacacctccctgcaagctgagggagccggctcccaccttggccagcccagaaaggggctcccacagtgcagcggtgggctgaagggctcctcaagtgccgccaaagtgggagcccaggcagaggaggcctggagagcgagcaagggctgtgaggactgccagcacgctgtcacctctcagcttgggtgctgcaacaggcaaagcagcagcctgggtttctccagccccgtcactcgaacccacgggctcatcaccgcacggtgcggccagacgccctttctcctacgttgggagcgaatctcctcggctcacacaacccagccaccggctcccaccgcgctggaacccctctggcagcgagggtttgtcccagtgcgggtgacgcccggaaaggaaccagtcccaacagcgcaggagactgaggggtccctccaccaggatccgctcacctgcttccaggtgtgtcgcctaagagcggctcctgttcactttcgttccgcaggccggccatagttacactccctacaaggcgtcttgcgcccaactctcgcgacacctgctttctcccatcccgggtggcgtgaagctggcaaaacaagcctgtaagtgcgcgtgcgcacctgacggtcagacgtaggcggaacgccccgaggtcataggcggggtcacgcggaaggccgggcagcgcagggcgaaaggaggctgtgtcctcagcctcctccctcggcacgcgcctcccatcctgacggggactgagagcccaggagagctcggggcgtgtccaaactgccgcgccgccctgctccgggtttgtcttcctccctccgtttctccttccgctgtatctagcatttcggttcctggaaaggttaccggagctgcgattggggctgggaccaaagttgagtcctggaaagggagcctggagagcggcggtgctgggaggcccggccagctcgatcgcaggcttccacctggcggccagtaagtagccggtccggttaagtagtaggtgcgctaagagctccccgcgcctcttagcgcgccgtgtacgcgcctggaggcagggaccggggacgcggagctgggcgggagactcgcgggtcagggacgcggggtgaggctgggggtgagagacaaggctggagtccgtggcgcgcttcggagggctgagataatgggggcgagcgcgcgggcagtcccttccccccgtgaaaggtagaggtggcttccagctctcttctctagctcggctaaatgcaaaggcgccttacctggagggcttgtcagagccaggactgaaggtgggatctgctgcttgtaacctgcaggtccccggatgcgcaccccaacggcgcctgcgcctacgggggcctcagccttgcaaaatgtcactcagcagagcctgctgctgaaacgtgggagttgaaaaaggtacagcacctgcctagcaatgaccagctcctttcgtcacaaggaagatgacatttttagaaaacatgtcatgggttttcactagatctccatgtttatttcttggtggttatgtattaacatcttatctctactattaggcttgtaggctagctggcgtcagtagtcattctgtgtctcataaattaccgttttattagcgccagatacattgtcatgtaatttcatttgatcacaagtatcctatgagataggcgaagcagacacattgctagtttactgaaaattaagatccagacaagttaacccagagtcactctgtgtggaagtggcaaagttggaaaccaaacttaatttttttaaattaatatttatgagcatttaccctatgctaggtcctatactagttacacagtcatgtatggtatatgccatcacttctgatctttgtgtcatttgtgaccttgtgtgtatcagccaggcgcagttcactggtgaacacctaaacttgaaacgtgcggtctgggtgcgatggttcatgcctgtaatcccagcaccttgggaggccaaggcgggcggatcacgaggtcaggagatcgagaccatcctggctaacacggtgaaaccccgtctctactaaaaatacaaaaaaaaaaaaaaaaaaaaaaaaaaaaaaaaaaaagccgggcgtggtggcgggcgcctatagtcccagctactcgggaggctgaggcaggagaatcccttgaacccgggaggcggaggctgcagtgagccgagatcacgccactgcactccagcctgggcaacagagtgagattctgtctcaaaaaaaaaaaaaaaaccaaaaaccttgaaacgtgctattcagaaatatcttctaaatcaagacctgatattttgtacttggattcagtcttgcagattcatttgtaacagctcacaaaaacaagtcagatttgtattattggttccaaaaagacacataggtagaaaagttagtattttcttgccataatgtcgctttattatattgtcttttttaattcctgggggctagcaatgtatggcacatatatagtggacaaggggatttttaaccagtatagcagtaagcagaatggctcctagataaatatatgttggatgaatgctcattgaattacttcatctcatccttacaacaatcctctgaggggggaattgtctcatgtgtacaaggaaatggaaggcagggagattaagtaacttgcctaggatcatactactaacaagcaacagagctagaattcaagaaatgcaggactcctgatcctaagcctgtgctctttaccaccaggcttcttatgggaaaaaatggcaaagcggcaagaagaatctttccttatatctcataaaaatatatagtagatattcagtttttatctaagtgaaataattggctatcatgtatcagggcagatattactttctgtttataggttaaggtggcttactcaaggtcacacagctggtagaggaatcccagccctctgacactgctcttttccattggtgcctccaagtgatgacttcagaccacaaaagcatatggaatgagtacatatacagctggtgaaatctaagtaagcttagtgtattgtaccagtaggaaaaaaaaaaaaagaaaatgtctcttaggaacacacacatagcatccaaagtaaacatttaaacatatatatatatgtaatttttttttataaagcccatggaaaagaggagctaaatttgaagagattagattatttcccgaatgtttcacacaagaatatgagactccatttggtgcatttccttaggtgactgcccaggatatttacccacacccctttcaaacaaacagccgggcgcggtggctcacgcttgtaatcccagcactttgggagg

SEQ ID NO: 317107 - DNA, 4001 bp, Homo sapiens
tagaaagtatgaacaaaaggttaagtaatgtccacgactgaagacaaatttgtttccaatcaataatagttcttaaatacattttaagtgctgcaaaaatagttagatgaaaatcagagaaagaccagtacctttacaagcagcattgctagatacgtatttaaaatttttaaactacttctattttgccgcaaattgggaagaaaattatttggaatttctgcagctacaaaaaaaaggtgcgcgtgtgtgtgtgtgtgtttgtgtgtgcgtgcacgcgcgcatgatgtcggtggggaacgcagacagataaaacgaaaggccacggtcagaggactaatctttctccccgttctcaacagaacagtcccgttatcttccgaagtttaaaataaatggcttctccctacttcatcagtgtatatatatatttaaaagctctatatcatttggtataaagatctagaaaaataaaggcaataaagatctaggaaaacgaagatgtcttatttctgatacttgagggataacttccttccaccagcattttacaagaaaaataaagcgagttagttagacctccgtccttccctcccaccaccaccaacagaggcctaatcaacgtgaaaaaaaaatcggcccatggaattctccgcgcacatctttctctcctgctggaatccaccctctggggtaaaattatctcggaaggctcagaaagtgaggctaagtgaagagagcattaagaacccttcacgatattgtctaagagccgtcccccagtcgtgagtggaagagagaggggtgacggatggggactagggaaaagcggctggggcagaaccgccctggagcgcaagcctggtcccagaagaaaaacaatcttccttgctcacacctattaagcacctactatgttcccagcactatacgaagcgctttcctatatgtccgtttttatttaataagcctccagttcacactgcaactccccctttagttaattgctgagtattctgctttttctcgcgtatcctcagaaccaaaggtgtcgatatttggactacagagccaagcagttgcaggacgacgtgcaacctcaaaggaaagtgtcccgaaggccgcttcctttttgggggttgtggatctcagagccaggcgctcgcggggttcaggctgctgagaccctgccaagggttaggtttatttaccccacgaacattcgcccagcgtccactgagcgggccctgcctcactgcctcccagcgcttgccgggcccgctcgctgatcggcgtccaccttcccaccgttcctctgcttcctcaggagattggagagcgaatggtgcctctaacaataaaagtggtaagctgcgactttgtcagccaggcacgtttttaagtgcttttaaccatacattaactcattaaaaaggaaaaccatcatcgccctcattttatagatgaggaaacaggttaagccatttgtccaagatcaggatgcgaacccagataatctggactctgaggcaccctggaaaagttccctacttccaaagtctgcaggagcttcgggacgtcttcccgggagtctcccccagtctcctcgacctccaatccaggcttctgctgctctgggtcgggtttggccaactgggtgccggccggttccctggcgcgggcgaaatctgcacccgaggcgcccgtcctcctctccgggctagacctccttactcaccgtcctttccgagcggcgcggggttggggggcgccctcagcggcagcgccagagtcttggagaccgccctgcggagatacatcgcgcccgctgtccgccgcgcagcagcctcggtacccaggcgcaggctgcccttccacagagaggctgagagcctggcagcgccccgcccggaggaggcacgtcgaccttcatccagccccgcctccgcggcccccgggaggtggggagacctttgtagtcctcaccatcctcccctaacccatctccagctctgttgctatccctgaggtctctagagctgaccgcggcatctcagaaaagggatggggaacctacaagtcgccgtcgcctgcctggctcattctgtaccactgaatgtaactcctcacagcaagctggaaatgttttgggaattggacgagattaagacaaggacacagtttatcacgctggatgtaatctgaaaccattttatctcctgcattccgttagctttcctaggagagggaaggatagctggaagtttcttaaaaatgagaagagcgaaggggtagcctcagccttccattagcgcactgggtgatgctcagaatcgtaagaaaatctgcagacaatggttgaatttctagacagctcactgttaaaacgactttaaaatatcaaaaacactgtatattcctctatgggatgtgaaattaatatttccacatcagcggccgggcacagtggctcacgtttataatcccagcactttgggaggccgaggcaggcggatcacttgaggtcaggagttggagagcagcctgggcaacatggtgaaaccccgtttctactaaaaatacaaaaaattagccgggagtggtggcgcgggcctgtaatcccagctactcgggacgctaaggcaggagaatcgcttgaacccgggaggcggaggtcgcagtgagccgagatcatgccactacattcaagcctgggtgacagagcaagaccctgtctcaaaagcaaaacaaaacaaaacaaaaaccccaaaaacaaaacaaaacaaacaaaacaaaaaaacacatcaactaaaaatactaaattattagttttccgtctcatcgtggctacaagaacttgtcatggtttgaatatggaaaccaataatttattacgtttataacattgtctaaatgattactctttggaagacaccatttcctactataataatcccttatgtgtgtttggcacttgaaagattataaagcactttcacatctattatctcttttaattttcactgcaaccctctgagggaggtggcaattattccctttagcaaatgccaccaccaggtggtgggtgggaatgtccagggatttactggtggtcatgaattaaaaaacaaaaaggacatgaacataatacttctagcttaaagttctattggcatgtaacaggcacaatatttgttcatttgctatgtaaatagacgtttctcagaagttatagtcctgaacctaattataattatatttaacatattctcataagaagagtacaagccaatgatcagattggttttttgatactcagaaagagagttaactagtttaatcactagggtgacagagcgagactcagtctcaaaaaaaaaaaaagtttacaacatagatgggtgtggtggtacatgcctgcagtcccagctactccagaggctgaggtgggagaactgattgagctcaggaggtcaagactgcagtgagctgagatcttgccactgcactccagcctgggtgacagagtgagaccctgtctcaaaaaaaaaaaaaaaaaaaaaaaaaatcacacacagtggctcacagcactttgggaggtggaggcagaaggattgctcgtgctagggagttcaagtccagcctggcaaatatggcaaaacctcatctgtttctttttcagaaagaaaaaaaaaaggcacattagatatgaaatgtaaaaaataaagtaaaaaaaataaaggatataaaatgtgctcagctagttggaggaggcagtgctagattctgacttccagcctaaggtgaagctcaaggctctcctgctacactctgctgcctttcagtgtggcacatggccggattcattatatcccaccatctcttattagatggtacggtccagtgggaggttatcatgctctctaggttgaatatggccataccagctgggatataaaagaactgtgagataaatagttccatttctccagattattttc

SEQ ID NO: 317108 - DNA, 4001 bp, Homo sapiens
cttgaacatatgaatgatgatgacataaatgctttgaggaatcgaacttctttttccctgtcataaccagaaaacacaccaaaatgattgtaaggatctcaaagtctacagtttcattataaaatcattaatggtattaaaacttctgaggttaacattctaaattaccttccaaaattactaggctgggtgtggtggctcatgcctgtaatcccagcactttgggaggcctaggtgggtggatcacctgagggcaggagtttgtgaccagcctgcccaacatggtgaaaccctatctctactaaaaatacaaaaattatccgggcatggtggcacatgcctgtaatcccagctactcaggagactgaggcatgagaattgcttgaacctgggaggcacaggttgcagtgcagtggccactacactccagcctgggcaacaagagtgaaaactctgtcttaaaaaaaaaattactataaaactttacattttgctttctaattaaaagaaatcatttattttttgttataagtgtgcttattgttcattgtgctaaaatagacatttggatgatgttctttatagaaaatgaagaggagggaaactatgtcaaatgactataaagattagtagaaatattataatgcagataaattaatatgcattcctaatctttgaaacaagcaggatatagaatattttgtgtatatgatgataaaatctagtattaactggagggctaaaacatgaagccactcccaaacttcaacctcagcactcctaccaagattaccttgtgtgcacttaagtcatacatgtgtaaataaacgaaaatttaactgaaaacaacgtaagagcaatcgtggaaggctgggttcataatttacagggttcctaagtcttaaactgaaaaatttaactacttgaatgctaaaattttacaccgcggacaactagggttaaaagatcaaatataggatacctggttaaatttgaaattaaaataaaaaagacgtaaatattttagaataattatgtcccatgcaattttttatactaatatataattgtttatctgaaattgaaattaaactgggcaacctgtacctttgtttcctaaattggcacttctatgggccaggagaaattgcatcttgagtgtgtgtgggagcggaacacaggcctgcggtccatcggagaagtccaggcgctgggccggcgctgtaggtggtcagggacgtccctctcctttctaccacctcttttcaggtacgcaaaaaacactccagggaggagggaggcatgaagcggggcctggtgatgtaacccagaccacgaaggaggaaagatgcggacagatgctggctgtgtaagagcagttcttggggtcagacagccatagtttcgagaaggaagaacaggagaggggaaaagcagtgcacagacggggtccttgaacctttgaggaaaagggagcggcgggtaccctgggccagatgcgttagcgcgcgtgcaggccggacgcggccctggaggaggaggtcggggcgcgggttacagcccagccgccgctgaccggggtaggcgcggcctcgggaaggcaccgacgcgggcctcccagtgccagcgcgggcggccgccgccagcttcccgcatcgcctccgcacccgccgaccctgccccgcctgcattcctgcagccccgaagcccccgcggcgggaaaggaggcgggaggagggcccgccgcttactggtttgagttatcctgtagatggagaagcaagagaagctgaacaacgcgacggcgaccagggtgatcagcaagttcacctgcttggtcctcatggccctggccaggctgcgggaggccggcgggtggaggcggcggataatgccagggacggggttgagcgcgcagagccccctccccgcggtgccgcgtgggtccccagcacacccgccctgggaagccgccttgccacagaacttctgcaccttttgcttcctgctctagggttcagcgcgtgctataaaccgctggccagggctactggtcgttaaaaacgataaactagggaaagcgccccattgcctggcacgtggtgggtgcgcaataactgttaggtgactttcctcgagtggcttatcaaagctttacccaagctgagaaacactagagcatcagtaggatgagactctctatggactccttgatctctcccctctaagctctcctctcattgaggactcactggcagtctgttataatatctgaacattctacttcaaatcagccctgcacgttggaagggctggcttctgtccccttgaaggggaagaaagatttgaacataccccagcctgaggatgccactatagcctgcgtgttctcatgtgctaatggctaggagctgtgactttccattgagccgggacccagccagatctcaaaacaaggagccaggagagacacctcaactatgttctccttcaccccttcagtctgttgccggtgcttgcctttggctgagctctactgaaaaccagaagacaagaaagttcagcttgatgtactggatggtccaaacctggcttctaggctgtggagcaggttggagaaaacgtagggaagattagggtgggagaaggaagctattcagcataaagagagatctccatactcagcatttcactgccttcttacttgaggtccagtttttgcattttcagttgcctacccagcccttcagcttgaatgtcccacatcagattcaagatgtccaaacttcctcaccaagctattaatagctgttttcccagagtcccttgattttatcagtggcatcatagttcttcttacaatcatttggactctggttcattatatctcattatttataaaatctttagttacctaaaggattgtgtttctgttgctagctactatccccaatactcagatgatcacagtgacattcaaactggtctcactgtctgcaggatctaccctctgcaatccacacttcaataccagatactcttcctagttcaccacagtcagctgtcactgttgtttacgtagctccactcctgaatgaaaatggacccactcaatcgaaggccactcactgctttctcatctcccagggcgcccttacatgcctctggcacctgccagactcttttttcaatcctactctgaacatgtcatgttcacttctctccttctgtgccttttctctttatgtctgccccctgcccacaatgtccagtgtcctctctgaccattgaaattttttccacatcgtcaggtctcatgtttcatctgtttcatgaatcaaaacctggctacagcagaccactctgatttccccttctctgaatttatttagtatgtagggcagggatgtccaatcttttggcttccctgggccacattggaaggaaaattgtcttgggccacaaataaaatacactaacactaatgatagctgatgagctaaaacacacacacacatacacagacacacacacacatttcataatgttttgagaaagtttacgaatttggtttgggccgcattcgaagctgtcttgagctacatgctgcccaccagccatgggttggacaaggtgatgtaaagcctctgcctttcattttgatatatatccctaggtacttgcagataggagcttccaaaatgatcctaagttacacccatggttgagggagaaatatattcaaagcagattgaattactggtagttgtccaaagaaatgtacttacacgtgttagcataaatggttatggaggtctagggaaggatagttgcggtagatgcctgagaaaagagggttccctcattcctttgctgtgtagtcatgcatgatacacaagttctaaaaagacctggctgtgggcagaagctgacatcccatttctacaagggagcatgggaaacagagaaggaaaagctgcttaagaattaaccctcccaac

SEQ ID NO: 317109 - DNA, 4001 bp, Homo sapiens
ctcctgcctcagcctccctagtagctgggactacaggagcgtgccaccatgtccagcaaatttgtgtattttaagtagagacggagtttcaccatgttggccaggatggtctcgatctcttgacctcgtgatccacctgccttggcctcccaaagtactcggattacaggggtgagccaccgtgcccggccctaacaccttgtcattaaacattccctgtccaccattaatcatcattcacccagtctcctctcctctctccccacccctacccccactccatccagccccctaacattctggccccagttcacacagccccctgcacaagcagcaaacagggaggatgagcacctctgtcagctttgggacatctgtggacctgcaggcctaggataaaggcgcatgcaggtttggtagcacctgtgagtcaggatgctaccaacagtgagccttagacctgctaaattaggtttagcctaaagctgccttctgacatattttaagttcagcctaaaggtttctccgtacatcgtgaactatatgcttccgttttctgggagtcgctttcctttttctgtccataaatcttcttctaccacgtggcagccccagagtctctctgaacctattccggttccccatgcccaactgtgaatcgttctttgctcaattaaactcagttaaatgtaatttgtctagggttttccttttaacagatctaagtgcttctttaattagaaacaaatatcctgctcttctccacaacagattgtgtgaatcaaaccacaaaacgtgagtctgaaggttcaagatcttcatacaatctcaaaacagactggctaggcaagacattgagcatgcacggaggcctggactggatcctcagctgtgaggccttcctgcttctggctgtttgtgtaacctgagcagtctacggcttggccctatttcctggtacaggcatacttggaaatataaagaaatatgcatgcttggtaagaagtcttgcactcttgcactcggacccctttccccagctgacattgtaggtaagataatatgaattgagcaaatgtgactcccatggagtaaaagccctctatttaaccaggcagtcgagatattgaataatcctagtgggaagctgttttaaaatttagagctaattacttaatctaaagctaatatttctgaaggaagtttttttcaatctgataatcataccaccataggcagtttatttaagaaaacacattaattaaaacatcaacgttcaagaaatcacaaccaggtttagaagcaggcacgtttcctttggaacacttgtaattaatattcacaccacttcctgcaggttagcaggctactaacgctcgtttgaacgggctgtgggtcgtaatcacagatgatgcagaatcgctgagctctgaggccccacagcgttccagttgggagaactaatctctggaatgttctcagtctctgcttgcccctgggaaggagggtagcaggcggcatgggtgaccctgaggcgactgtgctctgaggacccagagctacctgcaagggcaagtaggaaacaaaacaccggacccatctccctccctccctctctctcccgcaagccttgtcacacacacacacacacgcacacacgcgcacacacacgaacttcccatgcctcttactttgctgacaggccgagagaatagagacagcagccagcaggatcgagttcccggccatctttctcacggaactatttgtagagcgcacgggaagataaatggcgcttcttgactttgaatgctgaccttccttatcgggtaaacaaagttggggaccgggtggggggaaaaggctgattcaagcggctgaatgacctttgctctggaacagaagtcaggaaggcaggcaggtctggggctgccggtcacagatctttatggggctgggagttgcttccggcgtttgttttaagcctctcccacggccagcgggcagggctgtagctcactgtgggaccagccctccagccgcagtgccagttacactatcttctctgccaatgcacagactctctggatccctttcatccccacgcccttccctcctagggccttgctgagacctttctcacctcctgtggaaaaagtgagaaggaactacttacttaatcctgttgacattttaaatgctaatttaagccagttctaatgtattcacgctctgaatggccgatttaggatttgaacccagtctagcagattacaactgtgccctatcccctgcaccaggctgcctctcactgtcacctagagactctgataataatcatactttttttttttaagacagggtcttgatctgtcacccaggctggagtgtgtggtggcacgatcatagctcactgcagcctccaactcttgggcttaagtaatcctcctgcctcagcctcccaagtagctagaactacagccacaagtcactgtgcccagccatttttaaaaaaataaaccggccgggcgcgatggctcacacttgtaatcccagcactttaagaggccaaggagggtgaatcacgaggtcaggagatcaagactatcctggctaacacagtaaaaccccttctctactaaaaatacaaaaaatcagctgggcatggtggcacgaacctgtagtcccagctacgcaggaggctgaggcaggagaatctgctctttagagatgcagattctggcctggaaggatggctcatgcctgtaatcccaacagtttgggaggctgaaatgggcagatggtttgagctcaggagttcgagaccagcctgggtaacatggcaaaaccccatctcttaaagaaatacaaaaattagcagggcatggtggcacgtgcctgtagtcccagctacttagggggctgaggcaaggggattgcttgaacccaggagcctgagactgcagtgagccaaggtcgttccactgcacttcagcctgggtgacaaagtgagaccctgtctcaaacaaataataaaaataaagatgcagcttcccaaaaaccagagctgggggcctttcctcaccccatcctacagcaccattagagggtatatcttggctcaagctgctataacaaagataccatagactgggtggcttacaatagcaatttattcgtcacagtcctgaaggctgggaagtccaagatgacagtgctggccaatcagttcctggtgagggccctcttcctggtttgcagaaggacaccttcatgttggagacagagaaagagtaagcttcctggtcacttcttataagggcacagatcccattatgggggcctatgctcataacctcacctgtagctaattatctgccaaatgcctgataacatcacgttgggggttagggtctcaacatatgaattgcagaggggacacaaacatttagtccctagcagggagctcccagtgtcttctggggagggcagttgcctcagcctcacacagaccctacaatttaataacacaaccttgggcctctctgagcctccatttaataagatagggctaataagagctgaagagaagtttaaatgacataatcctattctaaggattgaattagttaatacttatagagcacttaaaacagcacctggcatatacaaatgtgttctgtgtgtctgcaaaataaacacataaagtatctagacaagtacttagcatataatgtacctaatgttaaaaaatactttcagaggcaaaaatcatgcctttcatacaacataaaatgaaaacatatcaaaatttttatgtaactcattcatgagggaaccagtaagatgttataaccagttcaaagtagaattcatggaactacacatatacaggaaagaaggaataacaaaattaatttataaatagttgcaagccaggtctgctcaaagtttctgttggtcttcaggcttccttggctgtttgctcttgaaatcattga

SEQ ID NO: 317110 - DNA, 4001 bp, Homo sapiens
ttcagatttcccaattcctacttttaggcttaaatgtgcttgagaagtctctatttttctaaattccatcaccattaaatgttttgattcccactgctaccaccctatttcaaatccaggcttgaactaggaagctctgagaccaactatggaacctgggtaatttctcatattctcaaagttccttcacttacaaaatgaaaacattaagatctacgtatcaggatcatggtgagtataaatgagtatgcatgagagagcctggcacagggcctggcatcaagcaggtgctaatcacctctaagaaactttcctcttttctctctccctcctcagtcctcctttcagacttcacagcaagactcattctgaaaggtgaatgtgatctccttagcctcctactcaaattcctccaaaagttcaccgtaccctaggacagtggttctcaaagtgtagtccccaggccagcagcacctcttgcgcttgcctttccaaaattcctctaaggagagtttactatcttccaaacctgccaactctcccaaccccaagatttaactcatcttttacatccttccccctctatgatatctctcctatactacccagcttaaaatctttcctgaccatcccagtctctaggactttttctgacctctaattccaattatttctgaatacaaagagtcttcatcttacaatcgggtctgtgtctggataaacccactgtaaagtcaaaaaatctttaactgaaccattgtgtaagtgtaggactgtactaaggtgaaaatctgcagaggtcacaaactagttgcacctggcccacccacagaaggtgtgtgttaactaaattggttgcaagtaacattaaaaatcaagaaaaaatacgtaaaaatacagatctttggcctgtgttggagaaaatcggatctgcgtttgagagacccccattcccacatggcaacaatcagctaaatggtaaatgtttcgagcattcaccagctctttccattctaaataaaggttttcttttgacatcttcaaatatctcaaatggtgatttacatttcttatggatatgtaacttttcatgcttgttttgtctctcctaatagaatacagcccttaaaaaacctgtccttgtctttgactttttaaaaacctcttgttaccctgaacacaaaccggtatttagtgcaaaattattgtaaaagaatattctgaacattgtagacaacagcaaaatgctgaataatccacacagtttttctggaaacttttggctttctaccaagttggaaaagttttattagtttatgttttctaaacatatggattagggtacaactcttaagacagataataaaaaatttttatattattttggtttaggtcgtctttcattttctaatgagaaatacatatgaagacagcatgccctctgctgaaagagatttagaccctgcccggcacgccatgtgacggaacctagatactgtttgtaacttttagtttgaatccaacttttatatcctggatttgatttcccagaaaagagtttcaatttcactctttggtaggagtcatagtggctttctctgacgcggcctcaggttaaccatttaccgggtttggcagcgacaagggaagagccaccttaacaaagctgccttgctgtggctcagagataacctgagaaacctaaccaagatgagaattttaaaacactgtttacgtacagggcctttctttgttaaagcttccatttgaacccatttgccgactcctgcctgtccacacatatccgcaccccgaacatcaatattaggagaatattcgataatactctccttttccttcccccaccccaaatcctccagggggcgccccggaggaccgcgctggccccccggcgggagggcggccgtaggcgggagcccagtcccgactcctggacgccgcgcgcactccccatactcacccgcccgaagccacggaagtgccacctgaccccgccccttccgccggatcctcccacgcaggcgcagcgccgactgcaggcgcgtggggcccggggatcgcctggggctgggtggcggtgcggggcatggccagggtccccgtggacgtggccgcgcagttccggcgtgtggcggagagcgagtgagcgtgaaggtctcccggcctgcagcaggctgcggaagctctgcgccgggaagttctctggcgggggaggggagggcggtttacggcctttggggtaggttttgccctttttaagatccacatgaaatctttcgcctccgaagttcgagggtaactttcgttccctcctggccttcgcgacaccctcgagtcggacggaggccgagtcgtgtcctcacccccagcagcctgcggcggccgggacccccggaggcccttcttccgctccttggaaacttaaaatgtggggtgagggagagacgcgttacgtttgacagaccggtgaaattaaagacactcaagcttctcagagtgatttgaagaaatgctcagcgttctgccgaaatatagttttaagtttttaaaccacggcatggtttttaaaggctgaaggacccacagtttttttctcttaaagggcacgcattcattttgattaatatttcttaacatgcagccaaagccaggactcgggctcactgctgcaggggtgtcctcgggaagtcccgaggggggaaaggcgcgcaagcctgaaatggagatgaaaataaacaggcataatatttgctacctcactgcgttgggcgtagtagtaactaattcttaaaaaacgtcttagatgacatataagtagtaaagccgttgtatgctaatctagaatttttgagaaaaacttaatcacccaaatgtttgctataatgtgatgaagatagcatccatcggcagtagccaggatcaaatgacgagtagatatggttataaatggggcccatgcagtataattagtatatgaaaccaagatgtcagtcctcacacagaatttgtgtaatgatatgcatttgggaggcttcaggccttttcagctatttgatacaggttgattcttactgaatacagaataataaaaaatgaattactggtctcaccattttcattattactatttggaccaaaagactaccacttttactccaaagattgattgtagactcaatagccaatgacagaaaattaagcacaagtctaaatgaagccgaggatctagtagaaagaacacagaatcaaacctttcaaatctcagcctatcgaacacaaacagattgacagttcttgagacggtttacttcctttctttaaacttggcgttgctcatctgaacaattgtttcggtaagggttacgtttgatgaaagctcagtttgtgctaccttagaagtgaagaagtttgttaattttaaaattgagtttatccttacctgcttttcgttctacaaactcaaacactttcatgcatgtcacttttttattcagaagttttctaaacagtacagcttagggaacacatttccatggaacattagtgttttgcaaaatgttaatagattcttcatgggaaaaaaattgctagcatcaccaatactggcgaaaatatgaacctgtcattatgaggctatgggaaatacacttttgtagagctcttgccaaaaatgtttaacctgaatctgattgtgaggaaacactgagataaattctgaatgtgatttgttcggacttttcaataaggttaataaggaagacaataaaaaaaggcaggaggactgatctacattaaagacagctgtcaactagatagccttaaggatttaaaaaatttgaacctgggctgggcgcagtggttcacgcctgtaatcccagcactttgggaggccgaggcgggtggatcaccaggtcaagagatcgaaaccatcctggccaacatggtgaaaccctatgtctactaaaaatacaaaaatgagc

SEQ ID NO: 317111 - DNA, 4001 bp, Homo sapiens
tgttccaaagtccaccaagtgaatacttttttagttacaatcagatttacttatatatttcgaaaaattctataacttttgaaatatagtgaaaaatagacttgaataataaataatacagaaataagtaaattcattggctagaattcttaccagtgtctctcttcttctcacctttatatcagcaacagctttaactaaatgtctttcacatagcaggtgtgtcaacttctatttttaacttggattttattttattattagtaagatatttaaccccattttgctcccaagacatgtctggtgtcttgactttgtattattacatgtaaaaactatttgtaagtttagttttgcaatactaaacttctagtattccaaacatacagatgactctgagcattaaatgaataaaatattgacccacccagatattttttctttgtttattttgatttgactatcacttcttttgaaaaccctctttaacaacactcctttaaatttgttttattttatttcaaccactcaaattgctctaactttaaattaaaattaatttgaaaaataagttttctgattcatcatattcatgatggcaacacaactcaaaataatcatggtactagcaaaatttgagttgttgagcacctattctgtgaggagcatgcatctaagcacttttcattcatttttatctgaacgagaaccctgcaaagttttatttttattgacattccttgtattaaatctgtagtttccatatgaagaaactgaggttcacagacatcaactgagttgctcaaaatcatggaactagaccatactgaagccaggattgcacccctggtgtgcttgtttcgatctttgacaactgttactttttataatactgctattccaattttcacatctgttcaagccccaattttatttatttgtttatttttgtctttcatattgtgaatatggttgggaacacaatcaacatatccttgaattaaactaacagccaccgtggtgctagtttgcttggcaatgactattctaagtaaaactacctctataagtgagtagaaaagtgaatgattatttcagttaaaacaaaattgctgcattttatttcttcatttttccctattagataaattaacaataactttatctaactgaaatggtgaaattataaatatgatccaatttcatcttgaatttgaaataattttctgggagtgaggtaaatttcacttgcaatcttctagacctgatagacagagaaagaacaaaaagaaaagaagatttcttactttcctctagttgtttcgaaatttgatttttggtagtcagttctttggctggaactgctgtcaccccggctgaggtatgtttcccgtggggctcgatttcccacgcctccagtgcctccaacgcctccaatgcctccagtgcctccaactgtgtttagagaagttgcttgttcatttgactttctggcaaagctctgaagaaatttcagtgtagaattggaaaggaccactgattctgctccaggattgaacttgatgctagcgttggttgggagggtaagattctgtaacttgaccactccttctgctttctctgtggatgtgagagtttgatttctcacaccctcagcaggtgcacttgtttctgagggaggcagtgttgatttaagaagactgtcttcagaagttcttgcctctggagttgtagctatctccgccgacatgacccgagtggttggcagtatttgcaaactttgtattttatttggaggaactgaagcagaaggcatagtcttctgagagttcccatcctcaggtatagtccaagaatgcttactgttgttaagcccaatgcccccactccataaactagaaagaaggacaaataatcttgcccccttcatctcagtagtttgaagcaaggtagctcatgtgaaatttggggacaaaatccttatggcctttttgatagctgcttccacactgaatctgctaagactgagttttgccagtttgagatgtgtagaggaaacaggtttctgtgttttgtagcgtactcaggaagttcggtttcctgtttctgtagggtttttgtgatctgtgacctctagtgggatggctctatggaagtgctgaagggtctctgacaaagctaagggtaaatgggaaagcacaggcaattattatcaggaaaacccatgaaaaaatatgaagtaactttcttttcctgagcacaccctggtttcacgtttcactgatttcaaagagaaatttcaggttcacgatagagagtgcaaaattttgttgatataggctgaatacagttttaacattttgttctactacataaagacactgagaaaagtttttatgatacttatctgctgtgctctatccagaaagctgcattttgttcaagtgtatatccacatgcatacacataatcaaaagcttgtttacagtgtctctatcctttcatatagtacatatactctgaattataaaacatctatctacatacatgtatatctttctatttttataaatacacttcagctgtatcattacttaatctcaatgattataagtaataacagaaaaggaaagcataagtaattgaattagacaggtataccaggaagtcactttaaattttgctcctggaacttctaccagagatacccactaatggaataaataatcagaattttacttcctttattttccaatcacgattgtctgatggttgggggtaaccaatattttactagtaagggatagatgaagaaaaaatggagtcacataaaaataaattaaaatgggatcatatagaatgcttttatacatttactgtaggacaaaattatgccagttgtaggtagcagagaaccagatttatctgagttttctatgggtttttttctggtagagatgtttcatgagatttatcatttaatttctccagcaaatctctgatcctcagatttcaattaacctcttatctataaaatttcatatcagtctgtttaaatagatatacaaactaagttataatagttcattcattcattcactcattcatttatttatgtattcatgaattcagtagttacataacccctcattctgtgcaaagcactctcttatgtgctaggattataaggaaaacaaaaatattctttgctgtcaatttgctaaatgtctgttatgttatttggaagctaaatccatgtgtaacccatttttctgtcaacttctgtgccaggcattatgctcttgctaaatattcagtcattgattgttaaactattattagattttattttttgttattagattattaagttccgtctttcaaaattagagaattggaaatctaatgcctgcttggttatgttttattgtagatattttctctagtccttattcctggacacagtgcaccaggatttgaaataaggcctaattcttccttgagctactaactacttgggattaatatttttttcttccctcaatctttgccatttatttccgtaagtgtattgttgacctactagagagtatttatttaaactaagacaatcatcagcaaccccaatcgactctgatatggagtaaaaagcatccgtttctcagatataccacagaacaatccacaaaccttgccttagtaaaggagcaaaaaggtccagcagagacaatccaggaaacgattagttactaaaaagagcaaaagagcaatgaaactgcacaactgtcacaatacaaacatggttttcagtagaaagaaaaaggctttacagtgtctttatctggaaaacacagaagaaactagctttggcttatggaagagcagtaatttcataaaatttaggaaaaatgttcctatttatattcaattttacaccaattttcctagctttagtaaaaatagatgaatggactgtcttgaagatttacaaaactgccaaa

SEQ ID NO: 317112 - DNA, 4001 bp, Homo sapiens
aggctgatttattcatcagtctctttcatgactagaaataatttctattattaaccacagtaggagtatcatagccagaattaaaataactaatgtaaaaagatgccatattaatactcatatttagaaacttctcaaaaaaatcaatgaggatttatctaatatttaattaagactaggaaaaacctgatagtataagttagagatgcattcaaattagtaagtcaggagactcaaaacctgactcaaggactatgaagctttctggaagtattttaaaccacttaaaaaatcatgttatctgaggaaccttctcagttagaagttatggaattcctacagccagccctactaatcaattacgataaaattatgaagaattattaagtagacatcactgctgctctcagagttcagcactgcacttctccaatttcaaaaattgcctgaactcattaactatttacttaggatgcctaaccaaatgaaaacagctattaattcataatcaatcaaaagtttacctttgaccaacactaaatttatttctcgatcacatattaaaaaataggaagtccacatcttatcaaaagctttaattttttaaaaggattctctattatcggaggtaagcttctaaagagttaacacatttagtattagcaggtgattcatgtgtagagagatagattaggtaaaaggacaacgcgcgtttgagctgcacagttctccaagtcagttatacgaggccagcaactctgcagagaaaaattgtaacacagaagggcactgctaacagatttgttttaactgtagtcctgtttggctccttagagcacttcacgcccaggtggctgggttgttagtttaaccacaaagaagccgttatcatttataactacatctggacaaatatcttcaaataaataccatacaactggatcctggtgtcccaccctgccccccttagctcggcaacatttaacggccacgtaagtaaatgaagatattaaaatcttagatccatttaaccagatgttgattcttcgccaactgaagcagaaaaaacggcatgaaactttgaaggtttatgaaaatgatttgatgagcagaaagacgttaagctcacaaagccgatcttaccaggacttaactgatcatgacccacgaggaagcctaattcagtgcagagcgtccttaaaaaagcaacagcgccctacacaaccagcagcacccggcacaagagcagcgactcctgccctttggcagaaaccggggcgttttcacagaaatcgactaattggcacacagtgaagatccattaggtaactcgaaactgagcagttctggaatgtgctctacatattacaatacagaaaaccactcaatggtgacaaaccaggagtgcgctttgggatcaagacgttcgctccccgcagtccctcccgcccacttgcgctttctctccccgttcttaatggggggggctacaccacgcggggccgaagctggaggcgtagggagcccaggttctcaagggccccgtggtcttttagataaatccaggttggtgaagttctcgggtcacgttcgcgaacgcttcccgcgttctaacctaacccgcccgaacgggccctggggacagacgcggggtgcagccggcggggaggccgcggatgcccccgcgcctcgggactccggacaggagcggcggggaacgccgcagagtgcggagtggctgcggcggggccgggctgggcccctacacggtgaggccgagagccgggcgaccgctcccgcggcccggaatggcggtcaacgccaggccgggatccacatgcagccgaggggcggcgaagcccacacactagggaggaagaagacgcgggaccgtagcctcagtccttaccatggcgcgggcgcaggggcttccgctggccgggcccgcgcttggggagaggggcgggacaggccaggacgcgtttgattttggcgccgactacgccgcgggggcggagcagcgagacggtggaggtgggggaaagaggccggtcctcgcccgcgcggcgcgcagcgacccctagcgacccatccgagccgccggcgggggaaggggcgcgggcctggggccggggctgtggggagcgtgtccgcgtctcagtggacgggttgcagagctgcctccgtctcctcggtattctgtgaatgtgaccttttttttttttaaggacatcttgcctttgcttttactgcgttttcttggcgccgcagaaatatggcctaagtttggatgtaaaaaatagaggcgtttaggctgttgaggaaggaaacgctgcctccatccttccggacttgtcctgtctggggcggactggattcctttctcgtcttctaatctgacccctcatcttctcccgagccgctacccactgctttccagcttttcaaatcctgtgtatgtctgtttgtttttcccttaggttttaaaaaagaaggaaacaacggaatgaatttcaaatcaacatggtcaaaaatacgctacttcatggcttgagaatagatccagattcatagcaaaagctcaggcccctgaaagtgctgaaaaattttaactcagaattcaattattttgaaaattattctatggtgttttgaaccatttttaggtgtaagaagtacggttgggcgctgtggctcacacctgtaatcccagcaatttgggaggccgaggcgggcaaatcacttgaggtagggagtttgagaccagcctggccaacatggtgaaatcccatctctaataaaaatacaaaaattagccaggcgtggtggcggacgcctgtacaatcccagctactcgggaggctgaggcaggagaatcgcttggacccaggaggcagaggttgcagtgagccaagaccccgccactgcactccagcctgggcgacagagtgagactctgtaacacacacacacgcacgcacacacacacacacacacacacacagtgtagtaagtcttgtagatgctataagagtagcatctaaagttggaatttatgtcccctgttgcttctgctggaggcagaggaaggggtacattgaattgcagagttccattaatttggtttttcctgtaagagttataccatgtaactgatggtacataaggtaattttaaaatgataaatgagtacattaagtaactacagtagtggtatatacatttgtgctacttggggaaagccttgtcttaattggctctcaggcttgttgcaggtgagtggtgactatctgaggccagtggcgctgtggcagaaaaatttaccaaggcagttgtaagtaaagaaaggcagaatcattagagaaagcatgaaaatacgttgcaagggagcaatgggcagaatcagcagaaaaggagctgactgcaaggaaacaaaggcttgctggggattttatagaatagtgcttatgctgtatacggaagagggctttgtgcagtactgatgttacagtcccaagttttcctccgcccctgcctctaaagcgacacagtgcaaaagcctgccctgggacagtaacaaattgacccaaacaggtcttcttttgggaaaaatgagtgctaaatggatataaaaaagggtcacttaagctgcatctgtatcctaagtgtcactgagagctgctgtgacagttctctgaggttcctgttgtgcattgcagtcttgatcaaccagacctgggaatcaccgccacctaggaaagaagacacattctactgcctctggttcctttgcattttcagtacaaataccttaaacttcagataaccttctgatgccccttccttgacattctgaaaagcatgacctataggagcagcttatttatttatttagagttggggtttcgctcttttgcccagcctggagtgaagtggcatgattttggctcactgcaacctccaacccctaggttcaagcgattctcttgcctcagcctcct

SEQ ID NO: 317113 - DNA, 4001 bp, Homo sapiens
gagaagcttcaagttgagatacctgaatatggtgattagaactaaaacaagaaactgcccaggcacggtgggctcacgtctgtaatcccagcactttgggagatcaaggcaggcagatcacttgaaatcaggagttcgagaccagcctggccaacatggtgaaacccccatctctattaaaaatacaaaaattagccaggcgtggtggcgcgggcctgtagtcccagctactcaggaggctgaggcaggagaatcgcttgaacccgggaggcagaggttgcagtgagccgagatcacgccactacacactccagcctggtgacagagcggagactccgtctcaaaaaaaaaaaaaaaaaaaaaaaagaactaaaataagaaacaaggacttttttataaaatcacccagtcctgtcatctagccctatgccaatccgacaaactcagaatcaacttctaggaggagcctaagaaatccctttccgtttaaaggttttaggcaagttgacacaagccaggtcccctatgcatattggaaatatcaagtctgcccctaggtcagccttgttcagttttgcttaaacaccctaaaaaaaaaaattctagatgtgagcatgtgaaaataagagtgaattaaattctcagtattcagacgtcaatgtaatgactaaaaattattaggcaaggaaagaagagaaatcttaagaaaatatcctttaaatgctaatttctccacaacagtaaaacagtatatgggtgagtttcaacttctaagttttttattagttttctaaacacagactaaacatggaatgagtgcatcacaacgaagccttcaaaggagttattcctcaggctgtaacccctgttttcagaggacctgaggcttatctactgcctccatatccacatctggccatcccatccttctgcccttccccctccacgttcccctccactcgtctggaacaaacgataagtaagtgaaataatgaccagcactaaacatgacgccaaagttggcatttacaaatgattttcaaaacaactccccagtggacctaatcaacctaggcagggcacactatccaaaacctatttgctggttgtctaaaaagataaaactcatcctcttcagggaagtcctctgggaggaagggcgcctctaggaagcaagggggcggctccagacccctttctcagggacccccgtctgtgtccaagggatcccgacccgcaagtagccttgtttcagtgttacatctacagaacttgtcatcccaacttcccagccctaagacgagagaggaagttaaaagggtcctgggatgacaggggaaagtacgacagtcttatcttctgtgcttgggacccagaaaagagcaatgggcagccgcgacggagccattcaaccgagcaccgcttggatacggattgtgcaggcgagtgggagatacccacgagaagcgcacaaacaagcccgggaatgcgagcgaaggcagagacgggggtgatgaaggaatccaggcgctggccccggggtgtgccgggggggaagaacctcctcagggctgcaggagcccacgagtactcgaagccctatggggaggcggcggttaggtagtccgagcgctccgcgcagtcccggggccccgcttggtggtgacgccgggccccgggagcgctgggccaggagggtcgggacgagggcgggcgacgggcggcgggcggcgggcgggggcccaggtccacccgaacaaagccggcgcgtgcggggcctggctactcacaacaagaagctcatgttggccgcggggcaggctgcaggctcggcggtcgcgaggcctcggagcggcgtgggccaggaaagaagaggaaaggcgaatggaacaggagacagggaggcggaggaggaggtgccgagagccggctgctcggtggccgcaactagttcggctcagctagttccaatggcagggggagggggcggaagtgggtagcgctcgtcttgaatcactccaggggaggggaaggaaagggaggcggggcaggctctccgcgagcccctccccagctccccgccgcccccacctcacgagctctcgcgatagcggtgcaagcccaccccggccctccggctgcggcatggggactctcaccttctggtctcctctgctgctagggacgacgcccagcgtgtgcgccgcggctgcccggcccccctgtccacccggttaggagtcatggcagagctctcggagccgctcagctgggctccagaggtcagggaggaagtgggcttcagctcggggatgtcaaggtcccgcagtgagggatggaattaccaccggagttaggcccaccgtgagtgtccggccaagggcggtgaaaggtaatggcatctctcagttcaccacggaacccagcatgatagggtggtcatcggtgtaaccacttagggggccaaagcttgtaagcattctaatgcacagaacatcctagaagctagaagctattcagacccacttacaaagggacttttattctcacagggttatggggcccagggcaagcctttatattctgtttaagaatccttcacataccttgaatatgtcaccacagcattaccaatttaggagggaaatacgggtatcgaagagatgtccgtcttctttactcacaacacccatcaaatctacaagttttcaaagagaatctgagcaaaacaaatcatgtgcagatattagctcacctttggcttatcccaaagggcagaatacactttgaagtaggtgcagatatgaaatgtattatactgcatatatgcactattatttggcacgttggtaaagtggtaaaaaaaaaaaaaaaaaaaaaaaaaaaaaaaaaaaaaaacgttttaggccgggcgcagtggctcatgcctgtaatcccagcactctgggaggccgaggtgggtggatcacctgaggtcaggagttcaagaccagccaaagttcaagaccatggccaaaccccgtctctactaaaaatacaaaaattagccgggcatggtggcacacacttgtaatcccagctactcgggaggctgaggcaggagaattgctccaacccaggaagcagaggttgcagtgagccaagatcatgccactacactccagcctgggtgacagagttagactccgtctcaaaaaaaaaattttttaatagaagaaaatactagaatcttgcactatctcaggaacagcagaggttactggaatgagaaaacttacagactcaaaagattaccagatcaggataaatagctaatgcatgcagagcttaatacctaggtgataagttgataggttcagcacaccaccatggcacacacgtttacctatgtaacaaacctgcacgtcctgcacatgtatcctggaacttcaaattaaattaaaaattttttaaaagattccccaaaaagaagaaagaggaggatttatctgaatgaaaataatagatttatggtataaaaccctgtgctccaaatattgatatggtactgacttactgtataattcttttttttttttttttttttgagacggagtctcactctgtcacccaggctggagtccagtggtgcaacttctggactaggctcactgcaacttctgcctcctgggttcaaacaattctgcctcagcctcctaagtagctgggattacaggcctgtgccaccacacctggctaatttttgaatttttagtagagacggggttttactatgttggccaggctggtctcaaactcctgacctcgtgatctgcctgccttggcctcccaatatgctggaattacaggcgtgagccaccacgcccagccctgtatgattcttgtaagggtcttctgaaagtaagacttgcattaccagattactgattatctttggaaagagtgagttgacctgtcatagcctcagttttagcccatttaaaatgggagccttctatcat

SEQ ID NO: 317114 - DNA, 4001 bp, Homo sapiens
cacacacagacccaaagttccagggagctatcaggtcacacaagaaatagcaaagcacctcaaaaatttagaaataaccaccaaagcccgggaacaaatgtgactgctgcaagagcttacaatctaggccctaattcctgtatgtgagagcattttcaaacaaaattacttcccaaacaaaaacacgttaacaatcgaaactcatattgaggtcatcaaccacagaccatagcagaaaacgtagtgttaagtgagacagagcatagacaggaaaaaagagaaaacaaaaggctctctggtttcggcttctccagggtgtcagccaatctccaccagttgaccagaatccattggctggaaacctaaagcacaatgggaagaaattcatcatcgagaggttaatcccaggcacaacgacccccaaaccctcacgaacgccactgtgcaggacgccacctcttctggccaccacctgactcactccagtctctagcaacgttgacttgtccaacgtcttccccgaaaatcctctatttccacccccgcttgctggacggcccgggaccttgtccgtttctgtttccttggcgactctgagatttatgacccttccactgaacacgcatcacgcccaaacccggccactctgattatcccacgccgccaccgtcaaaaaacaaaacacgaagacggggcccagatcggccctgacccgagcacgcctttattctcccgccccacccccgattccggtgcatctcgatgaaatcatcgctctcgaagagcggccaagctggggccgctcctcggcctggcgcgggtgcccgacttaccgccgaccgcgctcacgacgactcgctcttctctatccgccggaccagctccaccagcatctctgccatcttcgcaatctccttggccttctcctcggccttctcgcacctcttggccgcccggccctcggccgcgtcgcccgggttctggaggtggttgagggcgctctcctccgaggcctccacctgcgttttgatctggatgagcatattgtccatctcccacagcttgctccggttccgcaggtacgcccgcccgtgctcgcgcgtcagcgacgcgatgtcctcgcgcatctcgttgatgaccgggagcagaaactgctcgaaatcctcctcgggctccagcacctccacttcctccggttccgccagctcgacgatgtccaggggccgcatctcttcccactgcctcggaaccgcaatagcgatgtctgttggagagagaaaaccgacactcgctatgcttagcaatagagagcccgaatattcctgaaaacttttaccctttttcaacttttcttctcagagaagccacggacaagcgacttacgcgcagagtaacggcgaacaaaatggagtcccggccgtcaaccagcgctctgcgcgttgcggcccctttcacgacacagccgggcctctttacggtcaggggggcgagctgcgggcgcgcgcacgtctagaaagagaggcaccggcggcggcgtcgcggccgcacggacgcgcacgcaggcacgcgcaggtacgggaccgcacgctctcgctcgttcctgctttcccgttacctctgtgcgtcacccctgttttaccctgtgtttggagggtggcctcttctgggtgtttccctccgatagggcttcttgagcacgcgagtttacattttttaaaaaggcctcccgcacttcccaggcgcggtggctcacgcctgtaatctcagcacgttgggaggcgaggtgggtggatggcttgaggtcaggaattcgagaccagcctggccgacatggcgagaccccgtctctaccaaaaatacaaaaattagccgggcgtcgtgttgcacgcgtgtaaccccagctgcttgggaggctgagacaatcgtttgaaaacgggaggcggaggttgcagtgagcccatatcgcgccactgctctccagcctgtgcatcagagtgagactccgtcgcaaaataaataaataaaatataaatgaaaattaaaaagggccttccacactagaagaggaggatcctacgtgataatgcagctaccccaggtggacgcttaaagccccttcctttcacgcagggggacctgagtcccctcagccgttttatttactttttttttttttttttttggagacagagtctggctctatcgcccaggctggagtgcagtggcacgatctcggctcactgcaaactccacctccggggttcacaccattctcctgcctcagcctcgcgagtagctgggactacaggcgcctgccaccgcacccggctaattttttgtatttttagtagagacggggtttcaccgtgttagccaggatggtctcgatctcctgacctcgtgatccatccacctcggcctcccaaagtgctgggattacaggcgtaagccaccgtgccgggccttatttacttattattatttaaaaagttttttttttttattgaggcagggtctcggtctgtcgcccaggctggagtccagtggtgggatcatggctcactgcagccttgatcttctggcctcaagtgatccttccacttcgggcctcccaaagtgcagagattacaggcatgagccgtgcgcctggccctttctgcctttttaaagagtagttttccttcttccttggatgacagtcagaagggtctgggtgtcttttcaccaaaccggcctccccacaccccaaggtggagcctggctgctccgtcctgaggccccagcagacccatgttcagtgtgtggtgcaaggcgctgtccagagcctctgagcccttccactggatcctaggctctttggggtcttagctctgtggccttaatgccctaacgccctgggcagagcttggcgcatattggtaaatttgccttaacatccactcaacacagaatgaggagagatacgttaatttcctagcttgttgtcccattcccaaacatcaataaacttttcagaaatccagcttacataaatcccatggatttggcttccattttcaaggtaaagggacacatcacagttttgactacagcagaattaaggattcagagaaacgtaagtatatgttttgttttgacttttctcaggttcttaatattttggttgctcttgtaaaaacccaactttggggcttgtgtgaaaggaaaataaatcttgggaccccataatcactaaaccaaaggggacagtcaagctgggaactgcatcaggcaaacctgcctcccattctattcctaaaaaagatagctactaagattaaaaagctacctacctccctcacaaggaaattccttgtggacaaatgacagaactcggagccacccatctgctcactgagatagatgcatctctgactgcctcctttggaaaggccaatcagaaactcaaaagaatgcaactgtttgtctcttatctacctattaactgaaagcccctgccctgcttcaagttgtctggcctgtctggaccaaaccaatgtacatcttacatatattgattgatgtcccatgtctccctaaaatgtataaaactaagctgtaccccaaccaccttgggcacatgtcatcaggacctcctgaggccatgtcatgggtgtgtgtccttaaccttggcaaaataaactttctttttttttttcacatttctttcattttttttattattattatactttaagttttagggtacatgtgcacaatgtgctggttagttacatatgtatacatgtgccattctggtgtgctacacccattaactcgtcatttagcattaggtatatctcctaatgctatgcctcccccctccccccaccccacaacagtccccagagtgtgatgttccccttcccgtgtccatgtgttctcattttcaattcccatctatgagtgagaacatgcggtgtttagttttttgtccttgcgatagtttactgagaatgatg

SEQ ID NO: 317115 - DNA, 4001 bp, Homo sapiens
tttccaggccctgataatgtcttttcctttctccggcctcttaaagctctctgtagactgtctcttccatgccattctctgatgcccctataatgtgtgagggtattacaatagtccctattcaaactgccttgtcataaaaggtcagctatgttgtctaaatcaactcacctgacaggttacacaatatatatcagacaatgtgccacaaaacatagctctcctctttcgtctcacagaggaactaaagttccaaaatatatacaaaaccatcttccatctccaactgtcttctctttcttcccagttttatgcaaagcagtctcattaatacattcttcaccaggctcaaccaagtagcgtagtgtcttccattgcacctctaaagttggaagattctgatcccacgtcttgacgtgttccaaaaaacaatcaggtcacaaaggtaacagcaaaatacgaggccatgcccaacatttcaaaaacacagcgaagtaacaagaataaacgtgaccacaaaaacaacttaattaagccccatttctcttctgagagtatttctttgacaaaagttatatttccaaaaccaaacacatttgataatctaaatccatatcgaggtcatcaatcactgaccataagggagactgttacatcggggtaaaaaacatacaaaaacaaaacagagaaaatgacaagctgtttcagtttcctcaaggtgtcagttcatccttaccagttgactacagtcctcagctgtgaacctaaagcacaattgggagaaatttaccatgaagacattgactctcaaagttccatatcctgatgttaaaaataaatgtgaaccacccagaagaatgccacttctttgagacacggtcctctgacatacctgtctcatagaacaatctggaaatttcaggtaatggcctctggctttactctttatttctccttccctgcgttctcagcctgcgttccactgtgctctatggcctaggtcttctttggctttccccaaactcccttagtgcctagacaggtctacttctggcgactgccctattagaattgacttttatgtttcacaaaaacaaaaccgaagttactgttatctttctctaattaacagcgtgggagggagaggccacaaaaaaacggtatactaacgcctaacaaaaccagcacgcattctttcctcttgaccccaactttgttcccaatgctcaatttttgatgcaataaaatgggggatgcaggcctagaacataactttttacagggcgcggtttaaccatgcttagggcgactactgagtttcatccaagctccagctagtttccgaccttaccaccgatctcctccttcaagaagactcgcttctctctattcgccagacgagctcgaccagcatctctgccatcttcgcaatctccttggctttctcctcagccttctcgcacaactccgacactctctcgtcggcttcgccactcgggtgctgcacgtgattgagggcgctctcctccgaggcctccacctgcgttttgatctggataagcatattgtccatctcccacagcttgctcctggtccgcaggtacgcccgcccgtgctcgcgtataagagacgcgatgtcctcgcgcatctcgttgatgaccgggagcaggaactgctcgaaatcctcctcgggctccagcacctccacttcctcaggcgcttccacctcgtctatgtccaggggccgcatctcctcctgccgcttcctcagtaccgcagtaggggcgttcttctcaccggaaccctccaagaactggagatcagcagttactgctggaggctgagcgacccacacgctttgtcaattgtactcccgaattatctttatttttttttcttccttttaattgtaagcctttcgcttcacaactctgcgggaagaatcgccgtggatgcacacaaataagcggcctacaaaatggagtcgcagccgtcaactcgccctcggcctttttgcggccctttcacgacagagccgggcccctttacggtcacgccttcggcaagaccaggtagcgggcgcgtgcacgtaaaggggcctcgggcgcgcgcacgtccatcaccagctgcttcccggcgcccctcctcgccctctaatttagatcggtggcggcaggtttgttcgcgtcttcatctaaagcttcccttcagcgggcttttacttttattattttttaaaagtaaaagtgaccctcccttccctatatttgaataagactggctggcgttcacagcgcttactatctaagcatgcacaagcttgaattaacttatatgaattcatttagccctcacaacgaacctagaggtaaaaaccgtgctaaaagtcgtgatttgagcccagagcaatgtgggtccacagtccctgctcactgttttagaatggaacacgtccttctgtcctccccacccctggctcatacttttgtcctggggggaaattctctcgctgccttgggtgattctggccggtggtttttggtctctcttcgccagtctgtaaggtcctcaaggtaaagggctacttctgtttcagttctgtcctccgcccctcctgtcagcctggcgtcaagcagggtcttaggggatgctttagagagaggaattcttctctagtacataagtgcttctaccagactggaggctgtttggggacaggttctggtcttgatcacctttatgtccctccacacacaggacctgaaaatcagcagggacctagtaaatgtggctttgatggtcagtacattttgatcactaacctaatgccattgtggaatggaggaagtctgttgctaggcttagccacccagtgccacactagtagtaatatgagtgtgtgtagagggggcatccttcttaacacaagtgccacagatcagagcttcagttttccagtctgataaagaccaatggccccagcctgaatatctgtcagtgggaagagggatttgtaagatgacatgcgtgaaacagttttgcaaacaccaacattctagcagatgttcatcaaaaaaacatgaagagggaaagagcaagacaccgtgaaaaaagatattttcaatagttatactgacaaaggactcatatgcagaatatattgagaactcctacagatcaagaaggaaaagacaaaatttttaaatgggcaaaagacgtaggctggtacttaacaaaagagaatattcaaatggctaataagtatatgaaaaggtgttcaacgtcatgattcaacagggaaatgcagatgaaaaccacaatgaggaagcactgtacatccactagaatgactaaaatttcaaatacaataccaagtgttggggaagatgtggaacaactggaactcttatacattcttgatggatgtcttagtctactctggacaccataacaaaatactatagactggttggcttaaaaacagacatttatcttctcacagttctggaggccagaagtccacgattaaggtgtcagcaaatttggtttctggaggtgagggctctcttcctcaattgcagatgaccaccttcctgctgcagtcctcacatgatctcttctttgtgcatgcagtgttggggggtacaggaaagagtgctctcttgtgtctcttcttataagaacatgaagctataggatcatgcccccacttttatgaccttatttaaccttacttactgctttactccaagtacagccacactgggggttagggcttcaacataaaaaaatattgggggacacatatattcagcacataataatgggaatgtaagttgttacaataattttggaaaactatttggcagtatcaaccaagattaaacatataccaatcctatgttctagcaaactgacaccttgttatacactcaagagagtttgagtgcaattgtttataaaaatacatatacgagaatattcacagcaactttattata

SEQ ID NO: 317116 - DNA, 4001 bp, Homo sapiens
acagaaatgatgattccataaaagattttgaggagatgaggaaaacgtatatttcagagcacaaagtgattttgcaatataaagaatttctttgggttgaattacctaaaagtttgtcactgacctgtgttcttgaactatgaaatgtgaaagtttctcctgataagtaaacaattaaaaaaataaaaaagatagacaataatcaaagccacaaactttggatgagctaaccaaggagtgaatttagatacagaagagatgagaatgaaggatggaaccctggcttccagaacactccaaagtaaagaggctggggagaggaagaggaaccagccaagtaatgtgagaaaaaatgacacatgaaataggaagacaattaacagagagatatcctagaagccaagagaagaaaatgtgacaagaaaattataatattcaggtatttttggtttctttggatttgtgtaacataacgatttctgtcatacatgaagatgccttcaacctcctttcagaaataatatacattttggtttgctcacaaagtaggcatcagggtctgttgttatctcttgtcacccctaatttttgagcaataactctcttgacacagttttcctaaaaagaaactcaaaaaaaaaaaaaaaaaaactgtgatgcagtgttaaatatacatgtatcactgacctaggattgcaagcttcagtacttcctctgccatttactagttatatgaacttggccacatatctaataagttcagtttcttcctctgtaaaatgggggtaatgctggctactgcttctacctaaagacctacctaaattaaacaatatatatcactggacttcaaaaacacaaaataaaagcaaaaagcgttgcacaggccgggcgcagtgcctcacgcctgtaatcccagcactttgagaggccgaggagggcggatcacctgcgattaggagtgcaagactagcctggtcaacatggtgaaaccctgtctctactacaaatacaaaaattagccaggcatggtggcacacgcctgtagtctctgctactcgggaggccgaggcaggagaatcgcttgaacctgggagacggaggttgcagtgagctgagatcgcaccacagcactcccagcctgggtggcagagcgagactgccgtctcaaaaaaaaaaaaaaaaaaaaattgttgcacaagaaagggctgtcatcgtagacaaaaagttgaaattattaagatgaaaagaggcgctaccaagaggtactacagaattagccccctcaaatgataaacgttgatccaaattagaccacctatggaagtttaagaactggaatcgcctataacgaagtaattccgaaagcaccaaaaagcactttgaaaattgctctaatttacagacttaagccactcaaatacatcatctttcccttatcagaactcacctcacttatcacactccactacccgcagcccacaccccagtatcagagacgacccagtccttgccatgcccataggtggctggagggcgctcgatgtacgtcccgctcccactccctccctcagggtggacgtctccagaatggagtgaaacccttcataaggtcacttttaagtagtaatgacccaccctctgaaaaacctagagaccagaaacagcacgaggcattttcagcacccagagcagaatccgccttgcactctgctgcaaccagagactcggtgccagagccatttcccctgcaagacaacccctcgccttacctctacccatgcaccttacggccgccgccatgttgggcactccggattgcgttcacgaaattgttcctacgtttctactgggaagaattaaaaaaaggttccgttctagaatccgcaaagagggaaggagttaaaaagagaaagaggaacggggcggggaccaaaatgagctttgctgccggcgtggcggtgttactgttagtcctccgtgttgcccaggaccctgtgtgtttcgtggttccggtatggctggttaaccaccttcgggaaaatacgatcctgttggcgatgctgtgattattttaatccttccttcttattctttttcttttttgatcctgcaagtgtactcagagcgacaattttaacaggctgtgagagtacttaatacccaacgtaaaatcttgaaaaacaggaaccctgaaacccactagcttcctccgccacttttccggccttggaaagacttattttaaaaattctctaggcgttttcgccgctacccgagggaggtgtccaactcactgacaaactttttttgctaattgtcaaactttctgtcagcgcaagatcaaccttagctttaaaatcttaaattaatctctacatttaccccctgctggcaagcgagtagacttaccattaggatcaattgaataataatacttgacatttataaaacatttctagttttaaaatggcagctccaagacccacgcacaagttattctgataggaaaaaaaaacaaaaacaaaacagaatgagtgtactttccattacgtcacagctgtcggtgtggtttatctaaaacaaatctgattacggattttatcacttcccagcttacctcccccacaacacacacacacacacacacacacacacacacacacacacgtttctcacctccataacttggttcattctatcttctctgcttcgtgtgtaccgtaccctacatcacctaggtaactttttaaagatttcgcctcaggctgtgtttcttttaaacagttttgagatataatttacatagcatacaatctaccaatttaaattgtacaattaaatggtttttagtgtactcaaagagttgtgcagccatcaccacaatatatcagttcttgtcaccagtctgagctttttatgggtagaaaccatcttactcatttttgtaacctcagcacatacttcagtgccaggcccataggaggctctcagtaaatgtttgctgaataaatgaatatatgcatacatgaattagtgactcaattagaatggcaagcctgcaaaattaacttgcttcaatgaagctgcccacaggcagatgaactggatcaaaggcatttcccagatgctttattcatatttatacatagtactcatctacatgaaaaaataagatttctaatgtattgccttgtcttgttaacacctaagcagttacttcaaagattctataacaatttgtgacttatgcaaaaaaatcgaagaacttaaatctatctttgtaaacttttccttctctccctcgctccctctcatcctcccttcttttcacaaatatatgagtgcctgccatgtgtcaagcagtgtacttggctatgcataaatgaaaaaaactaattcaatttgagagtaagtaccagaattggagcaagtttacccagtcaatttcagagaaaaacaaacactcagattagaggtgctggtccttagaccctatatctgtttcctttccacagtccacagctggggtcagttggcccccatctgtggacttttttttccccctctcaagacaggatctcactctgacacccaagctggagtgcagtgacaagatcatagctcattgcagccttcacctgctgggctcaagtgatcctcatgtctcagcctcccaaggggctgggactacaggcacacaccaccacacctggctaacttatttttatttttctttatagacagcggggagtgtggggtgtctttcttttttgcccaggctggtctcaaactcctggcttcaagcaatcccaaagtgctgggattacaggtgtgaaccaacacggcaggccccatttatggacttttttatgtctactgttctaacaagagagtttaaacatcctatattgaaactattaccatatagtatgcttacataccatatagtatgcttatagtggtagcctaattaaagtaatgtcctgtacaggtacagc

SEQ ID NO: 317117 - DNA, 4001 bp, Homo sapiens
atggcccatgacttactgtaataaaaggttctttgactttatcaccccaggctactatataagtttgtatcagtctttttggcttttctgttaccaccactgcctctaatgcttttgtcacagtgcctccttcctacagtcagtatggctgtctccaggatagaggttcttaatctagaaatggctttgaagcccatgactccctgtaatcgtatgcaaaacttcaaatgaatgggactgtgtgcctttttctgtggagagggtccataactttgattagagacaaagtgggatttatgaactaaaaaagaaataatgtccctttactttcttaaagtatggtgcatggattagattaccaagacagatgctcagagaaactagacaagttcttttgttttttccaattcctcaaactttccaatttacattcagctcacgtaactactcttcagctctgtgccaagtgctttgtatggtctaattagtgtcaaaatacctttgcatgtagcaagaacctgtgctttcagaaagtccatgttaatactatagccaacctatagctaagctttgtacagtctcttttcagttatctaaaattctgctcacccaaactaccttttaaaattcccatatcatttgcttacaaagggctatgtaaaaaaaaaaaaaacaattcccaaatcacatatccttaaatttaagatctaggaagaaaaatatggtattatagcagctttgcttctaatctaggaattcccctacttcaaaactcagctgactacatgactacaatcaattcatcatcatttctgaactcagagtaattatcaaattgttttgtcctacggcagaactctattcaagtagctaaaataaaagatgttagagtctaataccagatctcgttttaaaaagaaaaacattttggtcatatttgcaaaggccttactaatagaaaaaaaaattcttaccaggtcctcattgctggatacctgttgtgaacaacctcttctccaaagcactgcgattaaacagaaacagcaattaaccatttctttttcttagctgaatagctaaagatttttgtttttatggagacaggatgaattaagggacacgatattaaagaaaggttttgtattatattcagaatggttaaaaacttttatatttgggacagagtaagactcaacatgggtgtgctttccagggcttagggggaaaagaacatattttcccgcccatacctgctctttctgacatttattttcccttcattccatggttagagaaaattcttaatgcaaattcttataggagaagcaacagaaaggcactgtcataccaaaaagaaagtaacagacccgtcccagaaagaatttatagagaagcacagagaagataaaattgcaaaaattatgcaattttgttctgtttggggaccttagacatctggaatttgctgctgggcgactctggaaatgtcccttcctcactaagattatccagagatcttaggaaagtctctgctttttaagaaccactccaacttcctcatacgtttaaatactttaaaggagtggattagacgacactaaaacagtcaaaggcaattacagattcccacccatcttggagaaacttaatcgcctagaaaccagagtcgttttgctaacagggacgactctaaccattaggactaaggttaatgcctgcagcgctacaatggagcataggatatggagactttacccgtgtgagtcccgggatgtgtaaggctgacagcagccgttaccaagtgtgtcaacttcttcctccctagaccaccgcaaacagcaaccacagcggccatggttccgcgtttcttccacttcctttcgttccaaatcgttccgaaaggccccttccgctgctcttcccctgtgggctcgagtaccccgttcaaaggttccgcaggagaacgctgaggacccgcgagagtaggtgaggtttttcaatacgcatgcgcagcacctttctgttcgtgccctccctacgcggcaggtcacgtgaggcttatgattggacagggtagaagtttatgcgtgcttccggtccgcgagccctgagagctaacttggggtcttttcccaaggtggatgtagaagcgggctccggcgtcccactctcccttccatatgggcttagcgtctgggtcactgagaacgacgtctgaatagggccctgggtccttgccatggatgaatgtggttcccgcatccgccggcgggtgtctctccccaaaaggaaccgtccaagcttggggtgtatttttggcgctcccaccgcggccgagctcgtgcccggagatgaggggaaagaggaggaggaaatggtggctgagaacaggaggcggaaaaccgcgggcgtactgccggttgaggtacagccccttctactctcagattccccggaatgtctcgtccttggaggtggtgatacaaacccggacctcctacgtcacatgcccactgacagaggggtgggagaccaggtacggaggacttggaacttgaaactgcaaacttttggcatccttcccagatgcaaagagttgaccagttttatcgccttcgtttacttctctcgtcttcgttaccactgttaatcggcacttaggaggtattgattgccttgttatttacatttctatataaatatgaaatgtaaaccccgagacataaaagttgtgcacgcagcagttaagtggcatgactgagacacaaatctaggcttccagataactgcagctcctactgtacaaataaaatctgctgtttattgaagacccgttatgttaagctagttatattatctagattttacgacagtaatcaggccctgaaaagttgagatagtacagttcttgctccaaatcctgttgtcttaatcactttactatattgctgcctccaggtttgtgtgtcttctgtgtagcagaccactccaagtcagtattcagtttctcagtctcaattccaaattcctaggaactccttggagtgtctagtggtacaaccatgtttctgttagaggccagtcactgtagattgtagtctgggagggaagcgctgcagttatcagaaacttcgaatgcgctgacatttcagtagacgtctaccagtcttcctgctgttttagtacagctttaagaattacaatctggccgtgtgcagtggctcatgcctataatcccagtgctttaggaggcagagatgggaggatcacttaagcccagaagttcgcgttcaaaaccagcctaggcaacagagacccagtctctacaaaaaaaaaaaaaaatttttttttcttaattagccgggtgtggtggcctgcacctgtagtcctagctacttgggaggctgaggcaggaggatcgcttgagcccaggatgtcaagactgcagtgagctgtgatcgtgcagtggctggagccactgtgctccagcctgggtgacagagccagaccctgtctcaaaaattagaatctcagtatcatcgtaacactcctgaacctgctgtttaggcaagtaatttaacctctttgggcctccatttcttcagctgtaagatatctatttacatataggtctgtgatccatatgtgaccatataattatatacttggtacagccctaggctgaagtgttttttgggggttttgtttgtttgtttgttttggtttttttgagacagagtcccactctgttgcccaggttggagtgcaatggcgcgatctgggcttaccgcaacctgcgcttcccaggttcaagcaattctcctgcctgagcctccgagtagctgggattacaggagcatgccactatgcccggctaatttttgtattttctgtagacacggggtttgaccatgttggccaggctggtgaagcttttattcttaatgaaactggaattgaccataagcgtttttgttctctttgcagcctaatgacagtga

SEQ ID NO: 317118 - DNA, 4001 bp, Homo sapiens
taggtcccggctttggggcctgcctaggggcctttgggcagggccaggccccggacccctccttcaaggctcagaaaaaatcaaatcaacgcaactgaaagcggagacctcacaggctggcggtctgtccggggccttgctgggcctcttccccactcccactagggctggggactgggggttcccttctgctgtgctggaggccggctcctcgcctgaggggggcagtgggggtggcctctcccacaagtggctcaggtgctctcagcctctctgccccaggctcacctgcctgacccggaggtggagcagctgagtgaggccactcccatcctggaagctgacaggctctccggcagccccaggcccagccctgtccaggccgcccacagggccgggtgctctctgctgccattctccccctgcagcttccagctcttgctgccaccctcgctccgtgcaagaccctccccacacccaaaaccatcaccccacacctgtgaccttcaccgcacacctatgaccttcacaccctgcaagaccctcaccgcacctgtgaccttgcctgtgcctgagaccttcaccccaccatgacccctgcccacccgggaccctgtcctaatgggctggggacccacgcactttaagatgctgggtgtgtgggaccacacctgtcccctcctagacgccaacatctccctggctgggtggtcccctccggccttccctgcaggttgccagggcaggaagggcccacctgccatgtagcaggagcagaggtggggccaggccgggagcccccacgctgggagtcctgggccagggcaggcctccacctctttcttcttcgcaccgtaagccccacccatgcgctggctggtcctgcacctcacctggtgatttctggaaataccccaccgtgaccctagggccagccccagtggggctcaccggctcatggcagaggctcagtggatgctccaagtcgcagagcactgagcctccttctcacttgcagtctcaatttccccaatgacgcagtaggcccctgaaacccctgctgagcttgggagcttggtggtggggagggcactggcagccgccgcctccctatgggggagcagggtgtgaggtcagtgggcaccaccatgagtgttgctgcctccgagggacagtgcccagaccgcccatacgtcctgggagccatcctggcctctgcccagcaccagccccacccctgctacccctcagctcttagactggtttcctgcccttgctgggcctcagtttccccacttccccaatggaaggctgcacacacggtttccgtgggccccgtctcaccccgtggggttctgcccatacccggccagaggagaccgacaggcaggccacgacccacacatcgtcccgactcagagctccaagaaagtcaggagcggcccgccacgcccgggcccgcccgtcctggtggggcccacactgcccgctcgcccacctgtactggaaggtcatgttggtgatcttgatcttgatctcctcgcccagcctgcgctcgccggtcatctcgaagagcttgctggccatcttctcgtacaccttggcgttgcgcttggtctgcttgagctcgtcgaagaactcctcccagaccagcatgaggccgcgcatctcggcgtccgtccagttgcgggcccgccggtgcttctccgcctggggagacacgaggtagccgggcccctcggccgccgccatgccggaggcgcctgtggggtgagagagcgcgctcagcgagggccccggcccggccccacgcaccatgggcgggaggcgccgctcacgctcgctcgaaggcagctccacgctcaaaatggggcctacatctgacaggcaggaatttagttaaaagcttttaaacgggaaacgtcattttgatgtcacgtttccatagcaacagagcaactgcataagctacaacaacagaaaccttttaactgaaagcacaggaatcagggctgcactgacgggccatcaatattgcggcgagcgggccaggcccaaacccagcggcccggctcccggccctgcctctcaccgccgcccaggcggatcggcccccagttcagtgccgccccggctcacgcaggccaagagggggcctcgggtgggaacaggcaaggagaaagggggcaaaaggtgggagaaacagagaggacgagcgacgaggaggctgagtcccccaacgctggccactggccctggtgggggtcctgggctgtgggacccttaagctccctcagaaggcccctgccttctgaactggggctgggccctggggctcctgggtgtcctggtcctggggtcctggggctgggccctcacaagaaccccaaacccccacccttggctccttttgcttctcttgctccagcccccaggcgccctgggccttaggtctgtggacactggaagcccgggttggtcagagccaggccctgcccagaggtgcagacacagggtacacagacacgggcctctggcaccggccggtgaggacagcagtgatggcaaaggtgagctctgtttgagacacaggagggaatcagcccagcaagccagggggaggccacagggcactcctgggaagagccacgggcatggcagggcacagtctgggtacgcagggagctgatgggcagccagattcggcacagcgtgcggagacggggctcgaggcccaggctgcggggcaggcccctgtggggctgagggactgagatgcccccaggctggccggaggaccacagcctgccgagagccccagatgcagcggaaccggaaccggagcggtggcctgggggttctgcccggagaagtgccgcccaagggcatcggcacccgaaacgtaacacatgcatgtcaggcagggctctgtggagcccacggcacctgtgcagcatggactgtgctgggcgcggtgcccaggctaaatgccactgtggtcagcagagggacagcaggcacccccctgccctcctcaggcctgaccaactgcaggagactctcaggtgtgggctgccccaagaagggcagctgagcctggaatgaggaggcatctcggcctctgcccgctgcccctgctgtcctctgaggcaccttggaggtgggaccgaggctctcaggggaaggacagggcaggggcatggcgggggtgcccagccccactgtgggtgcccagcatagggaaggcgaactggggctccctcttgcccgcagtcaggataggaagtgtatggggagggccccagggatgtgtgaggaactcagaggggtctctgcaccccctacactgggtccctggtcaaggcctggccccaccatcagccccatgagactagtccagtcccttccatctgggcctcaggagacatcatccctactgcctggcactggggcatctccactcgactaaggtcagccctccgtgctgggggctggcacagagagctctgtggagtgcctgcagatgaaggagtgactagaaggcctacctcctctaggaagccctggctcctcaggaacagggttcggccctccccggtgaggtcagggaccggtccgaatgccctttccgtagccatgactccaagggcagaggtggggctggctcccagcatctcttggcatctcccggcacaaggggtaagcagaaaggcatggggtcccagcagtggttctgggtgcagctctagcgactcagcatggaccttagtcatgtcctccccactaacctgtttcctcacctccacaacaggggtaacaggatctgactatatcacccagcatggtgctggctaagggggcacagccctcccagaaccctggggaggtcatggggcctctacgtgccctctacccccttccacaaatccaccttggagctgctggggacagcgtcaggcctactgtcctggctgaaggggcagctgctggccagtggacac

SEQ ID NO: 317119 - DNA, 4001 bp, Homo sapiens
tgagactccgtctcaaaaaaaaaaaaaaaaaaaaaaaaaaatcgctatggatctccagctgccaaatccaataaacctttttttttttttttggagtttatttgactaatctggaagatttgatacttctcttcttgaaataccgcctttccttggttcttggaacttaaatgcattcactctgacaagtattgtgcattcattgtgctagctggtgcccttacccctgagttcataaaacataaaatttagtgaggaataacaactagtgtccaaaccatcaaaaattatgtgataagaacaataaaggggggaatacacagtgctatgaacttctagagaaaggtgctatctaaactgagacctagaacaggagaaggaggtgacaaattaaaaaatagagtgagggagagagggtcaagggaggggttttgcatagagagaacagcaactccaaagactcaaccaggagattagaaaaaatatgagaattgaagctggaaagtttcccaataatgccttccttactcccttctaacgattccagattgtcttgggtgatcttaactattttctgttttaaaaatatgctgacatccatcatctctatctctagccctctcccctaaactccaggatctaattatccaagtttactggtcatatccagtcagagagttcagaggcacatgaactcactcaacaggtccaaaggttcagtatgtgctcctcacaacccccgcccaaatactaggcctcctttaatgcctaattctcagacataacgttttaagtctctcccattctgctgccttaagtcttcaaactcttacccaatttagaaacacttggtttagttaacattcaggaatttacttttcacaaaggagcgagggaatggatatactgttgctaaccgaacaaggaattaaagaggagaggggaaacaaggtcttggaaaattgaatttccttttcctttactcattcttgggcaacctaaatgactggaagcctgttctggaacaggttgactagataaatttagttatttgtggattctcagaaaccttgaagtttagctgtcagccagtctctgtcctttggcactttaacacggatttcaccagctccttcattttctggacttgccctgcctccaagcttgcccttcctaaaccttatttctaagatgcaatgccacgatctatataaatttaaacatcagagataacctccttaaaacactcaaagttcaagggagtgcttgccctaagcataaagatcaagccccgctgtgattgatgcacacgaggcccttccagacttcttcactcttcatttcttacattctcgccatcctacacttcacatttttgcagtatctgatcactcatggttgctactgcttcattcctctctgcccacggaaatatcgttcccttacaggtgatgtcctcccattcaactcctagtcatccttcagtaacctcctctcggacgcccttcccaaccccactactcccaaagcacactacatcttacctccttctagtggttcctgcttttgtataactttcgccagcctatcaccctgtgctgcaactatcttctacgtcctgtctcccgaagacaacacattttaaagggcaagaaacatgccctagcctagttccatcacttaagaatttcactccgttttcatcctttctagcacgtaccttagcctaggcccaccttcactccagtctccttccgccccgtctcgggtaccactgccagcgtcccgcccagcgcgtgcatccgcacccagaacccgctcccctcgatctcacggagcaccgggtgggagcccgcctgctcccccttcctcgctcatgagccactcctccaaccccctcacctgaacggccgcgagatgactgccggccaccgacaccgaggactcgccaggtgttccaacctcggaacctgcctcgcctggcttgggggtggagccgggtgggccaggcggcccgtcctgtcgttattggcctgcgagagctcccgccccgccttctcggcgcggtgattggtctgtgcagttgccgacatcgtgtgactcgcgcgaacgagctcctggcggtcccagccattggctccgcggatggagtgaggatagtgagacctgcagagccagccaatggtcggcaccgcggagcgcccggaggcggggaagcgtgagagcgcgccacggcgtgagggggcgggcacagacggatggccgcctcgccctgcagcgcggagtcgccttggcaactgcggtcccggcagattcccagtgagagcctgcgctgtgcgggggagagtgtcgcgccggccgccgtcccaggacttttatttcaaatgtgacctgtgtagcaaccgcagttcccaaacccgggaagaagagagtatagatgagtcttaaaatctatgttgactgttttgtgtttccagacacccttgccttcctttttctggtctaccatttagatttagatctttcgtctcccttgtttccccagcctacgtatcctttaataaattcctgcattttgaaaacggagaatttcaaatgcgattatcgtcattttgcagatgagaaataaaggctgggaaagatttaaaaagattgaacatcaagggagagttcggctcccaggaccttgacctcgctacatgggcagagaacgcccaggtgttgttgcaattgttgtgctggacgatgagtgcccgggggcgggggcgggggcgggggcttgacgcaggtctttgcagctctaaagctcagtttacaccatctctcaacattaaaatattgtgtactggggtttaataataaaactgtacagatgtgataatatactaaaactttcacttaacggaagaggtgcctttaaagaaaaaaccgcacaggggcatcatttgggctagtgaaggccctttttcctccttctttattaaggtataattgacaaaaattgtgtttacggcgtacacatgttttgattatgtgtatattgtgtcaaatatatacagcttctgaaaacagaatactattgtttcattcctccatgcttttgctcaaactggcccttctgcctggaataatcagccatctccatgccgccccatcaattcaggtactatctccttgaggaagttccctcttgaaaagtgtcttttttagattcagtgtgacctgtacttattcgtctatccctcatgtttggcacacacattctttgtaaagtatcatgacagcggtcacgtcaaatgaaaagaaatgggatctgtcccttggttgtcagagtcagccctgtctttaggatgcctttacagtggtgtctgaaaccatgcctatatactttatgaagttaatctgggaaaaaggggtggggggaacgaaattaaaccaagcttgcagcacactgaggattaataattaggtcagcttgctgtctgaccccttcctcataattgtttgcctattgcttcagaatcatgtagactctgttacaaggttatagtttcccctaactgctctatagacaacaacttgaacattatgaaacgttaagtttgtgctttgagataacctttcaggtccttcgtactgatgaaactactgactcagctggtctgacaaggagctgactcaccaaagaatgcagttcccacatcctgatggtttcattcctccttaccccagccaatcgaggaccctaattttccagcccattgccctccaggatccccttaaaagccccagcacagaactcctcagagagatgaatttgagggtttcctcccatctcctctcggcaccctgccatcactaaactctttctcttctgcaaaccctgctgtctcagtgtatactgtgcagtgggcatatgaatctgttggtcctgtagtggatgctgtggcacaccacccagatccccctcttcaagacctaagcaggcattcctccagctg

SEQ ID NO: 317120 - DNA, 4001 bp, Homo sapiens
tttgacttcggggtcttggggcccaaggccctaagcgttggaaaggacactttgcctatgcagcagctttcccggcagaaagtgaattcaaatcgaagatgtttcaccacgcgggttttgcctaagtatgcattttttcacacctctctaaaaaacaaccacaaacaaacagaaaaaacaaaacaaaacaaagaaaacacaacgatcctttggactttcagaccaccaggatgtgagtcaaacgaaatctcgtgttaacaccccgcttcttccctgctggaggccaccgggagtccgggaagcgcttggcccccaactagctttccgccgggccgcccgaggggcgggcgccgagagaaacgtcactcccttcagcggcgacaacccagagcggggccaccttctccggccattaggcttagggagggactggcctttcaaagacgtttaatccccagataaaaatcattcctcagcatcacgccattgaaatctggctgctattatgccgagcaaaataatcggaggaaacgaggaaaacttgggaatttcccgtgctcctgaaatatctccgagcgtgttctctgagtagagcagccagggggccgtgaggccttggagcgaaccgccttgggcacctggagtccactttaatggctcagtcctagacgtttgggagcttcccataggattagcgggggcgccttcccctaattgacttggtgccccgccccctccactggaacctgaatgtccccacccctgaatcatccatccgcccaaagcaccaactatctgcctcaaactcaaagggcatggggaggtagaattctgtaggagcttcggaacctctaggcaaagaggtacttgaaagggaagaggggctgggggacaccagctcctactgcgagaaagtgaaactccgggtgcagggaagataccgcaccacacacattcatccgctggggtgaagccgatgaaacagagtttgggatcagatgagggatcatggacccctgaggtcgtttggtgggggcaggaggacagggtgcccagacatcggtgtcctatccgttaactcccacccgcagcgtctctgggccaaggcgaggaggtctggaaccttcttcctgggtgggagtggagggaggcgcaagacccggccttgcagcccacggctccctagcaccggctgcaggtacgcaggcgccggaggccaccaggagccctcgggtcccacaccccacccggcccccacccggccccctccctctgcgcctgggttctggctactcactggccggcggcggggagaagcgggggctctgcatccacggggtcctctcgggcttctcggggctctcggctttgacgagcgcatcttctggcagcttgaggagtccccccaccgagaaatggccgagcggccgcggcgaagagggcgcgtccggggctcccagcgaccccggcgggacgcccagtggctgcgccgagccacccgccgcctgcacgccctcggagggcgccagggcgctctccttggcccccggcttcctgtggtcggccatgagcgcctccacgctgaagggcaggagcgaaggggacactttgggcttggccccctcctcgtccgcgcccatggcggctgccgtggccgcggcggcgctgggggcctggcccgcgcctccccccgccggcttgccgaaggcggagtcctccactttgacaccgagtggcaaagaagtcatgtcagcagccggggccatgcagagccgggcccccccttctgccgcagcactggccagccgccgggcatgggctccgggcgggctgggagcgcggccggcctctgcgagcgcccggggccctggccgggcggaccctcccgcgcgcgcctcccgcccctccccagcaggccagctccggcgtgctgggcctggcctccggtcgctgccgccgcgcaggcagagttcccgggagcactcgccggctccgggccctaccgcggctccccagagaacttgctaataaggcgaggccagcggggcggcggccaatcagcgcgcgagggggcgggcccggagcgatccattgggccgcgctcctggggactcgcccggaggcgcgctgggcctgggggcacgcagggcagggcccaggcggcggagggcaggggaggagagggggtgcccgggaaactttcctctgcgctgaagcccaagaggccctctctgcgggagtcccctgggtctctatctttctgtgttcccgggggattttcccttgttctcgttccttctcttctgccctcctctcctcccctcccctcccctcctcagccctcttttccgctcctctttttttccccgtccttgtttctctcctctactgcttcttttacctttctctttagtctgtggctgggtttccctgtgcccccctccactgtctgaccccccctcttcttctaccacaataatttgagttgaggttatttcttacacattccttttatatatagtttttaaaatacgcatggctatttatcctaggagaaagacatactattaacttcttttcaagaaacgaaacaaaaccaaaccttcattttcttcctgttctgaaatcttgtaaactttacctcgaggtaaaagtgggcctttgtctctaacttagagctggagtaaaccttgcgggaagaagctagcttcctgtagtgccaaggatgtgagaatacgtaagattatctagaatctgcagtcggttttcatacacgatgtgtattcccccccccccaccctcgctctgaacttctgtcccaagggtcacaacacctatagcgcccgggcggggaaaggagctgccagatccttttgatatagaacttactgaaataaaaccaacagaatcgtcaatgaaacaccgatctggccttaaggtgacctcaaacaacgcgtcctcggaaacaatgacatgtccctatctctgggccgctgatcctggaggggagaggcacatttgggggagggggctgggaaaagaggaaagttcctggaggtggactctagtgtgggacttgagaactcttcttttgccaatttcggagaaaacgtgatttaatgtttgctgttaataataataataataataaagacagaaaaaatgagttggggtcaggggagatgcaagatctgcctgaagcggggtcggggcttggccattttctgcgcctgtcgctttatggcctctcctcctgcggcccaggccagcggctctcagggagtgagcggaggtgattggcggctcactcggccctgccattgatgactgcggggttctaatctccaggaaacacaaggggctgccgtggccatttaggggtaattatccgagcgcggagggacagcgaattccctcgacttttaactgggcgcaataaaagctgtagattaggggcgtccagattagggaaaatgaattagagcgggaactttattatccggaagacgtccggggtctggcggcaggggtcgggctgcggacgccggagcgattggtagcctcccatctgtccacaggccgccgagatatgctgaggcctggggaagttcgggaataccggcatctgaattttacgcacatctccaggtttctaaaggacccaagactgcaactcaggcactgggcagtggttggggcttctagctcgagttgggccggctggacgcgcggtgcaccggggcctccggaggtttgcccgagagggtacaaggatagaagaccttaagacccaattttgaagctcagctcgctgaggctgagcaaggctgtagggcaaataccttgctggtagcccagccaggacagcgaacaacagcatcttcctcttcttcctcttcttcttcttcttcctcttcctctttttcttcctcttttctcctcctcctcatcctcctcttcctcctctcctcctcatctcctcctcctcctcctccttcttc

SEQ ID NO: 317121 - DNA, 4001 bp, Homo sapiens
agtggggaggcagacagtggcaacctctggaagatggaatctcttctctctgctggtcctagaagagaaaagagacaccaataagcatcaacacactgtccgaattcctccccacccgagacccaccagtccacaggtgtttctcaaccttggggccaacctcaccttcagagatggtattcagtacaaagagggcgtcaaaacccccgccttatcttaacttgcctagtgccctctttaaaaaataaaaactatcaaaatatattactttttttataactataatctgcatcaagtggaactgaaagcagccgggctgaaattagtaactcttacagtgcatagggataatagctttccaaaacctttgcactcaactattttaaattataaagaggtcattatgtgtaacttaaaagttttgaattctacatgagttggtgtgtgtgtacaaagcaaggggctacaaccaaattttggggttgtaactgttgtttgtaatgacttccattcaatgtatgcaggtcatggagaagatggggagatggagttgtttacagcaagctgacagggaaattaatcaagttgtactatttgaaacaagttatcctcaccctgaaaagcacccctaaaacaactgaaattcaaaaaataatgatacaaacaagtaatttagagtgacggcaaataatttcctcaattctttaaaacaaatagaattctacagaatctgcttttcctaggtagtagatctagctggtagttccaaactaagtggaacattcttacccaacctactacagcttacacaactctgattcactgttattttctcacatatccttgtggaagacctagtcacaagaaattatgtccaaagcaaatcctataggaagtaatttttaaattcagacactcgagactaagatctaaatgtacacaatagggagttaactgatttaaattaaataaacagtatctaagtttccacgttaccagtcattgcttttctagggattgtgctgggcactggcggatacaaaaactcgagtgagacacaattttggacgtaaaatggcaatgaaagcgcatttctggaagccctgaaagtctgaaaacagaggctcttctggactcacaagctctgggtcaagaagatatattttcatcttgttaagacggattttgcaactaagactggtaaagcataagatagaagagtgcgtaccctgttgtatttgcatggttcttgccagcaaccaagacatgtaatgaatctaagtctcatcacctgacagaggtttagggagggagagccatacatgaaaagactgagaaatctggattgatatttggttttgtgaaaccataaataattttagagttggaaaagacttagacaacactattaacaaaggaattcagaaacgcaaacattagtaagtcatctgcacaacgcctactcctttatttacgaaacactaaaataaccaaagtaaaaacaaatgtttgaccaagccgaccacgtgtttttatactaccttttcttagtgcctcaaatgtcttcctaaatcaagtgcacctgctgcaaagatggaacattctggtgcgagagcccagagcagagcacgttttcgttccccaagctgaggcaactgcgactcgcccgcgcgaccggcaaggccacctcacagacaaggctgtcctcgacccagcccgccgccgcgcggccgcccacgagccttgggccccacgcgcgcgagcgccgcccgcgcccccgccgacctcccaccgccagcggctccgcacccggcgcccgcagccctcgtacctcacaccgctgctccgaaagccccggaacgcactcccgggctctcccggtgcccttacggagggtgctgtgcttctgcccaacgccggcgctcggccaaggcggccgcggagcagcgagaagccgcggaccggcaccgtcatggccgcggatccccggcttccggactggggctccacctcccgcgactccagtcctcgcggctggaggcctggctccgccctcacccgggctggcagggcagcaagtagcgcttcccagccaggttccggcagacacgcagagtggggtaaagagcggttcccaggaccggggacggaactgacagagtgccgggtccgcagggggcggggccaggacccaagtcccgggccctctgaggatgtggaagcgtgcagtgtggcctggcgactgggccccgcacccagccaacatatagctggcattcccatagcgacggcacagagaaggcctccaaactatcactttaggcagcacgccccactttccaccaagccagagatcctgcccaacagtctccgtgactacgtggaattggatttaaagcaggaaagaagtaataggttcattgtttcccacttcctttgtgagattccttggaagttggagaaaagaacaaaggtgtgtggagaaggagcaaaacctggctgaacaaggaaggtctggactttaggatttctatacttctactttatcatctccacttttggaaggaaatattgaccaatatctgtcttttcctgagttatgatcaagtcgatgcaggctaagaaccctgcattgtgtggtgagcttgtgtggtgaggaagcaaaatatctgctccctctgaaaaagtaaaacattagactgtccattcattttgcaaattaagacagacacacaaaaaacagtcacagataaaaccagctgggaagttaacaggaaacaacttttctcccaaggtcaggctgctgctgttgagtcagaacaacgtctttcatagctgcacttttactgagaaaacttgttttttaaaatcatagactgtcagaaaatatgctctttaaaatcatatcaataagaatgggataccctactctttcctggctgatctaaatccatttgacacaaataagcagcctagaagaaaatacaggaaaaaatctaggtgaccttgggtttggcaatgagactttagataaaacacttaaatcacaattcataaaagaaaaaaacaatttaaacttctgccatgcaaaagacactgttaataaagaaacaaatcacatactgggagaaaatattcgcaaaacatttttacaagacttacacccaaaatatacgaagaactcttgaaactcaacaattaaagaaaaaagaaaagcaactcagttaaaagtgagcaaaagatctgaaaacacccaccaaaaaaggcatacagaggtcaaaaaaaatggaaaaatattcaatatcatttatcattaaggaaatacaaattaaaacaacagtgagataccactacactcccattagaaccgctgaagtccaaaaaattgataatacgaaatgctggcaaggatgtgtggcaacaggaactctcattcattgttggtgaataaaaaaatgattcagtcactttggaagacagtttggcagattcttacaaagctaaatatcatttaaccatgcaatccagcaaccatgttcctatgtatttacccaactgattttaaaatatgtctgcaataaaccaccatatgaatgtttatagcatctttattcatattctccagaaaccaagatgttcttaaataagcggtgaaatattcatacaatgggatattattcatcagtgaaaaggagcaagctaccaagccataaaaagacgtagatgaatcttaaatacatactgataagtgaaggaaggtagtctgaaaaggctacatactgcatgatttttattatatggcattctataaaaggcaaaattatagagtcagttaaaagatcagtggttgccaaaggttaagaagatagggtggaggtttgaatagtgtgtagcacagagggtttttaggacagtgaaactattttgtatgatactgtaatgttagacacgtgacactatgcatttgtcaaaacctacagaactttacaacaggaagaggg

SEQ ID NO: 317122 - DNA, 4001 bp, Homo sapiens
acaggaatatcctcttaagagcacgtcttagcaaataaaatacaaagtgagtgtaaggagttcttaagttcttcttcagaaaacacaagaagtaaaattgttcaggcgtgatcattttttactttttattttattttatttttttgagatggagtttcactcttgttgcccaggctagagtgcaatggcacaatctctgttcactgcaacttccgcctcccgggttcaagcgattctcctgcctcaggcttccaagtagttgggattacagctgtgggccaccacatccagctaattttttgtatttttagtagagacggggtttcaccatgttggccagctggtctcgaactcctgacctcaggcgatccacccacctcggcctcccaaagtgctgggattacaggcttgagccatcgcgcccagccgtgaacactttttaaaggttctgcaggattcaaacttcccaaatgctgcaggtgttgacagcaaggaagcagggcgagctctggaggccagctctgggaattcaaccgggctcacacctacagtccctgggaacaatctgcagccccagtttctcctctgtaaggcgagttgaccacggcgccacagcacaaggctgcactaggattcaattaacccagtgctcacaacctgtttggtccagagaaagtcgtttttattgctaggaaggaaagagcctcttctcgaaggcagaattcctccagtttatatcaatcacctacgaagtgagcttattcaatttactgactcaaactcaattcatattactaagtgcttaactaactaattctcaaactacaaaccgtaaaagcactactgggggcgggtgggggaggcagggcaggggtgagcctccccaaaaggagctaagcaaaattagagcttttcttaaccacctggttaaaacgaaaatattgatcttggcagacatgttaagtgcacgtttcgttccccgccccttctcccaaaagtgcctccaaataaaaaactagtttcttcagagaaccaagcatctaatcatcactcagaggtctgaacatccagcatcctaagaacaaagtgtccacaggttcccaccagaacaaaccagttcaatgcattgctcggaggaaaaagcaagttaactcaagcacacaattacctgtagttgcatattatacgtaagtgtactctttcctgctcacgcctggctacctgcctactctaacacaacaacttccgtttttaaagtgtcaacttgtttacttggaggagccgccgcctgccggacacagcacgtttgggagcctctctttccactgtaggctcgtaactgcagactactcccgaacaacaagaccacggcggctgctccatcattttgccagcttctatgtttccatattttaacaatgttgggaaaactaaatcacatgttaagaccaagcaattgatcagttcgttgcagaggctgcttgaggaactttctgcagcctggacctgaggcttctcaatctaataaacctcagacaggacaaccagacgggggtgtccccataggaaagagaacccgactctggtggagtgtcccacctcttaggggctgtgactccgcgccttatgaaaaggcactttcaacgggcaggctggagaagagtcctctctaacaggaaaaataactccaagtccgcagtgtttaggaaaaagaaccaagtgcttggggaaggctggctgcccgcggagaggcgctgcgtccggagcgctggcccaggggaggcggcgcgggccctacctgcgttcctgagcttcttgttccgatacaccgacaggatgaccaggaggttgcccaggatgtccaccacgatggtgaagatgaggacgcaggccagggcggacgccagccacgagggccgcgcgccgtccccgcggagcacgggctgggaggcgttgggcagcgcgctgccgttgccctgcatggtccctgtgcgcgtcccggccgcggggccatcgcccgcctcgtccgcccgcccgaccacttgttaaggctccgcccggcgctccccgcgcccacgccccatcccgcgcgctcctccacgccgcgcccccggacgcccacgccgcgccggacgccacggccaggtgacacctggtgtccgccgcgagcccgcttggattccccgcccgcagctcgaaccccgcaccacgggccgacagcgccccggtgcgggaagccgggcccagccgccgcgccctggggacggtgtcccagaggcctctcctcgtgggcgcacggcgaggccgttcattgtgtttcctctctgggatgggacttttcacccagcagggccaggctgcctgggatcaaatgcgaaatgggattggggcgagttcaccagctgtgtgccccaccgcccttatcttccttatctgcaaaatgggaataagatactatctcacctgttagcctcataattagtaaaatgtgaaaaaaccaaggactgtcttccgttgtgtattgcaccgcttaagatggtgctagatgtttccgataatgaaatgacattttcaaagaaaaaagtaaaactcaatatttgcagatgataaaaatgtatgtacttctgtaagtaccagtaaaaatgagaaagaaagcacacttaggtggatcggatacatggcagcaatgtaaaagtgctaggaaatggcctaaccagttgtgtgcagtgaggaaaaaactttatgaaaaccatgaaaggaaatttaaataaacggagagacaaacagtgttcctagcttcgaagcctgaaattttcattttcctcatatactttatgccagaccaagaaaaatatcaaataacctaaagtttctttgaaagagtaaaaagaaagtgtaggaaaaggatttgaataagatgaataggagagaagtatgacctaccagtatcaaaatgttcattaaaaattacaattaagtggcgcctgggattacaggcacggtggctcacgcctgcaatcccagcactttgggaggccgaggtgggcggattacctgaggtcaggagttcaagaccagcctagccaacatggtgaaaccccgtctctactaaaaatacaaaaattagccgggcgtggtggcacaggcctataatcccagctattcgggaggctgaggcaggagaattgcttgagcccgggaggcggagattgcagtgagccgagatcgtgccactgcactccagtctggcagacagagcaagactctgtctcaaaaaaaaaaaaaaaaaaattacaataagtatgccaggcacggctgctcacacctgtaaccccagcactttggaaggctgaggcaggtggatcacctgaggtcaggagtttgaggctggcctggccaacatggtgaaacctcgtctctactaaaaacacaaaaattagccaagtattgtggtgggcgcctgtaatctcaggagcctgaggcaggagaatcgcttgaacccgggaggcagagattgtagtgagctgagatcacgccactgcgctccagcctgggccaaaaagaatgagactccgtttcaaaaaaaaaaaaaaaactaaaacagtattgagctcataaacaatttgaaaaagcatataaaataaagattttataaagtgaacagttcaaatcagtagggctgggatagatcacgaaaacaaaaatgcatttaaagaaaatgtaggtaaatatacatatcacttgaggtagagaagcactctgtaagcctggaaaaaagacagacaggaaataatcctaaccatagaaaaggtagcagctgccatggacagcgtgtgtcacttcccatctctggcatcggtatcttacaaccattgtttgcacaatgtgttaacaattccagaaggtctggcactgctgcgaccattttatggacgagaaacctctggtgctgagaggttaagcaatgtaccaaagtcacacagctggtaacaagtagaggc

SEQ ID NO: 317123 - DNA, 4001 bp, Homo sapiens
tgacctcgtgatccgcccgcctaggcctcccaaagtgctgggattacaggcgtgagccaccacgcccggcctcaaaacctatttttcttccagtattccctaaatgacccggttaatgttactgcattcctacagttgtccaagttagagaagcccttagggttattatctcctccttcttcctcattctatccacagcttttcagtcatgtgcaaaactatgacacgcttaggtctttgctttcactgttcccaatatcttaaacttcttcacttttctgacacctgtacaactcctacttactttccaagatgaaacaaaattatttaatctccaaaactatgtcctctgcctcaaggagcatttagttgcttctttcaaagtacaagcatctcaagtacatgttgtatggtatttatttactgctggctcccctattagattaaggattccttaagcacagagagcatgatttcgtcatttctgtatcaccaatactaagacaaaacgcatagaactcgatacatgtgtcaaataaataaatacataaattttacaaatcaatgaaaatattgtttcacatgatttcaccgtcttaaactttctatatgtttcaattttttgttaaattgacttttgctggtgctcttttggtgcttactttggattaataatagaatcattttaaattttgcaccaaatgactacaaagttaaatgtctatgtcaaaagaaaatttattgacttcattattagaatatgaagtggttttttttgctttaaaactttgtttaaaatatctaaggaggccaggtattaactctgaaaaaactgtataattatttataaaacagatcccataggagcaactgaacagctgtggaaagatttggcacatcactttgccagcctgaatttaatgacctacatgtgaagggctacatatccaattactaatcctccctcagctactctttgccctcatatggaggcagctgaaaaaagatgccctactaacagatcagaagtggatccagacttttttgccagtgctcagttaacaaagatcttttaggtttgagatgaggaagaaacagaagagggactcacaacagtgttatagctgatacagtgtttcaagtaaaatttaagggcttatggcaagagtgactttagttttgtaactaaagtcaaagaaatttcggctcttttagagaatctcaaattctggatttaattttctattcactgaagcctttaaacatgttcaaatatcttcaaggataatttacttcaaaattctttctatatgagaagccagtcttctattcaagatgcaaacctcattcttaccttcaaattctgcaataatcacctattagaagtagaggagaaaaaaactaaatagaaaatgacaatctacggggttgtatttcatttctctctcagttgacatgatctatatatagcaaaagattatataaggtcaagtattataaacaatgaaatgtcatctgatgttttgcaaaacagcataggaaaaatagctcaaggaatgaataaagagtaaagctatggctgttttacttcagccataaaaaagccttacagattctaaatttaaatgcattttattgtgaatctgactcactttttgaatttaattttccacttgagttatgtaaaatcatgtgatatggtaattttctgtataaattaaaaataatataggcaagagatgtttttctctcattttcaacacagaaaaattaggagcctttcttcgttgttttgcatttttaacagtgggactatcttaattccttcatccaatactcacaagaatatatgaatgaatacacgtctgcaggtacacacttaattcttgaacgggaaaaaacagacatcactgtaactacctcccactcccaaaacactaactccagaccccgccccgcataaacccctcccctttcttccattgcgggttcgaaatggccgcagttcgatgacgtaagacgcaaccgccgtagcctccactgcgtaactaccgcccctgcctctgggaattgaagtttctgtggaaggaagcgtgagccgtaaccaggccaacccagaaaggctttctttctgagatttcacttccctgtcaactcttcagctcggtaagtgtcctggcactggttggcgctcccccgcactatggtattctctggacgcaaaggggcgcgtgccatgcagccccctactagcaacaagggcttccgggggagaggggagcagtggtgtggaagtggtttcctgcggcgctcttgctgaaggaaatgacgtcgatgacaggcgccccccgcggcctacccagctgctccctggttcgccagagacagcttaatcccgtctctgaaatgcgtttgctggctgggagcctagaagggatagtgggcgaggctccgccccgtggtggggcgctttccgtcggcgtgtgttttggggttgccatcggcccgtagtatgtgaaaagtgagtttgcaaagaatcagtgggaaatctgtactctaaagggccggaaagcgtgttatggccctgccacttcgtggctagagaccgtgggctttacctctttaaagctgccttacctcatttttcctgcaaagggctgacgtcgctgaactctctgaaatgtagagagcccgaggggaagttgctgcaggtgctgtgagctgaggacagttttataaagatcgaagtgttacttgatttcactgaaatactttaaatttgggaatttttctacagatatgaagaggatggcaacacattacttgtcactttctgaaagaatttcatctgccccttccattcccaaccctctgcccaaaaggcttgacaactgaagtgaacaaagggcttttcgctcctccacgtttagtccgcatgtcttttaaaagggcattcctggccgggcgcggtgactcacgtctgtaatccccgcacttcgggagggcaaggcgggtggatcacctgaggtcaggagttcgggaccagcctgaccaacatggtgaaaccccgtctctactgaaaatacaaaattagccgggcgtggtggcgcatgccagtaatcccagctactgggggggctgaggcaggagaactacttgaacccagaaggcggaggttgcaatcagccgagattgcgccattgcactccagcctgggcaacaagagcgaaactccgtctcaaacaaacaagaaaggccgggcgcagtggctcatgcctgtaatcccagcactttgggaagccgaggcgggtggatcacgaggtcaagagatggagaccatccaggccaacgtggtgaaaccccgtctctactaaaaataacaaaaattagctgggcgtggtagcgcgcacctgtagtcccagctactcgggaggctgaggcaggagaatcgcttgaacccgggaggcagaggttgcagtgagccgagattgcgccactgcactccagcctgggcgacctagcaagactccctctcaaaaaaaaaaaaaaaaaaaaaaaaaaaaggcattcctttgctatcgctgtcaagtcattaattccaatctgcattattcccacattcgttgagatttttctgaaaaggagactgtcataaattaacgacgattatttattttatcccaatccataacttaatgcagttttaaaaaacttttttttttcttttggtgctcattgatgtaggatgtgtccttgccttacaaagtgagatagtttgtaagcccacttaataacctatgtctgcgaatgaaccccacaaatttttaaaattttatgcaggagtaaaatttcacacacacacacacacacacacacatatatatatatataatttttttttttttttggagacggagtcttactctgttgccctagttggagtgcagtgctgcgatcatggcacactgcaacctctgcctcccgggttcaagcgattcttc

SEQ ID NO: 317124 - DNA, 4001 bp, Homo sapiens
catcagagaaatgcaaatcaaaaccacaaccagataccatctcacaccagttagaatggcgatcattaaaaattcaggaaacaacaggtgctggagaggatgtggagaaatggaacacttttacactgttggtgggactgtaaactagttcaaccattatagaagacagtgtggtgattcctcaaggatctaaaactagaaataccatttgacccagccatcccactactggatatatacccaaaggattataaatcatgctgctataaagacacatgcacaggtatgcttattgtggcgctattcgcaatagcaaagacttggaaccaacccaaatgtccatcaatgatagactgaattaagaaattgtggcacatatacaccatggaatactatgcagccataaaaaaggatgagttcatgtcttttgtaggcacatggatgaagctggaaaccatcattctcagcaaactatcatgaggacaaaaaaccaaacactgcatgttcttactcataggtgggaattgaacaatgagaacacttggacacaggaaggggaatatcacacaccggggcctgtcgtggggtgggggcagaggggagggatagcattaggagatatacctaatgttactgacgagttaatgggtgcagcacaccaacatggcacatgtatacatatgtaagaaacctgcgcgttgtgcacatgtaccctagaacttaaagtataataataaaaaaataaaaaaattgaaacccataatttaaaccagacttaccctcaaagctgtgaaattggttaataagtgcatattcatctaatgttactacggttgaataagaaataacatttatgtaattccaatgaaaactacaactgattaaatcaaatgttattgcctaaagaattgtgatataaccttgatctggaaacagtttcagttttctcttttaaaacattatatacttctagaatagttgtatattcatctcccacccccccaaaaaaaacccactagtaggaatgaaaatcatatgctcttaaattcatgaaaaataccctctgacttcatctaccatgaactctttgtgtttgaagatgtttattgtttgtatctgtattcccaacacagagcacattgtcttgtgtaaggtaagcactaaacacagttttgttgaattgactctataaggcaaataaaagcctttttggccttgttacaaatgaaaaaaaagtaaatacaatacaaagaaaaaagtctattgtaaaaacatttttctcatatgttcttggtttcatggcatctaagaccttatctagggcaaagctgtttttccccctggagatcaaagatttttgtggtctttttttcttcttatttggagtttttcttagccaaaatgtaagtaaactagatataaccattacatactgaaaagtagcatacagctccccatacagtgaattattttaggactaatgtcagatagacaggaaatatcactaatgttaaaaaattatttgccagtagaagagaaaatcaagacatggtaaattaggaagaatgtggagttcactagtattagtcctatgaaatctcatgaattttttgtcatactgttaaattacattgaagattagaaaaataaaatagcattactaaccatattttaatctagaagaacatttagaaatgctgttctaccagtggatttttacagtaatcattagaaatgcaatgcttaaaaaaataaccttgattctctattcaaaagtcttaatttgtgaattcccaggtacctacctttgaaggaatccttcctccaagtctggtcaaactacttgtcagttgaattcttgttagttactgtgtctaggcattttggtagccaagaagcaacttaaaatctaaggtggcaaataagaaggatcagtaagagaacatttcttatagccttcctactagattcttttaggaataggaaatactgtaattgagtaaaggtcatgtgtggattgaggcttttataccaagaatggttggttgtttgttcagttgacagttgtcctttgtaccttgattacttcctgagaaacagtggattgtgtcttaatatgcatattttcctctggttaagtatgtgctctcaatagaagtatctgtgtcgattatttttggggtcatagtagactcacttgctaatcaatagaaatcaggctagctaaaaatatccctacgcatatgaatgaaatcacatgttaatacatttgagactataaaataattaataaaggaaattacaaaatatttatagctgaataaaagcgaaacacaaaaaaccagtatttatgggatacaaagggaaatgcaacttctagctctcaaatatttataaaaaaataagaaagactgaaaatatatgagctaaagttttagcatctcttagaacttcgcaaaagcaacaaaatacgtcaagagaaaaaagaaagcgatataagggcagaaataaatgaaatagagaaaaagtaacaacaacaaaaacagatgccttgtgaacagagccataaccctttcacatttttgtaggctcactaaaattttttgttcagtctgatgagagttgttcttgatgatattaccatcagttttttaaatatcatacttttcttatatctaatattagttaatctgagtagtttgcatttcatcttcagatttttttcttctttttttaacttttactttaggtccagggtacatgtgaaggtttgttatatagttaaactcatatcatgagggtttgttgtacagattatttcatcacctaggtactaatcattgtacccagtatttagttttttggctcctctccttcctcccacccttcaccctcaagtaggccccagtgtctgttattcctttctttgtgtccatgaattctcatcatttagctcacgcttataagtgagaatatgtggtatttggttttctctttctgcattagtttgccaaggataatggcttccagctccatccatgtttctgcaaaatacatgatctcgttcttctttatggctgcatagtattccatcatgcatatgtacagattttctttatccagtctgttattgatgggcatttaggttgattccatgtttttactattgtggacagtgcttcaatgaacattcatgtgcatttttatggtagaatgatttgtattcctctgagtatttaccaagcaatgggattgctggattgaatggtagttctgtttttagttctttgatgaatcactacatttctttacacaatggttcaactaatttacactcccaccaacagtgtataagtgttctcttttctctgcaaccttgccagcatctgttattttttgactttttagtaatagtcattctgactggcgtgagatggtatctcattgtggttttgatttgcatttctctaatgatcagtgatattgaactttttttcatatacttgttggctgcatgtatgtcatcttttgaaaactgtctgtttatgtcatctgcccacattttaatggggttgtttttttttcttgtaaatttgtttaagtttcttctagatgctggatattagacctttatctgatgcatagtttgcaaattttttctcacagtctgtaggttgtctgtttaccttgttgatggtttcttttaagtttaattagatttcattcatcaatttttggttttgttgcaattgcttttggtgtcttcatcatgaaatctttacctgtttcaatgtccagaattgtattgcctacgttgtcttccaggatttttatattttggggttttacatttaagtgtttaatccatcttgagttgatttttgtctgtggaaagagtcccatttcaatcttttgcatgtggctagccagttatccaagcattatttatcaaacagggagtcctttccccatttctttttttttgtcagctgtgtcaaaga

SEQ ID NO: 317125 - DNA, 4001 bp, Homo sapiens
gaggaatgcgttttggtaaataacttatttttattagaaagtacaggcaaaaagagaccaatggtttctgaaaattatgtatacattttcattccataggggtgatgcaaaattgcttcaggcctaaaatgcattcttttagagaggaagcaatggaggaggctcaagaattattctaactagtttgcaaaatgagcattttctattgatattaaagattggctaggaaaggcaggatcttaggaagtttagcaataagaaaaggaaataattttcttcttatttcttttctaattcaggaagctcccctctgtggggaaccatcatataaatgacctgatactacacagttttgcaaagactcctgatgttagaggaaaatgctctttgtcgctgtgctataaggctgtcacttggaacaaagaaccaggtcaaatggactcttcctccaatttcattctactgaagattttgccatttgataatcctttttcttgtaccttttttttttttttgagacagagtctcgctctgttgtccaggctggagtgaagtggcacacgcatggctcactgcagcctgcaccccccagactcaagcgatcctctcactttggccaccctagtagcttggactacagtcatgcaccaccgctcctggctattgctattattatttttattttttgtagagacacggtttcactgtgttgcccaggctggtcctgaactcctgggctcaagcaatccaccctcatcggcctcccaaaattctgggattacgggtgtgagccaccgtgtctggccgataccctttttctaagtcccaaaatgacaggaattattctttattcattgttatgtcatcatgcctagtacatagtgcagacttaatacatattttttttgaataactacttgcaaaagagaattgtattttggctataggttgtagaagggaagagtgagagaagaatgtggtcttttgtttttctcattttggttatatatgtaatgtgtacatgtcagcttatcagctttagaaaacaaaataaaggttaaatcatatagacagattacatattagggcaggtaattagtgtgcatgtcaatgtggtgggctgtgagattagacacactttacaatacaatcccatggtttataaaatgggtgttagagtcagtcagagacttgatttaagctctgcccacttactgtgtgactctgccactcactgcatgactttgagtgagttgcaatcttacatcataagaatgtcctgaggattgactggaataatatatatattacaaatcgtactgagaataatgtcttatccataataaagtctcagtggtattattatagtactagcacactaagaagaaaacaatctgacccaattgaaaaacgaaatggttacttattattcttcaggttcctaatatattgtcagatttgtttttaaatttcaagaccaaaaaacattcctaccaatcatattgtgttctaataacatatgaattgagtgttaccacactgtttggcagttcataagaagagaggagaataactgtattagaacaactattgctattacttaatatatgtatattacttgaaagctgtttagtttatattagaacctatctaaagtatccacatacctggtgcagtgtgaatctttcttcttagggtgttcaatccagttgcttgcttttagccaatcctttgaggatggtaactagaagcaaaagaagagaaagcacaagagaattttcaggttttataacactccagtcgagctttttggaaataggaaatctattagatttaagataaggtcatttgtgtcaaggaatttacttttaaagaaaagaatagttgtggtttgctgagattgacagtagttctttgtgcatcaatttcttcctgatgagcacagtgacgatcagaggttctcaatgagtaacttatgtgcttgatgagtagtggaacagtaattgaaggcgcttacggagaaacaaacaaccatggcccaggtcctcccaacaggaacagatcatccactctttcctgttgggctctcaaagtaagcagagtgattgccttctgacagttaatgtgatggaacaccatatttccttgtcaataagacaagttaataaaggacagaggatttaaaaaaaatactgtggtgccaagtactggtgcagggcagtatttaaagccaaaaaatcaacactgaatttttaaatacaagtaattaaaaacaatttttgactttttgtcttgaaaaatattcaaacatatagaaaagtgaggagggtagtagaactatatactcattccctggttttcataattcttaacattttgctatatatcttagttgttttgctgaagtatcttaaggtaaactacagaaattgtaacagctactctctatttcagcatttctctctaaaaagcctttcttttataacacaacaccatcaacctataacaatattaataattcaaacatataatctaaaattgagtttatactcaaattttggcaaaaatatttttagtcattttgttcctaccaggactcaactaagggccgtgtgttgcagtgacttgttatgtctctagtttcttttatcccagaaaattttctcccatttcccccatggtagtgatattttgatagctagactagtcattttataaatatttatttttaaaaagaaacttaataacttaaaaaagaacttaagaatcattttaatagagatcttcaaaattagatatttctactatgtaaaatcgttaatctggaatacagttttgaaggtgtgattccacttctagctagtcagtttgttcttttgcacatacagtctctgagggcttacattctttgggtttgattccttgcttctccacttagtagccatgtaatttttgacaggttagctaacttctttgagcctcagtttttctatctgctaattaggtgtgacatctactttacaaagttgtcagactgaaagtagataagttaaaagttctgacatggttcttttgaatggaacaccctcagctattatgctgccattagtggaaagttagggacagtttttgagatagcaatgagttagtaaatatgggctataatattaatttcttttcatctttttttgctagcaactagtgatatgcatttacaatatacttgttatagttaaaattgactgtagaatataatttttattgatctgaacaagcttttctaagtacatgacttcaatagaaaaattttcatatcaccttgctattacccaattagtgataagttgtaatgacctcaaaaattgatagaatttcaaaaattgtctaattatcctcagtcctaaataatgcctggagataacaaatttaattttctttaaatattggaaaaatataagaatatctggacatattatgactgaatccagtacatttcaggttttatttttcaataaatgagtaacacttatgcatttattattttaattttttaaaaattatattctcttgggatacatgtgcagaatgtgcaggtttgttacataggtatacatgtgccatggtggtttgctgcacccatcaacctgtcacctacattaggtatttctcctagtgctatccctcccccagccccccacctgccaacaggccctggtgtgtgatgtttccctccctgtgtccacgtgttctcattgtttaactcccacttgtgagtgagaacatgcagtgtttggttttctgttcctgtgttagtttgctgagaatgatggtttccagcttcatccatgtccctgcaaaggacatgaactcatccttttttatggctgcatagtattccatggtgtatattgccacattttctttatccagtctatcattgatgggcatttgggttggttccaagtctttgctattgtaaatagtgctgcaataaatatatg

SEQ ID NO: 317126 - DNA, 4001 bp, Homo sapiens
tattgatagttaaggaaaaaacttatttgggtgaatacttaccgagaagcaagcactcagtgcacagatgcacacaaacagcggcagagttttcattctttctgatgtctcctgggaaaagcagaaatgtggcgtactattagttatgatattatgggagaggaatgcgttttggtaaataacttatttttattagaaagtacaggcaaaaagagaccaatggtttctgaaaattatgtatacattttcattccataggggtgatgcaaaattgcttcaggcctaaaatgcattcttttagagaggaagcaatggaggaggctcaagaattattctaactagtttgcaaaatgagcattttctattgatattaaagattggctaggaaaggcaggatcttaggaagtttagcaataagaaaaggaaataattttcttcttatttcttttctaattcaggaagctcccctctgtggggaaccatcatataaatgacctgatactacacagttttgcaaagactcctgatgttagaggaaaatgctctttgtcgctgtgctataaggctgtcacttggaacaaagaaccaggtcaaatggactcttcctccaatttcattctactgaagattttgccatttgataatcctttttcttgtaccttttttttttttttgagacagagtctcgctctgttgtccaggctggagtgaagtggcacacgcatggctcactgcagcctgcaccccccagactcaagcgatcctctcactttggccaccctagtagcttggactacagtcatgcaccaccgctcctggctattgctattattatttttattttttgtagagacacggtttcactgtgttgcccaggctggtcctgaactcctgggctcaagcaatccaccctcatcggcctcccaaaattctgggattacgggtgtgagccaccgtgtctggccgataccctttttctaagtcccaaaatgacaggaattattctttattcattgttatgtcatcatgcctagtacatagtgcagacttaatacatattttttttgaataactacttgcaaaagagaattgtattttggctataggttgtagaagggaagagtgagagaagaatgtggtcttttgtttttctcattttggttatatatgtaatgtgtacatgtcagcttatcagctttagaaaacaaaataaaggttaaatcatatagacagattacatattagggcaggtaattagtgtgcatgtcaatgtggtgggctgtgagattagacacactttacaatacaatcccatggtttataaaatgggtgttagagtcagtcagagacttgatttaagctctgcccacttactgtgtgactctgccactcactgcatgactttgagtgagttgcaatcttacatcataagaatgtcctgaggattgactggaataatatatatattacaaatcgtactgagaataatgtcttatccataataaagtctcagtggtattattatagtactagcacactaagaagaaaacaatctgacccaattgaaaaacgaaatggttacttattattcttcaggttcctaatatattgtcagatttgtttttaaatttcaagaccaaaaaacattcctaccaatcatattgtgttctaataacatatgaattgagtgttaccacactgtttggcagttcataagaagagaggagaataactgtattagaacaactattgctattacttaatatatgtatattacttgaaagctgtttagtttatattagaacctatctaaagtatccacatacctggtgcagtgtgaatctttcttcttagggtgttcaatccagttgcttgcttttagccaatcctttgaggatggtaactagaagcaaaagaagagaaagcacaagagaattttcaggttttataacactccagtcgagctttttggaaataggaaatctattagatttaagataaggtcatttgtgtcaaggaatttacttttaaagaaaagaatagttgtggtttgctgagattgacagtagttctttgtgcatcaatttcttcctgatgagcacagtgacgatcagaggttctcaatgagtaacttatgtgcttgatgagtagtggaacagtaattgaaggcgcttacggagaaacaaacaaccatggcccaggtcctcccaacaggaacagatcatccactctttcctgttgggctctcaaagtaagcagagtgattgccttctgacagttaatgtgatggaacaccatatttccttgtcaataagacaagttaataaaggacagaggatttaaaaaaaatactgtggtgccaagtactggtgcagggcagtatttaaagccaaaaaatcaacactgaatttttaaatacaagtaattaaaaacaatttttgactttttgtcttgaaaaatattcaaacatatagaaaagtgaggagggtagtagaactatatactcattccctggttttcataattcttaacattttgctatatatcttagttgttttgctgaagtatcttaaggtaaactacagaaattgtaacagctactctctatttcagcatttctctctaaaaagcctttcttttataacacaacaccatcaacctataacaatattaataattcaaacatataatctaaaattgagtttatactcaaattttggcaaaaatatttttagtcattttgttcctaccaggactcaactaagggccgtgtgttgcagtgacttgttatgtctctagtttcttttatcccagaaaattttctcccatttcccccatggtagtgatattttgatagctagactagtcattttataaatatttatttttaaaaagaaacttaataacttaaaaaagaacttaagaatcattttaatagagatcttcaaaattagatatttctactatgtaaaatcgttaatctggaatacagttttgaaggtgtgattccacttctagctagtcagtttgttcttttgcacatacagtctctgagggcttacattctttgggtttgattccttgcttctccacttagtagccatgtaatttttgacaggttagctaacttctttgagcctcagtttttctatctgctaattaggtgtgacatctactttacaaagttgtcagactgaaagtagataagttaaaagttctgacatggttcttttgaatggaacaccctcagctattatgctgccattagtggaaagttagggacagtttttgagatagcaatgagttagtaaatatgggctataatattaatttcttttcatctttttttgctagcaactagtgatatgcatttacaatatacttgttatagttaaaattgactgtagaatataatttttattgatctgaacaagcttttctaagtacatgacttcaatagaaaaattttcatatcaccttgctattacccaattagtgataagttgtaatgacctcaaaaattgatagaatttcaaaaattgtctaattatcctcagtcctaaataatgcctggagataacaaatttaattttctttaaatattggaaaaatataagaatatctggacatattatgactgaatccagtacatttcaggttttatttttcaataaatgagtaacacttatgcatttattattttaattttttaaaaattatattctcttgggatacatgtgcagaatgtgcaggtttgttacataggtatacatgtgccatggtggtttgctgcacccatcaacctgtcacctacattaggtatttctcctagtgctatccctcccccagccccccacctgccaacaggccctggtgtgtgatgtttccctccctgtgtccacgtgttctcattgtttaactcccacttgtgagtgagaacatgcagtgtttggttttctgttcctgtgttagtttgctgagaatgatggtttccagcttca

SEQ ID NO: 317127 - DNA, 4001 bp, Homo sapiens
agagatcctctggccccctgctccgcccagctacttgtctgggctggctgaggaaacctccagggcagtgctgcccacccgaggaaggggccaagccgccagccctgggctgcctcaggccccgggggagcggggctcggcccagaggagccaggggagatgcaccagagttggggagccctctgtctccctcaccagtgcccccatggtctctgtcccagcagaatgtggacagctgggaccccatctcaggaacaggcgtcatcagagatgggtgagtggcaggcaagtaaccaaacctctccttgcctcagtttccttggccatagagataaaaatcacatcacctctctgagcctggggtgaagatgaactggctgcatgtgtgaaacgctcagcatagaggcagtgttcgggcagccttggccaggacgctggttgtcagctttggattctccatgctgggggagccccagctcacgccccagagttctccacgggtcagggacttggtttggagagaagcggcagcgggggccgggcttgctcactgaggaggcctgaggcaatggttccctcgtcacactcctgtccttccccaaactgtccccagtaggggaccaggggctgggactcagggacgggtcccagccagggcagctggagactcaaccaattcctcgcctggctcaggatgccacagaaatgggtccctacaccagcctttcggattccctagaacaggtggaccacaggaatgagccatgccctggggctctgaagccccctacaaacgcagctcccagcctgctcacacaaaagggctgggccaaggtgggcccagacaggaccaggtgtgctatggtcctcacagcagccaggagggtggaaatccccggggagccccggcccagggtccccactccccacgcgggggacctgtacgcaccccagcttcagggcttctgctgcctgaacacgaggtcaaggtatggagggcgcagctggcacccgtagtaacgacttcatggggcccctgccctgcagcctgccccctcctcccgcccccttaaaaggcctctgtcttaaaaaagaggacccccatactggtggctggagtttcgctgtgtcaggaggctgggcagaagcggtgggcaccctgggaggagtgagggcccaggacagcgcctccactcgcttctctgtctaggctcctgggggcgggggaaggtggccgagcagcagagttcggctggcagagccagtcgaaaggaggccgcccacccacccgcggagagaaggggttagggccggcagcccccgcagaccctggctgagcctgtttccccagacccacggggcaccggccagcgcccgctgacaacttttctaccgcctggaaaagtccagaacaactcgggggcggggagcgggcgcgggagcggaccccggcggcgggcgctgtacgcgtggcactgtttacgcgagcggcccgggaggcgcggccgcgggaagatggcgacggcgagggcggggccggccgggcggggctgcggccgcggcctgcgcgcctcctcctccaggctggccgccggggcgcgcggcggcggcgctgagggccgcgggccgggaatcggggcccggagagcacgctccgggcgggggcgggggttcggaccgggccgggcggggtcgggagcggggggcggtacctgttgttcggggccttgcgcaccaggccggccgcctttgttttctccctggcgaagtcgccgtcgaagggcagcaccgaggcgtagccgtgctcggcctctgcggacacacggcgcggtcagcggcccccgcccggcacggccccgccgcccgcccaccgccgcgggcgcacaatggggtgcgagcgctacctcgatccctgcgctccaggtactcggccgcctccagcaggatcagcagggagttcagctccatcctcccgcccgcgcccgtccgccccgggacggcggcggccgctgcccggcccgctccggccggctccgctcgccgcccaccccgcgcgcccggccgccgcacttccagactccgcggactccggcgctcggccgccaccctccgcctcaggccctcaaattgacacataagggagagcggcggcccgcagagccaatgggaggcggcgttcgcgccccgggggcgggcgccgggccgggctggggccaatggggacgggtcgagcgcctcgggccgggccgagaatgttgacagatgcagagctgggctgggataggccggccgcgctagtaacaatttagaagcccgagcttagcaacagcacgtggtggcccggcccccgcgctagctgactggcggccgccgtgcatgttaagtaggcgccgcgcgccgattggccagagcggcctatgtaaaacaggcactgcgagccaatggccggtggcggggcgcgcggccaatgagggcgccgcagccggacgcgttgccgagaggaagcgcagcgcgcggggaccgcccgccgtcctgggggcccgttaggacgcaggagcgtctccgctacgagagcgaagcagggcgctccggggcgtgcgccgggccgggccgggccgccgggtctgagcgcgacgaaagcagtggctgcgtggggggacgaggcctcgcgctctgcccgggggtcttgcgtggggccgtgaacgactcccctccccgccgggcgcagagtggccccgggaagggccgggacctcggagagggacgcagacgctctgatcctaagagccaggcgtctctgagggtgtcagtggggaaacaggcccagagcgggcgggctcctcagatcgcccagtggacgccggagctgagggagggcccaggtctggggaagggacacagacgtgcggccagagtcgagaggctccccggagtggggggctgcatgctctgtgtctggcctgaggggcagggacgttcctagaggcaggcgctggccacctctggccgaggacgccctaagtggggacgggagtgaacccttcatcaaatcccagctggcgggtctccctagtgacccctgaccctaaggctggcccagactggcctcggcaccccccaccctctcgcagattttttttttttttttttttgagacggctctgttgcccaggctggaatgcagtggcgtgatgtcagttcactgcaacctccgcctcccgggttcaagcgattcccctgcctcagcctcccaagtagctgggactacaggcgcgtgccaccacgcccagctaatttttgtatttttagtagagatggggtttcaccatggatggtctggatctcctgacctcgtgatccgcccgcctcggcctcccaaagttctgggattacaggtgtgagccacctcgcccgacccatctcactgatttgatttttgaggttggtggcctggatgtgccaagggccaggccccgcaggctggagagtgtggaggcataaggtggctggacccctccagaagtactcagtgggacacaggggctgctgctggcaatgaaactgaacaaaaaatgcaaaacctcagcaccaggactcctgtgaaagcttcgtgtgcatctccctgtgttttgcatgcccggcttgcagatcaggacatgggactagacgctcagggatttgctggggtctcccagaaatctcagcagaatggagattagtgctgccacacacggctcagggctataggaatgcagaggccagagcctcctggcctggctggtcctgctgggtgtaagcctgtggtgtgggcttcagaataatgtgtgttcccacagagccctgcaggacccagtggggaactcggacactgctatgagacagccctgcatggacattgagacaacccccttgatgttagcaggggcccttcctgttcccgccccacagtgacgccagggcccaaggcagagcccctcacaagaactcagcactgaggccct

SEQ ID NO: 317128 - DNA, 4001 bp, Homo sapiens
tggtcttgcctgttacagacatgggggcatcacagggcagggcttgttgcctgccctgtgccaccagcaggtgaccccagcacagggccaggcaggcagatgggaagggtggggagggagcgggaaggagacgcttggcccaggcacgtggggcagtgggtgcatctggctggctgtgtccacctcaccccaaaccgtgagccccaggactaagtgctgagggagagggaggtgacacagagcctgggaaggtgctgggatctgctgttcttaattctgggcataagcagggccgagaggaaggtgggtcacttgcgaccctcccaccccaaggagaaatcactccccagctcccagggcaggaccgaagccccctgccctcctgcctcaggtcagaggcagctgctgggaacagaatgtgccgcagggaggactgaagctggggagggcagtgtgccccaccacactcgggctgtgctgcagaggctgggcagcgtctccacgccctctgtcagctctgtggtctggccgggcagggtctccatgccctctgtcagctctgtggtcctgcctgggggcaagccgcctgcctgcctgtggcgtcctaccagagagtcagcccctccctggagcctgctgcctcaaagcccactctgagtttccaggcttgggctgtcccacccaccctgtctcaccctgggatgctctctgccagctctgatggaaccaagggcggccagggccatcaccttgcagcttcagggccgttggtgggcctctgaggcgcgggccctggctccattcgaggaggggccgcggcgtctggagctggaggacctctgtgttcgcctcctccaagggctctgaggcgttctgcctgggtacctacccagggaggcataggtgtccttcaggtcctccttgtcaatgaagccatctcggttctgatccatgagtgtgaatgcctggggaccaaggtcagggctgctgtgctgccaacccggctgggctctgccccgccccctgctcccggttcctcagcacccctgactgaggataggcttccactcctgctggccctggagccagcccacatggggtcttcccagcacaggctcctgggggtgggggctcccagtgaagcaggaaagtctcacctccttgaactcctggatctgagtctgctcaaagttggagaagacattggatgaggctctctgggcccggagggcacccccttccttcttcttggtcttcctgctggcctgcggtgggagcaccatggctgagggtcctgggctggctgacgaaaccctccagggcacccagagttttgagagacttaactcagatgaagggtggacctcagcccttcgggctggagggggccagacagctgaggagcatgccagcctcaggcctgggtagctggggttgggggcaggacggctgcaggtgtctggcttcagcacagggactgggggagggacagtggcttccagaaggcccacagagcacagtggtcagggatcgccgtccagcaggagccagcttggcctctgaaggcttgaggggcaagtggactctgggtgggcttgttctgggtaccgggattttgtgaaagccaggaaccccctcatcctgctccggactctcaccaggagagcaacgtgaggcacgtacttcccacaacacagcacagcccacacccgcaaggtcacacacacgcacatacacacgctcatgcacacacatatgcaggcagagcacacgcccacacctgcattcacacgcaagcacggacacgcccacgctcgtctgtgcgcatgtacacatgcacagcacagctcacacccacacgcctgccccaggcatgcacggcggcctgctcaccatgcctgcttctgcctgctttgatgcgtctgcccagggccccaggtcttgcccatcttaagctcctgcttggtcccccaggacagttcagactccggctgccactccctacaaggacaggcttggggctaccccaggggactggacagctgcagagtgagctttggcagcctggcagtgactcacacccttgccctgcctcaccccgcaaggcccccagcctccccagatacctctggccaggactacctcccatccacctgtccccgaaccccggggaggctttgttctcccaaggattctgtgtgtcagcagggccacctgtacacgctcttggctgggggcctgggcaccctggaactgcaggagccagaggaaggggcactttttctagatttgcacaacgctgctgtgggtgactgcagctggtcaccgggcttctgccaagcacactctgtctgtcaggggtgtccacgcccctccctgccttggtgacagaagtcagtccatagccttggccctgggaccaccccgtctgacctcatggctgggagctccttgcctggcccatgggtgatgacatttctgggttggaggagccatggagatggccacgttgctcagatgggctgggagggggactctagggccctgagcctggtcttccccactataccatggcctcaggcacagagtctggggtagggacctggcccagggtctgttggtggtgtcagacatcagaggccaccacagagtcagcatccagatgccctggttcaaggggtgggaggagggtctgcaggccaagcaggatcaaggaggaggcctacaggctgagtggagaacaagcttttggagccccccaggcctgcgtctgcgtgggacgcagtaggtaacaggacccagggcacctgcccctcggtgctgcaggggcagtggtgggagtgactatatgcagccacaacagcaggtgggatccctgggggcgccaccgtgtctgcaaggctaaaaagacaggtgccacttgcatgtctcttgagcagaggtcctaccccctgagggacacatggtcacagttggcgtcccctgagatgctgcctggtgccatccccaggtccagcggcctctatgaagcactgactcctgaggttgaggaccctggaggcatgacctgcccaggagggacctggggccgactgcaaggtgtcaggtgaccagatgtggaaccctggggctgggagcaagggccagggcatcccctgctgccagtccagtggggtctgggtgtgatcctgaaggggcactgctgggctgcaggagtggggagaaccacaccgaggggggaagcatggttgggaggccccccgaggccaccgggaatgtgagaagggctgcagagccccctgcagagggttcccaggccactggagtctgagcacagtgctaaagatagcagcaagcctgagccgggggagtatcggcttctgcacccacagctgacctgacagctgcagaggcccctgcgggcggtgtgctgagccaggtgggacccgtcccaccactaagctctcaggaaaggccttgagcaaaggcaagtctccattggcttcagggggttttccccaggccgtgtgtgtttgcccgcatgttttctctgctggtgccctgccccgccccacctctggtggaagctgctggtatgtccccctcaccccctaccttgggccccagagacacttatttttgattctggaagcaggagttgctgaggagtctggattattttaaactccagtgaagggaaaacccattgtcacctgaggccgtctgccctggcggaagcgggggcttgccgagggccaagatggttctgtgccttgtggatccagtgtgcacctgcggcttcctcagcgagcagtagacacggggagggctggagtttgcttctggccccctgaggacagggttcaggcagaggcctcaggcaggagtcttcagggactgccagccaacctcacagaagctggagaaaagatcaggtggccctacagcaagtacctaacctttttggcgcctgggacaggtttcacggaggacagtttttc

SEQ ID NO: 317129 - DNA, 4001 bp, Homo sapiens
aactttggattggtatgaattcagttctggtatctgactcagaattattctcattttattccaagctaatttgacattacagtaaaacatgagaaccaagttgaatccagtacagtggttctgtattgcagaaaatagaaaacaacaacggacctcttagttatgattacattgcgtggggagcatctaaaagtctttgattctgttcctcttgctttatggaaggtgtaatatgaaaacattatgctcaatactcttcccgggtctcaagcttctaggtctcaatattgtagtggtgaaaggctgcattccttgtcaatacaggggaaataaggaggcattctgaaaatgccactaatatatctggaatggctcaaatcagctcctaagaggacctgaatatttttcttaacatttaaaactgatgctatacgttgcttataaacaaagttgaatttcctttataagaatcaaaatgcaagttataaagcattgctttctcaagttagttgctagaatttaaagaaaaggagagagtgaaatattaccttgcacgtaatatatattaaaatttttttgagtcatatgctttgagactacaataactttatattttctcagaagttacaaataaaagtagactttgcacacaaaatatgttagtaaatcaattaacaaatatgaagggttaaataaataagcaatagaaatggagttaaataataagcaataaatatgaattccaacttaatagcttgataaaaaagatgatagaacttattttgagtgatttatataatgtaaggtaaaagaaatcaagctaaaccatgtgggatggacaataaagacaagattgtatgagacttgtccagaaaaaaaaaagaatcgagagtgatcttaacttataatgtggaaggcaagccaagcagaatgtacatcagctgtcagattgcttcatgccttttacagcagttgttcctctgaaaatagcttccaaatgagaaaggatgactacaaaaggattagttaccataggcttttctacaccccctagagctccaggtttgttatgacagaacagcaagaatctaaaggaagtaaactatggaatattaaacaacgtcaggatggagccacattcatgctgtgctatattaatgctacgaaggatttttattgataccatttccatggacttccttcatgatggctgttgcttgctgttttctctgcttcatcatagtattatgtgatagcatggtttttttgttccctgttaaaaacaaagggacattattgaggcaatgtgaagaactcatttggagtgtcttataatcactgttttgaaagacaacatctttgttctttattaaaaagttattatcgcttgctactgaaagacttcaatacgcattccttatctggtgacagagtatgttattcattgacaggcaatgtcacagtgaacagagacccagtctggacattaatacaatgatcatcaggcagtgagaaacaatgaaattgctggtctcctttcccctccctctcttttctccacagtattttagtctgtcattgtctcctcactggccttcatttgtaccagcatcacactccatcaattccagcaaactgtaagaatgaagaagacactagactaaaccagaattctttggtggtagcattttaatattggcaacagctgccctttaaagcagagaatgcccatttatgagtcacaactctgaatatccttggacaactgactaatgaaacattttaggaaacaacatactcaccttgctgttagattgtgctttttcagcggggatgaatcccagtttgtggaggaagactctggagatggactatggatggcacttgggcctgatggtttttatccttgaacctgggacagcatggtccctactctgactcaaactggggactgagcttttctgaagagactggcattcagctgacatcaactggctatatatagcaccaaatactttagctactcatatcttcctggcgaaagggaggaacagggaaagattaggctctctccattgtgtttctagtttgtgagatggttaaatgaaacgttcattggacatgcagaaagtttttagtgagcactttctgttgaacagatagtagccaaaagggattttaaacacttttaaacatctagctcttatgttacatgttaattgaggtggcaagagacacatgcatgaatcagaacagaatgatagatttttcataattaaaatgaacaatataggcagtaatatctatgtagactcaagaagaaaggaagtaatgtggggtggatcaatagagccagttcttaagctgtagtgagaactcatgctaggttgagaaaagtatgtagtatttgaatagtgaactcaggaagcattttgaaatgaaccattagaggataagccatgaagctgggtaaaagctgagactcataactgggtcatgctttttgaagggcctacagagaccagtccctgcaaagttgaccagtctttacaatgtctagggtcaaggattttcatttgcaggcctgacaagatttgaaaggtttgcctgtcaaaaggtttggcctccttgatggtccctggacacaaaaacgtgctctcatctctgggcttttccttttactgtttccccctttccttttactatttccccctttccctggttgaaatggtgtcctcaacagataatcattatgttaattttggtttccaaaatgaaaatagatactgtattccttttactatttcccccttccatactttccctctactcacatggcacagtcatgcattcaggactctgctcagataacaatccctcataaaatccttcccttatcaccttgtctaaaatatcacactgtgccactctctagtcccttactctgcttcattttctttatatttttctattagttaagataaaagtcaaatgggagtgacagaaacccccccaaaacagaactgtaaaaagatggaagatgtttctctcacaggtaagcttagtctagaagtaagtaattgagggtttgcatgactgacataattatcaagggctcagttaccctctaactttttgctccactatccctaaaatgcagaccccttgggcctaattggctgccccagctccagtcagcatgcatatatttcaaccagcaggaaaaagaaaaaaaaatgagaagggaacactgtcttcttttcagaacatgtctgatattttgttcatacttctgtttacatcccattgggcagaacttagccatatagccgtacataactcaagaaaggttgggaagtgtagcttctattctaggtggtcatgagcccaattaaaattcatacataacttactaacaaagaaataattgttgctgagtgacaactcagttttttcactaagaacatgccaacattattctatctatctatctatctatctatctatctatctatctatctatctatctatctagcaaaagtttatgttatgtacaattctaaaggttgaaatggcgtcctcaacagttttactagcacctgtaatcccagctactctgaaggctggggtgggaagattgcttgagtccaggaggtagaggttgcatctatttatgtgatatctcttttttctactaaactatgaatcctataatggcttgggctttgtatcttcagcagttggaattgtatctggcatatggtaagcactcaatattcattgaatgaatgaataaatgagtaggttggagattaactgcagaatgcattaaaggtttggcatgagtttggaattcaaatgaacagtcgcttgaatgtacaaaggtggtggctatttgtgggaggaattgtattttataagattgaaatcggttatacattttggtgcctgatcataggattgaaagtttaaggttgtaaatcacagcactttgggaggcc

SEQ ID NO: 317130 - DNA, 4001 bp, Homo sapiens
acgttgcagtgagctgagatagtgccactgcactccagccttggcgatacggccagaccttgtctcaaaaaaataaataaataagatgcaactatgtaacagtatttagatttaaaataaatactaaaaaaaaaacatgcaactagtgataatatttagcttctactgtgtacatacaagatactatgcctactttaatatactttaatgaaggaaaaaacatgcctctaccataacttaagcccactttttctatgaaatacagtacttctatctccccttcaaattaactaaagtcaacaagtacacaaactggcattcgtacgtactgcgtgctgatttcaactgctttattctttattgttttacaggttagtcttttttcattaactaaattgtagcctccttgcaaaagagcagccatttatttcctattcttcccaccatgtccaccactacagcccctcgctcctaccccccatcctagcacggcacttaaataataaaaggtcctggcagcgaaactcaaaactgtttatttctgacctttagcagtaaacaatgttagaaaggcagatggaaccacgtttatcaaaacacagaacacacgatgtttacatttcctaaagcgcgtcttttagttaaaattaaaggatgagagttaaaacgagttacaaaagacagctggtgtttgaaagaaaaacactggaagtaataaaaacggagtgaaaaggctgatgttgggattaaaagaaaacatttttttaatacagctgcaaatcagtcattgttttctgagaggctaggttcatctccaggattttcttctaggagctcaaccaatggccacctttactgagttaaccagtctccaggcaagcagcccttgctgattggctcaaagatgtcgagtagaaaaagcagccaatcctgccttcaagccagaactgtgccatggagacattacaaccactgcatggcgagaatgtgtacaaacctgtccgtgccacaaatatcagatcctagttacaaagactgccgccgaaaggaagagcctttgaagccaacactgacactgacctgtcatctacattctattactctagctctctttcggagggaaaaaaaaaactattttaaccaaaagcgcatgagagataaactgtgcccccgctaagatgactcactctattgaggatgaatttccaaacggacggcttagagagagtcccgatgagagaggggctctagaagggtcccattgagggacaaagttgcagatgggggcaggggaggcgggacgagggccaaagacacacaaatgccggggaggggaaagtctccccgcagtctccaaaatccgaacgtgtgagtggctgtgtgtctggacttgaactgagtaaataaacggctctgctaggactatgtgctcaggaaggtggcctgaagttcccagaaggctccgcctggcaaacacctaaggcgcctggaggggcgcaaggtcaggtcccggcgggaacagatctgggaggaaacctcggggggtcgagaggggtgtgtctggggcctggaggcccgccaggcactcggaggccaaggaagcggccgcggcccccgccttcgcccggcctcgggctgagcgccagggcccgcctctcgccgacgcctcacttcccttccgtccgggcagccgggcccgcgggtcagatcggaggcggcccgcgccgggccccacattcagggcttgggggttcattcgccgcgccgcccgccgctgcttcaggccctccgcttcggctcggagccccgggacccctaacctccagggccctcaccttggacccgcctccctgcctcccacccgccgcctttacctgcttctggagcgggcagagggcgtcgaagccggtgccgcgtcgtcgaacgcacaacgcggcgccgcaggtccgcagccctttcccgccggcgccactgcgctctcccgcgccgcgcaaggctagcaagcagctgcggccgcgggggagacacggcgagcgcgcccggcggggagacactgccgctctccgtccggccggggaagagcagccgcgcagaagcccgccgcgagagggcgggtgggcggccgggtggggaggggtctcgaggcgccggcaatggctgccacgtcgcccaggtggatcgccgcccaccgcccccccccaagcccgccggctgtccgccacgacctctgcttcgtccccgagctccgcctcggcgcggcggcccgggggacttgagcccgcgggcgctcccacctctcccgctcccgctctcccgttggagagcaagccctgcccggccggttcggctgcttccggtcgcccaccccccaagtctcgcccgagagcgggccgtggtccccacttttcttatcagggggtccctggaggagcaagcccttcttcgagtgtcgggttctgcttggggggaaggcgggagctgtttggcgctggggaacattgcaacaggcccggaatttttgccaaaataagcggcgcggtaaaccacagctgtttctagccctcggcactctcccgagccccaaaaaacaaaacaaacacaaggtcggcctcgcgaggtgaggggagaaaggaaagcagagctgggacgagccctgacgcgcgcggggtccaggctgcaagttgggagggacggcgaggcgagcgaccggcctcggcattgcctgactagggccgtggccgctgcggcgggcacgggaacccgccttctcgcgcgcggccctcccgcggggggcttccgggcgcgcggcctcggagccccacggggagacaaaggggtaggcgactgccacggggtggagggaggctgcccagccccatcggccctgccagcgtgcggtctgagctcggggaatgtgtgcgccttagccggtggaaccgcagccgctggcctttgcccccagttcgagcttgagttttcggatgccaagaaaaagcaaagacgtgctcttccctcttgcgaccgctgtagtatgagtccgtccccaagcctgcaccattttttttctctcaactctgctttccctggtttatttgttctgggttctgatgtgaaatgtttagtgttttcagggtacgcaaatttttcacctttgctttctggttggtggtggtggtggtgatggtagtggtggtggttttgcctgttttttacttcctccgtcccctccctttgcggttacttttcattccacttgcagtggtttttcccagaatagagaagcgaaataacctcatgacaaagtgtccctttgcatcgaagatacattgttggttgttatggcagttgctttaaacagagtgtaaatttggggcaagtgcaagtggtttttgtcgtttaggtctaactggaacacttattcacaatgagaacgttgtagtgctttttcaagaaactagtaatatataaggagagaactcaagaagataaattttctgatgaaaccatccatatagaaaaataggggaatttttccttttgtatgaattttgtatttagaggtctcgagtcccagtgttaaatcacagacttcatgttcatccttaaaaaaaaatcactatacaaaaaccccttaatgcttttattaaatttcaaaaacaaaaaattgtaataacccagaatctcaagagataaatagctgttgctgagaagctaacattaactctgcctctaaacaaccattataagagactaaaaactgtaatatatgccactttagaaatgaaagaaccctagtaattataaacttgaaagatgtcgaggaaattaatattttgtttttgaaatatgttcaccatgataataaaaactagcatttaaattattttcctttgaacatctgttaaggattcatcaaatcttaagtcagaacaataagaaataaactcttcttaacattggaaaatatatttcaagccacaaagacaacacccaagctgaat

SEQ ID NO: 317131 - DNA, 4001 bp, Homo sapiens
aagtacagtaattgttttggctctttaacttttcatgctaattttcacacattcgaaagagtaaatggcataaggaaccccctaagtacccatttcccaacccaacaattatcattgccattcttatttcattttccctctttcaatctttttcttctttttttgctggattattttaaaggaaatcctaggcatcctattatttcagctataattatttctgtatgtatctttaacagataaggactttctaaacataatacaataccatttagctcctctaataaaattattagtaattccttaatatagtccccgttcaaattttgcctgattatctcaaaaatgtcttatacatggtttgtttgaatcagtatccaaacaatgtccatagcagttgagtttaatgtatctgtaaagtttaacagaaaatgcttcatctttttttgtgtgtgtgccatttatttgttgaagaaaccaggtcatttgttttgtaaaaacctctcattctggatttggctgtttgcatcatggtatagtttaacaagtccctctattttctgtaaaatggtagtcagatctcataattttcttttggaaagaatatttcataggtagtactgtgcacttcctgttgcataaggagacacatatttgtctccacgtttagtgaagactgactacactgacttcaagtgttgtcagtctgatccatcattacaaagtgctccaacttttacctaatgctattagccattgatgactcttggctgggtccattatttcatcaagagttggaaaatgatgattttatatttctatcattattactaactggaattccataaagaaaaaaatgcctttcatcaactacgtggttaccctgaaatacaactcatgcccaaaaagcaggataaatgcttgtttcttcattgaaattaatctactttcagcatgagctggtatcctatttaacttccaatagcgtgtaatgagtctccctcaactcactctaacttctccctaaggtcaccaggtggtttttaccgtaaaatctcgcagggccagaatggggtaagacaggatggaattgggcaggccaaggcaggatgcagggatttaggagaagggggtactgggtcagggaagacagaataccttaagcatgctctaggaggtggaatccgagctttctgagctgtcctggacgttggtgctctccacagactccttaggttctttgctgtcactgccactttcttcggtagccgggttcttttgctgacaggcctcttcagaatcagaaagtgtgctgccctgggtctcctggttctccctggagcccaggaccacatacccgcccttcttcaggtccatttgtcgtctcagctcatctgccatctgcgagagatcccgcttcatagcataagcatcttccccatctgcatagtatttaggttccacctcactaatctgaaagttgagggtgttagaataaaggtgcaaggctggccggttactcttcctgacgtgcagagacacgtatttggcgttaaagttctctatcatggccctggaggcctggtccatcagcttctgggccaggccgaggcgccggtgtgaacgcttcacggccagtgaggtgatatggccatgcgggacatcatctggttcctcctccattttggccagaacatagcccacaatcttcccgtcctcatcctcagcgatgtaagaaagctggggccaggaaaggccatgatataaatagtatttcatctggtagttctcaggaaggcaaaggaggttgcagtgttgcatattcatcaggtcgtctggctgagcgttgcggatgttcataatggcagagggtagggaaccggttggactgcagtgaacccagaagaggctgtcgccgaccttaaggggcactgtttgcctcaggaatcgagtccagggggctaacaccaccgggctgaatcgtgtggagggcggatggcgggaaggcggaaggagcaggagatggaaaagatggtgccaaactgcggctttcagaagtgcgtcactgatcccagccaatgaggtttcgcttcattgtgcgtgtgcgtgcgcaggggttagggggtggggagagaggagttcattgtggtcgcctttgttttaaataacgcgatccattgcaattattatttttgtttcagttttaactttttgatttgggtacatctgaataaattttcacaaactggagaaacccatataacaggaacttagagaaaataaagaacattgtatcccagaaccccccctcctgtccccttccagtacctgcttccaacatcccaagaataacgattacctagacttccgacagactttatataaatggaatcatagtgcatgcattatttttgtgtcaggttttttcagtcactctttgtaagtttcagccacctcgtgtatagctgagggttctttatattcttccttgtttgatattctattgcctaaatatgtcacaattttttttatcaattctactgttactggccattttgtcattttcagtttgggaatagtacccctagggtagctgaacattctagacttgtctttagttggaacaaatgcatatttatctaggattagaattattgggtcattgaatataatgatgttcaacttttataaatactgccactttttcagagtggttgctccaccttctcaacagcatttgctatttccccattgtttttattttagccattcttttgtaggggtagaagtattacactgtggttgtatttgcattgcactgatgagtagtaaagttgagcactttatatgcttattagccatactgtgttctcttttgtaaatggctgctcagatttttttgctcatttttctacttgtgtgtctttttcacattaatttttgagttttatcaaaaatatattctgggtataagtcctttgtcagatatatttgtaatgaatatcattcttgtctattgattgatatttccctttcttaatggtgatttttgacaccaagcatgaattttaatatagttcaatttttccagttttaaaatttggtggttaatgctttttgtgttctgtttaataaatcgttgcatactccatggtgactgaaggcattcttttatattttcttctaagattgttagttttacattttatatttagatctgcaattgactgaaatttagttttgtgtatgctgtaaggtatcagtggacccaatattcttttcctgtgtggatgtacaattcatatagcaccatttacaccattttgtgaaaaaagattattatcctttcttcatattactgcattgttacctttgtcataaatcctaagttttatttgtagatgcatttaaaaattttaatgtcatcttagctgggtgtggttattcatgcctgtagtctcagctacttgggaggctgaggcaggaggatcacttgaggccaggagtttaaggctgtagtgaactatgattgcatgactgcaccccagcctgggtgacagaacaagaagaagaataagtaaataatcatatgccatctcgataaagcaagatttggggtatttaatagtgcaaggaagtcacattttattagcactacttgcacaaatggaattatctgtgtgtctcgtacagtctttcttcccagtttcctagcagacctcagaactcaagtaccaaaatgaattatgttgtaattagccaggtcatggataccctcttaactcatctagaatatgtgtgcagctttctttccaatgagggtacgcactcctttaatagctagagtaacctagagccatgtgatctgtgaaacatagcttgaatagccactatttttgttgtattttgacaattggcagtatctattaatatatttttaagatttaacgtaagcattttagctccctgattttttgataggctgtatacattggaaaagt

SEQ ID NO: 317132 - DNA, 4001 bp, Homo sapiens
gcccagcctagagataaattttacatctacaacttacttttatacaaatgtatatatacatatacatagggagagagaaagcatatatggcaaataaatataagtaaaggtttatgagtgttccttgttctctcaacttttcagtttcatttttttcaaaataaagaattgtgaaaaagagattaaagataaattgctattctaaacttatgttacagttctacctgcacaccaattagtctttttaagggtttaaaagtaacttttttcctaaaactattttacagctccacctacactcttagtcttaaaacaaaacaaaattccagtaagaatttcaaggtaacagttttgcgacactgcatgtgactttctaatgtttttcaaaatgaattcactaaatctgtagggcatatggacacttttgtaaaatcaaagttagttcaaatggatgattattcatttctagaaaaactgaatccccagagttgttctacttttcaaacaggtgaaataaattataactgcgggggaaaaggctaacactttcacacacacatcccaaattttaaaagtcttaaatttggcaaatacagttaattctatcataaggaaacgtttgcgtgaaagggggaacccacatactaaatgccaaacaaaaaatgtgctacaatgtgttaattatagctccaaggctacaggacatattttacaatgtaaacagtccctgcaaacatcaatgcatttatggtttaaaaaaatacaaactgcacacatttgaaccgtagggaataagtctgagctagcgtcaacaaaatccatctcaaaagttcttatattctcatttctctggtaagtttttgcatgtgttaatatacttcagtgtataagaaaagtctaggtctgcaacgtttcaactaaagactcaactttttacttcctaccgaaccgccccctcgcaatgggccccacctcccgagaagagtgacggggtggggctgtttcccgctcggaaactaagaaataaatgcctcatccctactccagaaacgagaacaacggaggcagaggagctgaagactccagtatgcaactgactacaaggaggtagtcgtttgaaaagctttctttccttctctgaactccttctttccctcctctcaggtcattgggtgaccccgggccgggcggagacaggtgaatcccaagagaggaggaagagggagggacagatgatggagggagaaccgcgtttaggcaatgaatgagcctgctgcatccgcaccacctgttccttccaagggtgccaccccgacctgccagcagggttcccacaccaaccgggccgcgactcctgccggtgtcgcccacttgcccgccaaaggccgggcctcttctcccccagatcggggagaatgagaaccggcagtctagaagccgggaggtcggggcctagtccggaaccagggcctcaagcgtggggatggaatgaagaagcctgtggtccctggcgcgcgggccatagtaggaaccacagagagggagcaaagcaatgcattcggcctgacgagagctatgaaggcggggtcccgggcgggagtggctcagtgcccgccgggccgaggttaggggtgacaggcccggttaccggctaaatcctccccaccgcttgcccggagcctcacacttaccaagatccgcttgaagagcgcattctccttgggcgggaggctcacggccggcatcgttccggctgctcccgctgctcccgccaccacccggctcggtcagtcagtttgtccgaccgccgccgctgccgttccgtagctgcttcagccttgaatatctcgatccgccgccaccaccaggcctcgggtgtcgccgcgttgccctacccggacacctcctttttcctcgttgtcttttttcctttctcacttaacgctgccgccgcctcccccactacgggtctccgtcggcggttcacgtggtaactgaacagaccgacagaggcagccaaaatggcggacgcggagggttttcccacccgggtcacgcttcctaacacgcaggcgcggtgacctcctttccccacctcctctgggtttcggagcttgccgggaaacctggaggctggcctgcctgtggaggccgggagggtcggggcaggccccgcccatcatttcagtgcgtggtaccctcgaagcgcccgcggagctacgggaggctaggcaagtacggttcagaccgcctcctcatcaaaaacagcctctctggcgccttcctgctagatcgacctttcattccttggaaagagtctcgcacactgtgtgatcatcgtttgagcccaaagtgctaaaatacaggtgtaggtgtttgagaagcgctgtagttgattatggacgaaatgcctaatttaaggagcagaggcggagtggaaaatgaaaaaagcttcaccgcagtggagacttgttaacagccctggggagaaaggggcttaacagagtctggaaatcgtgaaagagcttgaccgatgaaatgggcctggctgtcgtatcggtaatttggtgaatgttgcttaagatcagcctggaaaggtagttagtcagatccgaagtgacatatttgcactgccaaaggaggctctggaggttaaagtatgtgttttaatttcgttgttgaggccatataatgcagagttgacggaccgaccttatgagtcaccttggagcggagtagtggagacttaaagacagactaccctggagctggcttcaaactagttcttaatattgtgactcgaactccccatccccagaaattctcagatcttagaagccaaagactggcaaggatactagagggaactactcgagtaggcgaggtcagactacataccgaataggagtccttccaaaaatgtaagtcatttcattaacagctgaccgtaaaactttttcaaagtggcattccattgatctaaaaattttcaagttatatgagccacttttaacctttggtttttgattacctctttccaaatcctgatttcactctgtagcattctttgcatcatgaattattaaacaatatgtgcgtgttttttactgttttaaatttatttgcaaagatattttaattttcaaacttctcttaactgtccctgaaaggtgtgagttgagatacatgtttcccaatataaacttgggttttgtagctgctatattgattgtcctcgcccttcaccggggtcataaataaggtttttaacagtcaaatcctggagtttccttaaattctgtgatctctcttcaaaagtttgagaaaaatcatatatacaggaaactatgtttcagtttgaaatatggccagtattttaaccttaactttataaaactaagaacaagcttataattcatttttaagctgttacttagtaataacctgcaaaattcactgccccaagagatctttcaactgtctgaactattgaaagacagaaaaaatagtctaaatgcagttgatagttttagcttggatttccaaatctctggcttcatatccaaatttctggcttcatatccaaaaatccctacagcaatactatttgctatagttctctaaatttctcctgtaaagaatattctattttccttcagaggaagaaaatttctggtctttgaaacaatcagtagcttccaccagaacctgagtacctgattagatgagccagaaatagagtttggcaaatgttacattctttttgggtgatgacaaagaaatggcaattttaaaggctcggcaaatactagtctgattcaacatttaactgattcatttgctagttaaaatgcacctacagataacagtctgaccacacagtagcctgaattgaataaaaaaatatatatttactctgatcaccacaatttcacaaatagagatcccatttgagttatactgtaagtaacagccatgctttcagaaagttaacatatcca

SEQ ID NO: 317133 - DNA, 4001 bp, Homo sapiens
gtaatttttttgtattattagtagagacggggtttcaccatgttggccaggctggtcttgaactcctgacctcaggtgattcacccgcctcggcctcccaaagtgctgggattacaggcgtgagccaccgcgcccagcctggatgcacattttatcatgcccacttcccggtccaaacactggctggccctattagagcagtgttccctgtcgccccagccctggtggacacagacacttcagccacgacacacatgaaaggataaatgcagggcgacaaataagggcagagatgagccactgccagtatagagctggaaggccactgagttaactaaagggtccagatgagaggaggcttagtttcaaaaacttcctggaaaagtacgttttgagcagaatttttttttttttttttttgagacagagtctcgcactgtcgccagggctggtgtgcagtggcgcgatcgcggctcgctgcaacctccgcctcccgggttcaagtgattctcctgcctcaacctcctaagtagctgggattacaggcgcccaccaccacgcctggctaattttttgtgtttttcgtagagacggggtttcactatgttggccaggctgatctcgaactcctaacctcgtgatctgcccaccttggcctcccaaagtgctgggattacaggtgtgagccaacgcgcccggcctttgagcagaattttaaaagtacgctacctggattggggaagagaaaacccggggctacacgtagagggaaagtttagtgttgaatcggagaatctgctttccctctcgaagcctacgatgtgcagctcagatttacccagagaggcaaagaggaagcgctggaggtttctaggcaagcaggcaccgccctgtttttatcacacggaaaatatgtctcctcccgctagtctgtgtcgggggcccccgcaagccccgcgttactccgcgcgggcttggggcactcacacggaggactcgtaggccaggttgaccagaaggcagtccgccaggctgaggttcatgaagtcacacatgccgcggatctcgccggtgaagggctggggcaggaagcgctccagctccaggaccacttttccgattaacacgtgcacccacttggggactctgtccctagaaacaaaaagcacaagggcgtctgacccgctcagaggtcggcggcgtgcgactgcgtgtgcactgcgagcggggctacatccttagggcgtgaggtctcagggccactgctccccagtcagtggaccgcccaggcgcggcgtcactcaatctgcagcctcccgggagtggggggaagggggcggggggaaggcggcgggtaagaaaactccgaatggggagggcgagtgaggctggtcccaaaggggcaagcttggaaggcccgcgaggcccgcaaggaaggcgcgggttgcccctccttggtagctatgcagcccgggcgacaactcgcgcgccacgctgacccggaatggctcaaggactggcgtgccacgggtgacaccgaacttgaaagccgaacctgccgcgctggattctccccaacccggacgctgctcagggcggcagccaaaaccagttctccaagggtggcggggagtaaagcgtccccgtttaaagcactctgagcagcgcgcgtttgactccgacccgcagggccggtgtccccgcagaccccgtccagggccccagctcacccgatgacttgcgccatcgcggcgcgcaccaagtccaagtcgtagtgccgcagcacgggcagccagcgcagctcggggaccgagtccaggctcacgttgaagcgcggcgctgctgggggcgaggcggctgacagcccggccccggccagcagcagcagcagcagggacggaagccccgggcgcgcctcccggtccgcggtccgcatggctcgggctccagcggccgcaacttggagacctgcagccgctgtcggagcccgggtaagccgtggaggaggaggagctggggctgggctgcgatcgctggaggtggggcccgcgcacgacccgcccgcccctgtcaccggcaagccggagcggcgacacctcccgtccccgccgcgcatccactagcccgccccgactctccatcgggcctggaggtccctgaccgcggggccgctaagggttggggctgccggcagccggcttctcaccaactgccggttccagcgcacctgcttgggccgaaggagtgtaggctgcggccgggaggggctgtaagattttcagtagcgaaaaggtgtcaggaaagacttttcagttaaactttgtttgcttgtttgtttgtttgtttgagatgtagtctcactctattgcccaggctggagtgcggcggcgagatatccgctcactgccaactccgcctcctgggttcaagcgattctcctgcctcagcctctcaagtagctgggattacaggcgtccaccaccatacctggctaatttttgtatttttggtagggacagggtttcaccatgttggccagactagtctcgaattcctgacctaaggtgatccaccggcctcagcctcccaaagtgctgggattacaggcgtgagccaccgcgcctggctggtaaaacatttttttaaagctcaaaatttagtgaacatttatctgctaaatatttttcgcggacattatctcatttaatcatcaaaacaagccaacaggtaggttccactaatcctcgctttactgatgaggagtgtgaggcttggagaggtgaagccatgtacccgaggttactctgctggtgtgtctctgcactggcctccaagtaaggaggtctgaatccacaatccaccttcacacctaagtttcttcacctttgagttcccaatgtctgggagacaaacttaggaaaatcttagtaaggctgggacattcttaacggttagcacagttgtctgtgggtaaaacagggtacatgtgtacatgaatagtagaaactaaatgaaagggccgggcatggtggcttaggcttgtaatcccagcagtttggggggctgaggcgggtggatcacctgaggtcagaagtttgagaccagcctggccaacatggtgaaaccctgtctctactaaaaatacaaaaattagccgggcgtggtggtgtaatcccagctacttgggaggctgaacaggagaacctcttgaacctgggaggcagaggttgcagtgagccgagattgtgccaatgcactctagcctgagtgacaagagcaaaactttgtctcaaaaaaaaaaaaaaaaaaaaaaaaaaaaaaaaaaaaaaaaaaaaaaactaaatgcatagtagaaactaaacacattttttttttattttttaccaattttaggatgaagaaatacaacttttataatcaatcacttgtttttaaggataacacttaaaggaattacaaaatttcttgccagacatggtggttcacgcctgtcatcccagcacgttggctggctgatcatctgaggtcacttggtttaatgaatagaatcagaattgctggtggttgacttccaagactaggtcacaaaagacactgtgggtttctccttgctctcttgaattgctcactataggaagcccattgtcatgtcctgaggaagccctatgaaaatgtccctttgtggctggacacaaatctcagcacttggagagtcaggcaggaggactgcttgagcccaggaattggagaccagcctgggcaacagtgagaccccatctctacaaacaaataaaaataaattagccgggcatgggggcatgtatctttagtcccagctacttggtaggctgaggtaggaggattacttgagcccaggaatttgaggctgcagtgaactatgatcacgccactgtactccagcctaaatgacaaagtgagaccctgtctccaaaaaagaagtaaataaaattgaaaaaaaagaaaaaagaaagtccctttgt

SEQ ID NO: 317134 - DNA, 4001 bp, Homo sapiens
acagcaaccactgtctcagtttaaattttgtttgttggctccccacttgaagcccttttatatactatttttaagggttccatcctcactttctcttctttcgctactactttcatggataatcccatacacattaatgatttcagtcatcatccatgtgaattaacgcctaaatcttcagctatgacatctctaaactccatgtccaatctctgacggcatactggccacctttgtacgaatggcctatacacccacactcatagcaagttaaaacaagaaaaagtgcattatactaactaaacctgcttcttcagtttccatttgatttcactgctgttaactggcaaaaagttgtaccccttttgacttcttcaaatatttggtatcctctgccatcacccacagagtcagaagtagtatcctgacactaagttggcctattatgacgccatatcccttctgctttcaaaacgtatccccaaatcatctaccatttacttttctttgctagtaaaatgagctctgaaatcccacaagatgattatactgcaatcttagtactgccaagaaatccaaccttgtttacagttgttacttccccctcccagtacatttcataccctctccttctactcaaatccttcagccttcttcacttccactctccgctgatgacttccctgaaaactaaacttctcacctcctcaacacgtgtctatcttgttaacctgttcagtaccccactcaacacactcaactatttgtagacaatgttcagtgtggtttagtaacatcccacatgctggagtcctctccagcccagagatttcatatttaaaagacaggtgtgggggcaagggggaaaggctctcacaaaacgtaagaagcataagatactactaaataacactgtttggctactttcataaacacgtgttccctgcaaggattctataaattaacgtaatcatcaagagccagctttgaaacacaaaaaataatacttttcctgatccccaatgtatgtggttcaaaaaacaaagcctagatgtgatgataaaaaaaaatcagatctgacacaaaactcaactataaccacaaaagtacagcctaaactgagtagttacggaaataacctaagatcctcgggttttctaaagtctaacaaaaaatgatacgatctatacatagaacccttcaggccaccaaatttaggaaataagtcagtactaagctcagattcacaacgcgacctgctttgagaggcagcgaataaggggcagtcggagccaatacttcaacacgtgagcccggagcaccaacgacctgcccaccctccagggcccacacaagcaacctctaggctcctaggccccagccacccccgcccgtcatacaagacctctccccacagctccgggtcccttaggcacccgacctgtccgagtccgaatccgagtccgaggtctccaaggagtccggcgcccgcgcaggctctgcggctcctggggaggtgacgcagtctccgcaggccggcgattcagccggtggctgtggctgcggcgccggggtcccggccgcgacggcgttcagaacgggctgcagaggctgctccccggcaggcttaacctccacggtctgcccagcgtccggggacccctcaaacgactgtagcggcggctgtgtccctggcacaggggcagagcccggagacggagccgccggaccttccccaactccaaagtcggtgccattgaatttcagagtttccagctgagcggcggcggcctccactacctccatcgcaccgcgccagaaaccgggtcggcctcaggattggggcccctggacaagctcacggctctctccagaaatagaaaaacaacttaggcaaccgcagcaacactgcctgggcccaacttcccgcgtttctcaggtaactacacgcggaggagccaaaagacacgcccccgccatttacgcagcaacgctttccgaagagcgtgtgacgtatgtggcgcgacggcgcgacggcgctcgcgggggcaggatacatgcgtcatatcttcgaaaatcaggattagggggtcgggcgccgtggctcacgctcgtaatcccagcactttgggagaccgaggtgggcggatcacaaggtcaggagttcacagaccagcctgcccaacatggtgaaaccccatctctactaaaaatacaaaaattagctgggcatggtggcgcgtgcctgtaattcccactacttgggaggctgaggcaggagaatcgcttgaacccagcaggcggaagttggagtgagccgagaccgcgccactgcactccagcctggcgagaaagcgagactccgtctcaaaaaaaaataatcaggactagggaggccctaaatcgaccgttttcactgcgtcatgtgaaccattcaaggcctgaatgtcggattttcctattgctgcatgtgaaccaattctgcttgaagcgccaaaatgaagcagggattatacaacaggggggtgcctgaagaatgctaagttctgtacatcagaaacttgagccaggaagtcttgacaagacgctagtaacttcatgaaagttaaatgaagtttatccatcaatagatccatctgtcgatagatagggtattaaccattttttcaaaaatgtaactacaactattccattttcctttctccaaagtaccctcaaagagagcagtaatggacaaaattttgctgtgttgttcatgttatggtgatgtctatatcatacttagcactgtttcgtagtagagagatgagactatgagactgaaatgtactcacttattgttggaaaccactagtctaaattgtggagaaagcaagcagagttcttaggactgaggaagagatcagaattttctggtttcctattaggtcttcagtttgaggcatcagtccctgtgtagtaataataatcattgataccatttgttaaacatgcatatgtgccaaggactgtgctaaagattttataaattattcactgagaatttagtgtgtcatctacaacagtagatcttcatagaaatgcaaggcaagtgtaataagagtaaggttttaagaagcttacaatctacttgaagtagagaagggcaatgcacaggagataactagaaaaatatttgaaatatgaaatagaaaatccaagtgcagcagaaatgggaagtaggattggtaggctatttcatggaaatcctccaaagtgaagaaggactttaaacttgggatacgaacttactagcacaatgattaagcagagctcagagttttcaactaaaaagacctgtgttcaggcctcagctctaccattttgtgtttggtgttactgactttgggcagttaatctaaatcctaatttccttatctgtaaaatggagataaaaatactatctcatttagttcatgtgagcactaagtaaggctttatataagggagtggcatgtcatacattcagtgtgcaaaaatacttggaaaatggaacaatgcatgaactcacgaataaaatatttaattaacaatgatcttgcaaagacatgcagtacagatttgagaagggaagacgtttgagccagaattattccccagccagccactttgttgcatttttccaggaattaggtgataaaagtctgaactaggcttacagtcaatgaaatagagtaaaggacatccccagcatcaggggaagaataaaagtactctaaaatttctggtcaaggaaattagaaagaagttggtattaccaataaaaacggagaagttggccagtcgcagggcctcacgcctgtaattccagcattttgggaggctgaggtaggcagatcacctgaggccgggagtttgagaccagcctggccaacatgacgaaaacccatctcttctaaaaatacaaaaacttagctgggcatggtggtgggcacctgtaatcccagctacttgggaggctg

SEQ ID NO: 317135 - DNA, 4001 bp, Homo sapiens
ggatttgaatgcaggcagtcacagtaccgagtcttttatatatattttttgaaaatactgttttattaacaccacagtgataaacaactttaagcttatgtttctttatagatcactggctcacacataattcaaaacccacacagaagctaagagtctttacattaaatatattcttcctaaaaatccttactgtatgcatctgtcctcaagcagtaaaatttgattatgcaccattttataattaatatgtcacatttacatagcaaaataatgaaggcacagctaatacaagcaaacttaaaccctttctacttctgagctgggggtaggggcacacacttggattggttcttcaagtatatattttttccaaacattagcttcagtgaagagttctgatgattttcacagctacaccctaaaagctacatgacagaaagacgtcacaaggcgcaaagtacataacgctggatacacatgctttacataatttgctacattctacatctcttcaagtaaattaatatttctaaaacgctaggtaaagtgatttaatacttaaacatatttggggtattttttacgtgtttgtaaatagacagtactaagaaaacacaaacatgagattgtaactaatgaatacatatgttgacagtattttacaggttttacaccctccttcttggaaccatgttgtttctctaaattcaaatactcaaaacatttttcagaacttgaaatggcagttttcctggccttattaacagtagtgtcatgatctccattgcaatcttcctcaatgccatcaatctcctgtgaagtgtaaagctgatgtctgcgttacaaaagcaaagtctcaaagatgacgtttttcttgggttctgccttctctgcactgcgaaatgtcatgagtaaagaaatttaagaattaagcactgagaacgtgttcagtcatggcttgggtgttccatgtgtagcgtatgctgtgtgatgaatgggtttcaaagtgacgttctttacttcgcatctgctaacaccctttgtaaacctcaatcctcagagaagagaccatgaaaacataattttgggtttaattcagttttctttaacaccttttgatatatttattatgttcaaaatgaaagtcaaatttgaatcgagctggccaggatctaattgctttaatttaatctattttaggaatgtcagaataaattcacattgtattttggtcaaaaacctgagcctttttaagtccatcgatattctgggaaaaacaaaaccaggcttttttcttcgtgggctttctcttcatccatctctgccccccttacttcttggcgtcatcaggcatctcggcgtgggcatcgtcatgtttggcccccgcggcagcctctgccgcagcctcctcctcctcctcgtcttccccctcctcctcgtcatcctcgtactcctcttcctcctcctcctccccctccaaggtccatgcacacccctccatctcgccggtgagctcttggatcttggcgagtaggggcttatagatgtcattatactttttttccagagcctgaaattccttatcaaatttggcttctatcttatcgcatcgcttctgcagctttttgagggccaggactcggcatttcaccgaattaggcaggctctcgataaagtcatttttcggctttggggcattctctgcaggggtctggggctcctcagccatctgaccagccgcgctgtcagggtcaccagccgcgctgtcacagtctccaccctgcgcaccgccttccgccattacctcctctgccgctgcctccgccgctgccgccgcctggctaggctccgcaggcccctggttttccgagtcggccatgttagaggagaagccgcagaggtctaggagggctcccgcagaggccctgcacccgagctggtccagagagatcttgcggatgcggcaagtggcggtgacgtgcggccgcgggaatgacgttggccgcggccccgcctcctgctttcgcggcacttgactggcttcccactatcagctgacggccgtgtgctcatactgcaccagattcctcctgttgctaccctgacatcttctgggccctcaacacccgcctgttggacagacaccctgttcccagcccacccatgtacccacccctgtagagctgggctgggagtgtcagtagctgcccgaggtgcttcttcaggaactgcatagatggcctcagaccattttccgtgtgctcctcacccccatccaggcccttctacaaatgccagtgcatatgtcttcgctttcctctgcatctctctccatagctggcgtttgatcacctcttagattcctccgcattcctctccatgcagtggaggaacgggcaagctggctccattccacccctttggggacctggggtgcatgtgtgtggatagggcagcttgcatatccaagctctgtacctatgtgtccacccaacacccccttggccatcccacacacctagcggcatatatcttggtggcaaggtcgtctctcagcaggactcccctggaagcagttttggagccatttgggtaggaaatctcagagctcccggtgtcctggtgtgtgttctagaagatcctacagaatctttggcctgtgggaaggactaaagcttgaggagggctgaaaaaaagcaagtctttctaaagcatggggcccagggccaaggccccctcttatcttggttaaagcatgtgccatctatcccaccccgctcacattcgtcttccctgccttcccccaacaccgtctgcttccctgccttccccactatctgttttcacacctttccacaccacatcttctccctccctcctgcccctcccccgcactgacttatgccccaccttctgcccatcttcttccccgccttcttccccactcactgcctccttcctcaccttccccccgccgcactgtccttttccccaccttcctcaccctcttcttccccaccctccttaccctcttcttccccaccttcctcaccctcctcacccccttcttcctcacccactgccttcttcctcaccttccccccaccgaactttttcctcacgctcctcaccctcttcttcctcaccctcttcaccctcttcttcctcacgctcctcaccctcttcttcctcaccctcttcaccctcttcttcctcacgctcctcaccctcttcttcctcaccctcttcaccctcttcttcctcacgctcctcaccctcttcttcctcaccctcttcaccctcttcttcctcacgctcctcaccctcttcttcctcaccctcttcaccctcttcttccccaccccctagccccaccctcttcccacccacccccagccccgccttcttcttccccacccacccacccagccccaccctcttcctccccacccacccacgcagccccaccctcttcttccccaccctgcccaccatcttcttccccacgatctgtcttcttccccaccttcccccacggtcttcaccaccttcccccaaccgtcttctttaccctgctcaccatcttcttactggctcaccatcttctctgccttctttctcactcccatatatcatctcttttgatggctacagctgccttgagattaggaatgatgtttctcattttacagatagtaaacttagaagcaaatacagtgaaatcatcttactgcatgtatcacttaattggcagatgcaggggcagaaaacaggccttttgacccctatagtatggatgttgtgacagactttaaaaaaaaaatcccacattttggttaaattcatttgactaacttaacttgcttaaaatatttagggcatgttcatctttcaagatttttattttcctgtctcaacagatcttaaaacttagtgttaaaccagactgttttttaaaaagtctggcttattgaggtatcatttacataacagtaaaa

SEQ ID NO: 317136 - DNA, 4001 bp, Homo sapiens
ggcactgcaggcaaccccatccccgcaaggcacaccagatgggacccacagagcccagcggcccttgccccaccgcagcaggcgccagggagacgcatccacagcagggaacggtggagccactgcgtcgcagggccagctcaggtcactcagcgggaggaaccggccgtgcctcccccagccccgctgacaccggaggcctcggtcacccagaaggctcaggtcacaggggccccggctcaggcccacccacgccggccctcgcccaggcctgccctgaggtcgctggagtgcgtgcccccgagggctgtctggggcggaggtcggggagcggcgggagcgggactcaccgggcggcttcatgtagtactgctcgatgtccgccatgtccgtgtgcagcgcgcactccaggtaggcgcggatcaccttgcggctgtagtagtagcgcaggcccagcagcgcggccggcaccaggcacgtcagcagcagcgagcggctcacggcgaagcacagcgctgggggcagagggcgcgggtcagcggcgcggcgggggtccccaggccccagagacgccaccccggcgaagcccgctagggacgccgcgcccggccgcgctcctggtggaggagccggggtcatctcgggtgctttctacttctccctatttccaagcttcctgcggtgaagacagccaccccacccacccccaccgcctggaatgagcctcggcgggtctctgagcttccaaacacggcaggacaccctcgggatggccgggccgggaaggactctgcccacgctggcctactgaagccaaggtgggcagatcctggcagggagctgccccgcagaccaggccccgcgcgggggaggggggaggggggaggaggaaggggggtgtcccacgttccagcctcgggctccaggaccccctcttcccagggccccagcaagagcccttcctggccagcgtccgggagctctgagggcagggacagggcagggaggccccacaccgcttccagccgcatttcggctgccgtgaccttgggggagtcgcgtcctccctacgcggcctcaagcgcctcatctgtaaaatgggagcgaaccccctcaccccggcaggaagctctgaggggaagggcacccaaagacgctgaaggggccgccctctgcgaccgccccggctgtgccaggcgcgcgcaccccccgcggcgccggctgtcttcccctcataaattagcaccgagcgggaggcggcctcccccgcccgcagattatatttaggcactcgccggggcccagccgcggcgggcgctacctgccctggcacccgcccccacccaggatgcccgggaggggacaggggaggcggtgggggtggggggctgcgcggcggggacgcaggtgcggaccccggaccctccccggctccggcccgctcggggccctgcgcccatccccacgcccatagccagccctgcgcggggcccggcgcggcagaaagcggggggcttcccaggctggtccccgggagccgggcgcggggtccgcgtggacgccggggcgggggagctccgcgccggcccgagggactgcggcagccgggggcccggcgcactgacccgccagcagggcgtagagcagctgcgcgcgcgggtgctgccgcaggccgcggaaggccgtgttagggatgcgctccatgatgccgtcgtagaagatgcggcgcgccgcctcctgctcggccgcacggaactcgcggatgcacacgccgcgcccccccggcggccccgcgccccccgccccgccgtgaggctgagccaccggggcaggtgggggcgcggggggcgcggcggccggcccgggcgcggcgggcagcgggggccacatggcgccggcggcggcgagcagcgcgtccttcttggcccccggcagcgcctcatggtcctcggcggccacgatcttcgtctcgcagaccatgtcgggaggcccacaatgcatgcacccggccgggcggcgcggcagcggggacgcggccgggcggcggcgggcacggccgggcccagggcaagggcgcggcgccctcggacccgcggcggcggcggcggcggcggcagcggcggcggcggcggcggcagctcaggggcgcggggcggaggcggcgggcggccggggcgcgcgcagggagctgcgccgcattttggagaagtatttataatgcggcggcgccggtgcagtcgcggcgcccgcggcccgcagggtcctagcgtccactgcattggctgccgggggtcaccatgtgatcgcgggggtgggggagacgccgcccccgcctcgccgggtggctcgctgggcgcgacggggcggccgggcagcgcgaggggcccggcacgggcgggggcggcggcgcgggcgggggctcctggcccgggggcgtccggcggggctcgggacccggccgcggagcgcgtgatgggcgccgcccgccccgccccccgctcccacgccgcgcgcctgggagcgccccgaccccgggcccgaccgctggcgatcgcggcgccacgtcctcctcctcctcctccgcggccgcccggagcagtcacggcagcgtctcccgctccgtctcctgcctttgtttgaaagcagcgcccgcggtggacctggggagagggcgccgcggctgccccggcccggagcccccgggaagcctcgtccggagccgcacgggcagccggagtggggacgcggaagggcggggtctgcggcctggcgcggcgcccccctgtccgagccccgcagtgggcacggggatgcggggcccgcaggacccctcccggcccggcccccgccccccgcggccgcgcatgcgccccgtggcctcggtgcaggtgcagcgggggctctgcgccttgtaggacctgcagacgccgcaggctggggcggagaagctcaggtgcggggaggcggtcgcagaccccatcctcggcgcttctcgaacctagcccccttcagttctgcgcgacctcccagcaccaccccgagggctgccggagcagagcttccccgacatgcgcgggcgggacggggccaggggtccaggcctggggacccgcagtctgcgttgtgcggtggagttggggccagccgggcagctgaggtcacctgaaggccaggaggggctgggcctgcccgtggacgtgggagtgaggccgcagcgccctggtggggtggggaggggcggctgaactggtccacagccccgtccgccagagaacgggccctggagaggggcaggggacggggtgggggcgtgggggggaggggaagccaagctgggaaggcgccccctcagtgtctggggcccgctgtcagcttttcaacctaaaggagaaaacaggcaaaacgaatagaaatagtttgttggggccaagtttgaggactgcagcgtggaaggacagactcaggttggtctgaatgcacgcgctctcattcgcagcagttgcaagtgcgtttttaaaggaaaaatgaagacgcagctcctaaattcaccaagaatttgcattaaaatggcataagctattgattggtgtacattatttgtcacaaattccaggaacatgaagatgacgctgaggcggccaggcggacactataggaaagaaaagaaagaacaaaatgccttccagcagttgccccgggcgtgagtggggaggcgggactgaggccctgtactcaggtgtctctgggccagataatctttgagaatcccacatagctccggctatttttcttttctcatttctcgtgtttgatcaaaaattttctcttctcaaagcagtgatgatcgacattctagatgtaagtttttctgctgggaaggctcattcccgggccatctcaccccgcatggggggaaagaggacaggtgcggtgggcgcttaagaacttcgtgaggcctcaaggccaaggttgattggcacggggtctgtcaggccgtctgc

SEQ ID NO: 317137 - DNA, 4001 bp, Homo sapiens
caattcatttcctgaagagaacctataatgctaccttggtccatatgtatagcaaatatatatattttatacagtctcaaaatgaacagtctgaaagaagtctttgctaagttacatagtcctctttgtagaggcttctaaaatacagaactcatttaaaataaacaaaggagaactggtttaaagaggtcattaaaaatttaatgctggagttaaagtccactttttaatcataatgataattctaatatttcctatgaaaggtagactcattcaggttttttcaatcactagatatttcattgtcaaaaacatacaaactcccacgactcttttaaagtggcaaaattttctaaaatccctccccaaagctatcattttcatagtacctttaagagaaaagtaaacaaataatttaaaaggccaccatcttcctcttcctcatcatcttccatatctgattggtgaaatgaggtaacaaactttgctgcaaattctattaccctctccacagctggttcacgtttatagaccaccataacatatttaaggtaatgaatgaactcctcatgaaaaactgtcttatcatccatctgaaagacaaaagaaacccttcataaactgcaccgataaaaatcctttattcccaacatcaccctaagactgatgaaagcactagccataataatgcagacaaattaaaatatttatttagtaaactcttaattatccaaaccagccaaagggcaatcaatttgcatgaatttctctccaggctataatgggagtacacaagcttgacttttgacagtgaaaagattcctttgatatatttttttcaatatctttgattctcaataagcctttagtaccagtacgttacaaatacgcttcttcaacaacccaaaatcaatactggcttttatatttctcatattcaggccttcctatcaccagcagtttctttatgagataacttgcacatcctatctcatatcctcaaagccctgtgatgtttactcacaatttttcttggacctcaagataattcatcttccccaaattaattgttctattcttctcaaggttccactcaaaacaaacaaatagtatgtacataaataagaatggccaggccctaaaaataatttggtatttggtgattggattcaacgtaaccgtaggacaagggtagaatcatttgatgttcggcggggagcgatgaccccaggggcaacgaccactgaacccccgcattcaggatccactctgcggttcaatatttgatgtctgatcgcctcggtggtcgtaaatgtttctctccacgttcacgatcggactaaggaataacggtccacgccgcccagaagctgggggtgtcggctcagaaaagccaaggcggggcccgtgtgaacgacgcccaggcttcggaggctttctggcctgggcccaggcgacctcgggtaagtccctgacttctccgaacctcagatccctatgaagtgagtcgcgaaggtgaacaaggctggagtcacggtgcgccgagcccgagggccacggagggcccctgagggagggtgggccggggcgggcgagaggcggcggccggggccgggagcgcttaccgtgcggtaggtgcggctcagcgccaccaccagcttcgcctggttctggtgcggctgctgcgccagccgaaaggcctccttaatcgacagcagcctcctttccgctcccatggctctggaaccctgccgggacgagtcctgcccgcgctcggctacagcctgccagcccgccaacccagaggcagcgctctccgagtagtcttctatgacagccccagggagtatttaccgctcgaacgttcaaataattcccgcgagagggggaaatcccgcgagactgccgtaagcgctttgggagaagagagcgggaagcgatgggtccacccacctcgcaccccgcgctttgggcgcatgcgtctaggttcaaccttgtccagccgttttcacggagggaagtggcgtttctaagggggaggggccttgactcggccggaagtagcgtcggcgcgggagctgagcggagtggccttgccaccggaggggaagggctgctggcgttaggcctggctgggtcgtgcggctgagcgtgaggctagaaagaaaaagcgatcctccaagagtgagaacgggagatctgccgaggataacaacctcccttgtggccgaagggcgggggatccccacacgagggctccgcttcgagagacggcgacaaaggaaagttcgtagcgcgttccggaggcccggccacctctgagaagggagacgacgctgctgggtccgctgagcggggcgacccgaggttagtggagacggatgctgtcttttgaaggccttagtccctgccctggtgaagccgactgcgaggttccacagggcgtgcaggcagtccggggatcgttgcgaaggggggtgcgggctaacttagctgctgccgtttctagatgtgcagctgtgtaggccctgtttacaagtgtgcataaggacagtgtattaagggagaactcaagagaatggaaaggtctttcgggtagtggttaaaataaagaagagtaggaactaggtttttaaattttaaatgaaattatatcagacagaacttctgttggatctcaggatgcaccatccaaaaataggactgtaggagaccaaaatatgccaccctacaatatacttctagagtatattttgagctggtattctgataaaatgcagacacaggagtcgctctgaaaatctgtcctgttgtaaaagaaattgacatctacagaggaaatatacatcagtaaaggatctgtatcagaaagagggcagctctgcgataatttttgttacctgggagatcttatctgcataccaagacaacttttattcaccgtatatttcctcccctcacctttccacaactttgtggccaccatcccccagaaagccgcaagcccccatttcttgagtagcgtaggatgctgtataatattcaatcatctgaccatggtgggactcctctgcgtatgtaattaagtacgggttttttttcttgttaatgtctatgtcaggttaatttgtaacccagccaaagaacctaggaggatggagggaagccgtttttccctctcctacacctcagtaacctactgccagctgaagaaatagaacattactaaagccacctgtacatctttctccttttgaattacctgccctccgaagaagtaatggattttctgaatttactgttaacttttaccatgcagctttctatatcttaatgacatattttaatatattaatgacatgaataaatccctgaatgaggatattgtactattttgcatgttttaaccgttaaatgaataattatatgtgcatctggcttttttcaatcaatattgctgtggttcatattgatatgttcataatagtaacttgcacttaattaacctttattatgtgccagacaccatgctaagcactttacttcgtttactgctcacaaaccctgtaggataactttgatcttcttttaagatgaggaaactacggcacagacaggttgctatagtactccattgtattaatatgccataccttatccattctcctgcttaattcctcaaactttgtagatattcagctgctagttaagaatgtggtaacatttgtgttgcccataattttgctttgtgacgtttctaatatatatttttttatttttattttgagacagagtcttgctctgtcgcccaggctggagtgcaatggcgcgatctcggctcactgcaacctctgcctcccgggttgaagcgattctcccgcctcagtctcccaagtagctgggttacaggcatgcaccaccacacctggctaatcttttgtattcttaatagagacggggtttcgccatgttggccaggctggtctcgaactcctgacctc

SEQ ID NO: 317138 - DNA, 4001 bp, Homo sapiens
gagattccctccgtcagaaaagaaaaagggttcaggaagcgaggcagcaggaggaggggtggaggggggaaagagagggtagtgtgtttggggaaagcagcaactaaatgaaaaaataaactcttctttgtgatttagcgggatcgacagatgagaagcaaatttatcaacccaacaaagttgctaaaaagaactctgtaaataaatttaaagaaaagaaggaaaaaacataacaacaacaacaaaacccagacatacactcaggttcatttcccgctcaaggtcttggttttagggagccacccgtacccaagagcaagaaatggacagcgccccgaagggggccaggaggggaaccgcaacttggccggagggacagctcagagacagcgtagaggtgcccgcggcaaactccgaggagctgatgcggggcgggtccggggaactgccgggagctctcacgcctgggcctgggatagggtgcgggcagaaaggtgaaccgagagcgcacaatgcaacgaaaccgcactccaaattcagcagtttgcaaagtgcctccaagaaaacagctgggacctgcaatcactcgttcggactcctaggttatcggggccgcggcgactccgctcagttagaaaggtagcgcgggtgagagcgaaccccaactcacgcacagacaggacgagggcacgaagccgagtctcctggctggggccgtagggggcgtcacctcggtggccgctctgctctccggaagaaagtatgagccggtcccaggccacctcgctcagcccaaggaagtttctataacgatgctcgcctaccacgcagaggacaaatgaggagccagagcggttgggggtcgggccaaccgaactcccggccccggctgcgcagctcccagacgcccaccaagaactcgtgcgctgcctggacctctagcttttcgccctacacgcagacgccctctgcaaaaccccagtcccgcagactttccctagcggcgggcggagggcatgaacctggaaagggaggcaacagccctcttggcaggcgggcaaagtaagtgtccaggctaagtccgggataaaggctccgcggctccccagaccccactgcaccccgagctcccgggtcccaggtcttccccgcccttgcgctgtctgtccacctcctcacatctctccgggccgcccagcttcgaaagcagctaaattaaaaacaaacaaacaaacaaacaacaacaacaataaaaaaaaaaaaacgagggaaacctgctcctgcccctcatgccctcagctcctacggatagggcgcccttgagaagcttcttgggccttgaagatttgggggcgcgtgcctcgagcccccatctcggatgacccttcgggcgtgaacgctccttgtgctaggtctcagggtggcgggctaaggcgtcgggtctctggggcattgctttcctctccccacttaccttaaaaagatctgtttttcgtagggaaaatagaaaaaaatccctccccgtggtgtggtgtgcgaaatagtccacgtccccggaccctgccaagatgctaagcaccaatatccaggaacgagaagcctggagggcggggacggaggcagataaaagagaaaaattcaatccgctgaagtgtcccaactttgcggtcggcacagcaaacttcaaaggcgggcgagggcgggcggcgcgcggtcgccgaagttgctgcgaagtggagtagggagccgcgcggggctggggaatcccggggcagcgccgagaagcggcgggaggtccttttaaactgcagggagcgtgcgggggctgggcggcgggaggatgccgcagcgacccgcggggctggcgcgggcttcgccggccgccgctagtcgcacaggcgcctggctggagcgccgcgcggggtgctgggagagccgggcgcacggggcggcagcggccgtggcgggtgcgctgctcagttagctccactctctcgcggctggaagtggggagtgtgtgttcgctcccgagtgtcactgctgaagcccggagtctcttcccctcccagccctaacccctcccgcctcaccgctgcccgcccgccccctccctcctctgcccgttgcctccccctccgtccctccttctctccctcccgctgcgcgccagcgcgcacgcacacacacacacacacacacacactcatacacatacacacactcacacacagacaccctctccctccttttctctctccctgtagccctccctccctctctttctctcacacacacaccaccctgctcagcgacccagcgctccccaaacaggaccctcgcgggcggcatcgcgagggacacgctgctgtcctaaccttagcgccactcggggagaatgaaggaggcccaccgagcccccgacaaagctgcaaaacccaggagacgcgcacgcgggaccatcacactgtcaagcagaccggggtgcacaatagagggaaactctggggttgatctgggggcagggagggggacgtgttaaatccagaaggttggtggttggaggcggaaagcagagtgtgcaaactgtgcattcatgtcccacttttcacccgaacgcctgcctatcacagccttcactcagggagcgcttccccctcggcgcagaccgagcctcctccgatttgaaactcagcagctgttttaacaattgaaaaagcggccctacaggaccagtgaaacggagcagagtgtgtgaagccattaaggctgactaggtaattatgataaaaagttacctaattagcaacctggcctgggcttaggaaaaccaagaaaaaaaaagtaccgaatgatttggtgatctcatttttgcaactgagaacctgatttccagcaaacctggttttatataagttctaataatatataattatttattaagatatagtgtcagtattgaaaacactagttctgttattgccacaatgaaattaaggtaggtaggatgaaaatcagccttatcccggtcatattaagaactatgatcttttttgctaaacagttggtcacagagggtggaccaatgcagctcctaaagttttgtggttcctagatgaaaacactgcaggaaatggatttataaaaccgtttacacgacataaaatagttttgtaaaatttttaaacactgaaaaggacatttcagatcactgtgcaagcatattttttgcagatgagacaatgaggtgagaaaagtcctcattgtatctccacttaggagatacgatctagagcagatccctgggtcattcattaacaaagcttacgaagtccctgctgtgtaccaggtatgtcttatgtgctgagatttagaggtgatggtgctgcctttaaggaactcaccgcctggtgaggagacagaggcataaatgaaaatgtgattagcactataataagtgcaggtacctggtcctgtggaagcatggaaaaggaaacagctaactccccttcagaagcttctcttggtagagatttcagtgtagagttctgaaagacaaggaagaaatacaaggccaacaaggatgtggtggaggggggagggcattccacaaacagaagcaagtgaagaggttaggaaagtgtcaaagtacatggtgtgtcctggaaactaggagactaggtgcggctagactgcaggtgaagtaagcaaggccaagccacacaaggctctctgggtgtaaggagccagaacttgcctggaggtggtgagtagttgggaaactgttaaaggtgttaagctaggacagattctaaggtttgtaagtattattagataatgtgttttagaaggtttcctctggtttcactgtgcaagacaaatagaagagagatcacagtgaggttatttccagaggaaaaattaggtctgaaccaaggcagcagaaatgctgtttgggaggttaggacagctctagagatatttaggaaatagaatagacaagg

SEQ ID NO: 317139 - DNA, 4001 bp, Homo sapiens
aaatcacaaagtatttacatatagtttaaaaaaatatattttgcatcttaacaaatgcacttttaaggctctaatcaccaaaaagcagctgaaactcaatcaggtttcaaggaagtcatataatcagagtcccaagattaaaagaaaaaaaattgtaatttctttacagttttaaaattttgaaatgacaggtagacaattacatatttacattttagcttataataacttctttagcagaatatatggtttagaaaaagaatctccaatgcctgattatctcttctactatatattttttaacaaacttttcagttacaccaaaaattaatatttgcctcaatgttcagaaataatgcttttctcaagaaaattaatttaaaaagagggtatatataactccaccaaactaaactataacaaatatctccagaaagagataaaagttttattttatctaaaacattttagtaatgtaagaattcttcattttaaagactatgaagaaaattaactcatgtgacaagctcaaaattaacattatttacacaaagaaacaaatcttctgttttaccatcaagatgataaagaaaaatgataacaaaattagaaatggtagatactgtgttaaccagagaaagaaaaaaaagagcttatcttaggcaagcctctttatatgttcagtactattttaaaaaggagcctccttcaaacttatatttgaaatctccatcttaaatataatattgataggaaggtatggatgaagaaaaagggaaaaaaattcccttcagctgaatatcggatattctagagtttctctgccatatcatcctgctctctggtggtgaacagcattgctcagtagttgataacatgaaattttctaagggcaaaaaaaaaaaacaaaaaaaaagtgtgtgtcccagatcagttgcacacatctcaatatttgatttgtattttaatttaatacaaatgtattaagaatgtagctgtttgcattgtctagaagggttttcttctaaactcttccagattacatgttgctatatttcaatatgtttataaagaatatagatactaatacattttcgacattaaataactctgatgcttaaacagtatccagctattagaaaaactatttgaaaaaggatctgagtaaaccccttaaagatgtaactttgcttttacctgcccccacaaaatggatatattaaatagaagatatatctgttttctttaaatttaaagtttctgtatttgatacctagattgattctttccatttccatttaattttattaattgtatagttttaaataatgtctataaactgcatcaaatagaaagccttttgaggatcattactgtgtagataggcaggtagtttaaagtctctgatattccttacaaaattctgtcaaggcaacagacatgtgttctgttaaacagatctacttcagaatcattataagttggtgaatatcttaaacaattacaagaggtcatttctttagtaccataatcttatgaaagggaagctttaaaatcatccctgaatgagacggtcctttgtttcacttaatttaatcaaaatactctatatttcttcttcaagaataaaatgaagcacttgttcaatcttgaaatttttagattatttgaaagcaaagttgttatctcttaaaagcccctacatttatgagtgaggcattaatgcacagtataaataaataaatacacttacctggaattaaagttcagagctgaaaatgcttgagaaagttgcaatagatggaaaagaaacggaaacagtaccactcgttaccatcggctcaggctttttgactttacaagtggtagcaacaccagtcctggcccagtactctcatgttatgtaacatcttattaatattagccatcaaactgctaccaagctggtgaggcactagagggcaagagtgtcacatgcaagacccgtcgccaagggaccggctttggtaccacttcgggggaagacagatgctaactaagctgatgaataacaggatgcccgaatacaacagcaaacttgtaacgttcctcaaagaatattttacatgtcaattttctgactagcggaagagttaacaggttaataaatatgagcaagcaaataaccacaccatgaaaaacttttaggattatatttacaaacccacagtcactcaagaggctgtttgtttttttctttccattgtctaaataaacttatttaaaacaggagaaaaaagctggttaaataaaacgagtgtcggtttcaggactccctcattccaagccgcgagaaacttgtctggtcgagatgccgcctctggagtccgcattccaaggcgcccggatcgggtttctgggcgaggagaccggccccgtcctccatggagattacctggggctgcagccgtccgcgggctcctccttccctcgggtcttcggcctcagccgctccccagggcccctcgtccgggtggcgcttgggtgctacgcggtgcccggggtccggcgggggcgacaagcgggcgacctctcccctccgcgcccgggatctgcgcggacacagctggtggcgacttcggccgctcaggctgcggctgcggggcgagcgcagcgggtgcgccggggactcctgcgctggagaaccacggccctgggacccgcccggccgcgcctccgccgccctcgccaccgcctcccgggcgggagccgccgcctcccagctcccggcccgcgcgcgcccgccccggggaaggggagggagcgggagctgaggacgggagccgcctccatcgaccgggctcccgcccggaccggccctgaggatctggctgcccgggcctcgacaaggagaccccgggggttccgccccggcctgccagttccgaccgcccctcccggcgggttggcggcggccgccaaggatgaaacgtcttgtgcggccagggaaaggggtgcgagtccccgaggcgacgctggaagggtggggcgcacccgcgcggtcccttcctgtggtgctcctgccgttggcactggaccagggcggctgcgaggctgcaagagtttcctctgttcgccagtttttttcaaatgccatgtgtttcagctcctgaagacaagtggaaggccagcaactgaagagatattttggattcaaggtgtgaggttaccctctccagaactatagtttgattagaagtgtgaatcgaatgatatatatttttaaaaatttcatttggttccactaacatgtgaattgtattaagtggggtctactaatgatactttgtattggccatttgtggttttgcttcccagcactcactcttgttgaaacagtactcctgttcattttggaagatccaaccacttgatctcaccccgcagcccatttgctttaggtgatgtcagccgctgctgactcactggtagacccacagctcaggtctggccagtgatggctttctgtcctggtagcatgggtaggtatgtaacccaggtctggccaatcagagagaaaaacagaaaaaaaccaccattctgggacttttttttttccttcctctcttaagaaagtggactctcttctactggactttgcataatgaagatgtgagcttagagcttgaagtctgaaaataaagctgatactcaggaaggcagaactgagagttggagaaaagtgaaacccagatggagattttcgagcttggaatcgagctgtagctgaaataagttctatctctggatattttcattcataaacaaatacattcacttttttttttgattcggagtcgcgctctgtcgcccaggctggagtgcagtggcgtgatctcagctcactgcaagctacgtctcccgggttcccaccattctcctgcctcagcctcccgagtagctgggactataggagcccgccaccaggcccggataattttttgtattttggtagagacggg

SEQ ID NO: 317140 - DNA, 4001 bp, Homo sapiens
ttgatcatcataatgtattgtcatacgatttcttatttttaaaaatgtcaacaatagtaggcttaacttcccatttatatattgagataaatgtaaatggcaattatattttgcttattaattagttttttatgaattccagttgaaaacttagactgttgtagtcagtggactttatattctttacataaacttgctactcacacacacacacacacgcacacactcatgcacacaaatgaccagcacagaacctatgtgacactgggatatagctaactggcatacttttaatagagtagaataaattactcttttgatatgaaaaaaaaaaaaaaacctttacatcgttgtgggaaaattcattgcttcctagttttggggaaattcaaccaattacaataactttcatctttatcaatttcctcttggggcagaaacctcacaggattttaaccatgttgttggtgagaaagtggaaaactaaaatcattctgagagttacagaaacacatcagtatcttggtatgcaatttatgttaaagcatttatgaaactgtgcaaatgaaaaatattctgataaaaggcaccacgaaaacaagcaaaggtgagtttgaaagagacatgataaaacataaacttaaaactttctaaagctgtatgagaactcacagtataacttatcataataaacaaaacatataatcacttaaaaaaactatgacaggaattctgtagaatatagtattttattaatcaggacaaattctaagaaaaataaggtttaattttccttatttagctttctcaaaaagaatattgaaaagaatgagtaaaaccatattccaataacatttcttgttttccaacttattctgtgcttgaggaaattggaggtataccataaagctttctgtcctcctaggaaactatgcttagggcatatgacatatattgttctaagaatttatttttcttttctaataggaggtaggaggaaagcacctatttctttataagcaatttatgactgtaacatacaatttcacatgtctgtgacagctgtttctctaaagcagaccattagtacagagcatgcctataaatctcaggtccaaaaaacaggagttcccatcttcggtaatttgaatgccatgttttcagtaacacttattagggaaacatttataaccctacagttaactttggatgttgagtttgtaaaattggtgcttttaatatgaaaaggctaaagttgttatcaaataagatatttcctatgcaaatgttccggcaactgtttaaattttatcaagttgtatctctttttttttatgtacgactgtattttctacttacgtgcaaatataacttctataaagcatgatgacaggtaagcacacacatgcggaaaagggagattgaatttggttttaagatattatctgcttctacataaatctttcacaaataaaactttattgtgtccgacttgtttacatagctaagcaacgcatattcatttatgatacacacctcgatttcagcaaattaagcagtaacttacctagagaagcatttcaatattttgtctttttctaacttgaatttatcccgtgttagaacatgagatatccagtattcaggttcacttggctccaggttaattagaaggagctttcagttcatgcaatctgcctcaacaatattccaagagcactctctagctccagtcttagtgtctgaactcttccagcagagtccttttatttatacacacattgtccttttcaaaacaagcagccagctggaatgattcaaacctctgttcagcacaccgttaaaatgcagcttccttcttggacacgagaattacaccagggagcagaccgagtacagcaaaaaggctatgagaactatttaatcaccggaataccagctgctcctgctctgctgttgctagtgctgctgtgcctcttgtttagctgtagtcggtctttccctccctccctctctctcacatctccagaactataaaggcagctttgccggattatgattggcagaaacagccaattccttcagctaatcatcctcaagactttcaaggacctggagctgttgtgatgtcatccagtcagtgggatgttacacatgaatacattccaacagaagctaattcagcgatgggctgcattccgctcacaccgcggtgattgattagatgctccttgaagatttgcataatctttcattgtacagttcgactatttcctatgaaatttgaggatagaattccactttgcagctatgacactgttccacgagattctattggacaaaataagaaaagttcaaagcaggattttctgctgtaaatgtgtgccagttaaacacaaaaattacaaactcaacaaaagccaacaatgagcaataggaaactcggacaagtattagtaagctacatagtcctgaagttaataacagcattttagaccatgataaatgttagaagaaaagaaagagtatgtgcgtgtgaatttattgtgtgcattgttttagtaattaaggtaaactactggattattatggaaaagttcttttctatgtctcttttcttctttttaacgtggcaatataagttgaaaattacctgctctttgttttctattaattcgtgtaaacacataaagatattatcaagtacttttatatacattatgtaaagttctttaaacttattcattaggatatatgtaaaagtaaaagtaaagtgctttcaggtacttctcctcattccagactacatgattccctgggcttttcttgctttagtacatcccttagtttctaccatttaatttagtggaataagataggctaatgagaatttggttcaacacccctaataggttgcagaacagaactacaagcttttctcaactccaagtcctcctcaggtatatgggtgtctttggttgtacgtagtagttccacttgaaatactggtgtggtttcaatgaaatcctctataagactggaaggtaggggtaggagggagtccttcaaaactcagcatttattgatgatgtggtctttcagaagaataattttaatgcatccaggattactagtattattatactgcacaaggttttgagggttagcaagccatagacatatgccatacagagaatagggaaaaaaaatctagcaagttagaaaaaatatttaccagttattcataagcaataaataaaacctagtaactcataggtcatgtatcagttagtttttcaggtgcacaggctaaaatatattaaagaaaaaatttatattttaaaaataattaaagcgttcaggtacttcttactaccttttaaaacatttggaatgcaaagatgcattgaagtcaagtcagaattttcagagtgatacacatcaaaattcaaaatggataaataaactgcagttaaatatttcaaagatgtcataataaaataattattactagagtagcatcatgggaaacactaacagttgataaataacataaaatagcataaattgtaaaagccaattgaagatttttctgttgtatgtagtttggcttactaataatgccttcttctttattcaagttgggtaattatttttaagtcttaactttagaaaaataatttaaatgaaaaactattataaatgctcaacatctttatattattgacatagttctatttcacaactcaagaatgccactttatcagagtattttcatttattggaactaaatggcaacacagtgatctgaagataaaacccatcacattaaaacatggagcagggtttatatcctcggctctagtgataaactagagctgatatccattgatgattacaagtgaaaaatgttgatcaacttcttctctagcattaaactataaacaatgttttaagctgaagaggtaactactttcacagtgtaaaaatgctatataaaa

SEQ ID NO: 317141 - DNA, 4001 bp, Homo sapiens
gcccgcctcagcctcccaaagtgctgggattacaggtgtgagccaccaagcccagccttttttttttttttaaataagatccaagtacttaataagatgtaacagtctcaatagagaacatcttacatatatggagaaatttcactcaacatatcccttttgtagaattaaagtttgcaaggtaaatgattttatttctttctttttggttaatattttttagagttagcatttggaacatagtgacatgcaagcacatggggtaagatgaattaactatcatcagcagcagcagcggcagcatatagccttggatatgttaactttctgaaagcatggctgttacttacagtataactcaaatgggatctctatttgtgaaattgtggtgatcagagtaaatatatatttttttattcaattcaggctactgtgtggtcagactgttatctgtaggtgcattttaactagcaaatgaatcagttaaatgttgaatcagactagtatttgccgagcctttaaaattgccatttctttgtcatcacccaaaaagaatgtaacatttgccaaactctatttctggctcatctaatcaggtactcaggttctggtggaagctactgattgtttcaaagaccagaaattttcttcctctgaaggaaaatagaatattctttacaggagaaatttagagaactatagcaaatagtattgctgtagggatttttggatatgaagccagaaatttggatatgaagccagagatttggaaatccaagctaaaactatcaactgcatttagactattttttctgtctttcaatagttcagacagttgaaagatctcttggggcagtgaattttgcaggttattactaagtaacagcttaaaaatgaattataagcttgttcttagttttataaagttaaggttaaaatactggccatatttcaaactgaaacatagtttcctgtatatatgatttttctcaaacttttgaagagagatcacagaatttaaggaaactccaggatttgactgttaaaaaccttatttatgaccccggtgaagggcgaggacaatcaatatagcagctacaaaacccaagtttatattgggaaacatgtatctcaactcacacctttcagggacagttaagagaagtttgaaaattaaaatatctttgcaaataaatttaaaacagtaaaaaacacgcacatattgtttaataattcatgatgcaaagaatgctacagagtgaaatcaggatttggaaagaggtaatcaaaaaccaaaggttaaaagtggctcatataacttgaaaatttttagatcaatggaatgccactttgaaaaagttttacggtcagctgttaatgaaatgacttacatttttggaaggactcctattcggtatgtagtctgacctcgcctactcgagtagttccctctagtatccttgccagtctttggcttctaagatctgagaatttctggggatggggagttcgagtcacaatattaagaactagtttgaagccagctccagggtagtctgtctttaagtctccactactccgctccaaggtgactcataaggtcggtccgtcaactctgcattatatggcctcaacaacgaaattaaaacacatactttaacctccagagcctcctttggcagtgcaaatatgtcacttcggatctgactaactacctttccaggctgatcttaagcaacattcaccaaattaccgatacgacagccaggcccatttcatcggtcaagctctttcacgatttccagactctgttaagcccctttctccccagggctgttaacaagtctccactgcggtgaagcttttttcattttccactccgcctctgctccttaaattaggcatttcgtccataatcaactacagcgcttctcaaacacctacacctgtattttagcactttgggctcaaacgatgatcacacagtgtgcgagactctttccaaggaatgaaaggtcgatctagcaggaaggcgccagagaggctgtttttgatgaggaggcggtctgaaccgtacttgcctagcctcccgtagctccgcgggcgcttcgagggtaccacgcactgaaatgatgggcggggcctgccccgaccctcccggcctccacaggcaggccagcctccaggtttcccggcaagctccgaaacccagaggaggtggggaaaggaggtcaccgcgcctgcgtgttaggaagcgtgacccgggtgggaaaaccctccgcgtccgccattttggctgcctctgtcggtctgttcagttaccacgtgaaccgccgacggagacccgtagtgggggaggcggcggcagcgttaagtgagaaaggaaaaaagacaacgaggaaaaaggaggtgtccgggtagggcaacgcggcgacacccgaggcctggtggtggcggcggatcgagatattcaaggctgaagcagctacggaacggcagcggcggcggtcggacaaactgactgaccgagccgggtggtggcgggagcagcgggagcagccggaacgatgccggccgtgagcctcccgcccaaggagaatgcgctcttcaagcggatcttggtaagtgtgaggctccgggcaagcggtggggaggatttagccggtaaccgggcctgtcacccctaacctcggcccggcgggcactgagccactcccgcccgggaccccgccttcatagctctcgtcaggccgaatgcattgctttgctccctctctgtggttcctactatggcccgcgcgccagggaccacaggcttcttcattccatccccacgcttgaggccctggttccggactaggccccgacctcccggcttctagactgccggttctcattctccccgatctgggggagaagaggcccggcctttggcgggcaagtgggcgacaccggcaggagtcgcggcccggttggtgtgggaaccctgctggcaggtcggggtggcacccttggaaggaacaggtggtgcggatgcagcaggctcattcattgcctaaacgcggttctccctccatcatctgtccctccctcttcctcctctcttgggattcacctgtctccgcccggcccggggtcacccaatgacctgagaggagggaaagaaggagttcagagaaggaaagaaagcttttcaaacgactacctccttgtagtcagttgcatactggagtcttcagctcctctgcctccgttgttctcgtttctggagtagggatgaggcatttatttcttagtttccgagcgggaaacagccccaccccgtcactcttctcgggaggtggggcccattgcgagggggcggttcggtaggaagtaaaaagttgagtctttagttgaaacgttgcagacctagacttttcttatacactgaagtatattaacacatgcaaaaacttaccagagaaatgagaatataagaacttttgagatggattttgttgacgctagctcagacttattccctacggttcaaatgtgtgcagtttgtatttttttaaaccataaatgcattgatgtttgcagggactgtttacattgtaaaatatgtcctgtagccttggagctataattaacacattgtagcacattttttgtttggcatttagtatgtgggttccccctttcacgcaaacgtttccttatgatagaattaactgtatttgccaaatttaagacttttaaaatttgggatgtgtgtgtgaaagtgttagccttttcccccgcagttataatttatttcacctgtttgaaaagtagaacaactctggggattcagtttttctagaaatgaataatcatccatttgaactaactttgattttacaaaagtgtccatatgccctacagatttagtgaattcattttgaaaaacattagaaagtcacatgcagtgtcgcaaaactgttaccttgaaattcttactggaattttgttttgtt

SEQ ID NO: 317142 - DNA, 4001 bp, Homo sapiens
aatgccactttgaaaaagttttacggtcagctgttaatgaaatgacttacatttttggaaggactcctattcggtatgtagtctgacctcgcctactcgagtagttccctctagtatccttgccagtctttggcttctaagatctgagaatttctggggatggggagttcgagtcacaatattaagaactagtttgaagccagctccagggtagtctgtctttaagtctccactactccgctccaaggtgactcataaggtcggtccgtcaactctgcattatatggcctcaacaacgaaattaaaacacatactttaacctccagagcctcctttggcagtgcaaatatgtcacttcggatctgactaactacctttccaggctgatcttaagcaacattcaccaaattaccgatacgacagccaggcccatttcatcggtcaagctctttcacgatttccagactctgttaagcccctttctccccagggctgttaacaagtctccactgcggtgaagcttttttcattttccactccgcctctgctccttaaattaggcatttcgtccataatcaactacagcgcttctcaaacacctacacctgtattttagcactttgggctcaaacgatgatcacacagtgtgcgagactctttccaaggaatgaaaggtcgatctagcaggaaggcgccagagaggctgtttttgatgaggaggcggtctgaaccgtacttgcctagcctcccgtagctccgcgggcgcttcgagggtaccacgcactgaaatgatgggcggggcctgccccgaccctcccggcctccacaggcaggccagcctccaggtttcccggcaagctccgaaacccagaggaggtggggaaaggaggtcaccgcgcctgcgtgttaggaagcgtgacccgggtgggaaaaccctccgcgtccgccattttggctgcctctgtcggtctgttcagttaccacgtgaaccgccgacggagacccgtagtgggggaggcggcggcagcgttaagtgagaaaggaaaaaagacaacgaggaaaaaggaggtgtccgggtagggcaacgcggcgacacccgaggcctggtggtggcggcggatcgagatattcaaggctgaagcagctacggaacggcagcggcggcggtcggacaaactgactgaccgagccgggtggtggcgggagcagcgggagcagccggaacgatgccggccgtgagcctcccgcccaaggagaatgcgctcttcaagcggatcttggtaagtgtgaggctccgggcaagcggtggggaggatttagccggtaaccgggcctgtcacccctaacctcggcccggcgggcactgagccactcccgcccgggaccccgccttcatagctctcgtcaggccgaatgcattgctttgctccctctctgtggttcctactatggcccgcgcgccagggaccacaggcttcttcattccatccccacgcttgaggccctggttccggactaggccccgacctcccggcttctagactgccggttctcattctccccgatctgggggagaagaggcccggcctttggcgggcaagtgggcgacaccggcaggagtcgcggcccggttggtgtgggaaccctgctggcaggtcggggtggcacccttggaaggaacaggtggtgcggatgcagcaggctcattcattgcctaaacgcggttctccctccatcatctgtccctccctcttcctcctctcttgggattcacctgtctccgcccggcccggggtcacccaatgacctgagaggagggaaagaaggagttcagagaaggaaagaaagcttttcaaacgactacctccttgtagtcagttgcatactggagtcttcagctcctctgcctccgttgttctcgtttctggagtagggatgaggcatttatttcttagtttccgagcgggaaacagccccaccccgtcactcttctcgggaggtggggcccattgcgagggggcggttcggtaggaagtaaaaagttgagtctttagttgaaacgttgcagacctagacttttcttatacactgaagtatattaacacatgcaaaaacttaccagagaaatgagaatataagaacttttgagatggattttgttgacgctagctcagacttattccctacggttcaaatgtgtgcagtttgtatttttttaaaccataaatgcattgatgtttgcagggactgtttacattgtaaaatatgtcctgtagccttggagctataattaacacattgtagcacattttttgtttggcatttagtatgtgggttccccctttcacgcaaacgtttccttatgatagaattaactgtatttgccaaatttaagacttttaaaatttgggatgtgtgtgtgaaagtgttagccttttcccccgcagttataatttatttcacctgtttgaaaagtagaacaactctggggattcagtttttctagaaatgaataatcatccatttgaactaactttgattttacaaaagtgtccatatgccctacagatttagtgaattcattttgaaaaacattagaaagtcacatgcagtgtcgcaaaactgttaccttgaaattcttactggaattttgttttgttttaagactaagagtgtaggtggagctgtaaaatagttttaggaaaaaagttacttttaaacccttaaaaagactaattggtgtgcaggtagaactgtaacataagtttagaatagcaatttatctttaatctctttttcacaattctttattttgaaaaaaatgaaactgaaaagttgagagaacaaggaacactcataaacctttacttatatttatttgccatatatgctttctctctccctatgtatatgtatatatacatttgtataaaagtaagttgtagatgtaaaatttatctctaggctgggcacggtgtctcatgcctgtaatcccagcactttgggaggctgaggcagatggatcacttgaggtcaggagttcgagaccaggctggccaacgtagtgaaatcctgtctctactgaaaatacaaaaattagtcaggcatggtggtgttcgcctgtagtcccagctactagggtggctgaggcacaagaatcgcttgaacccgggaggtggaggttgcagttccagccttggcaacagaggaagactgtctcaaaacaaaaacaaaaaacttcatctctaaatacttaagcaagcatctcctaagaataaggacatcgtcttgtatacttataacaatcattctctaatattgtctaatatctggttcatatggagattttctcaagtgttagcacttttttttgtttgtttgtttgagacggagtctcgctctgtcgcccaggctggaatgcagtggcgcgatctcggctcactgcaagctccgcctcctgggttgacgccattctcctgccttagcctcccaagtagctgggactacaggtgcccgccaccacgcctggctaattttttgtattttttagtagagacggggtttcaccatgttagccaggatggtctcaatctcctgacctagtgatccgcccgcctcggccttccgaagtgctgctattacaggcgtcagccaccgcacccggccaagtgttagcactttttaaataaatcaaacttttaattttgagaagactgtaataatcacgtagtttaaggaataatacagtgcactttactcagttttcccaacactaataccttgcaaaaccatggttcattattataacattgatacaatccaccagtcttattcagatttccccactttacttgtacacgcgtgtgagtgctcgcgcacgcgggtgcagtcatcccttggtatctgtcgggggttgatttcaggatcccgcgagattccaaaatttgcaggtgtttgagtcccttatgtaaagtggtgtagtatttgcatataacctatgc

SEQ ID NO: 317143 - DNA, 4001 bp, Homo sapiens
tgggattacaggtgtgagccaccaagcccagccttttttttttttttaaataagatccaagtacttaataagatgtaacagtctcaatagagaacatcttacatatatggagaaatttcactcaacatatcccttttgtagaattaaagtttgcaaggtaaatgattttatttctttctttttggttaatattttttagagttagcatttggaacatagtgacatgcaagcacatggggtaagatgaattaactatcatcagcagcagcagcggcagcatatagccttggatatgttaactttctgaaagcatggctgttacttacagtataactcaaatgggatctctatttgtgaaattgtggtgatcagagtaaatatatatttttttattcaattcaggctactgtgtggtcagactgttatctgtaggtgcattttaactagcaaatgaatcagttaaatgttgaatcagactagtatttgccgagcctttaaaattgccatttctttgtcatcacccaaaaagaatgtaacatttgccaaactctatttctggctcatctaatcaggtactcaggttctggtggaagctactgattgtttcaaagaccagaaattttcttcctctgaaggaaaatagaatattctttacaggagaaatttagagaactatagcaaatagtattgctgtagggatttttggatatgaagccagaaatttggatatgaagccagagatttggaaatccaagctaaaactatcaactgcatttagactattttttctgtctttcaatagttcagacagttgaaagatctcttggggcagtgaattttgcaggttattactaagtaacagcttaaaaatgaattataagcttgttcttagttttataaagttaaggttaaaatactggccatatttcaaactgaaacatagtttcctgtatatatgatttttctcaaacttttgaagagagatcacagaatttaaggaaactccaggatttgactgttaaaaaccttatttatgaccccggtgaagggcgaggacaatcaatatagcagctacaaaacccaagtttatattgggaaacatgtatctcaactcacacctttcagggacagttaagagaagtttgaaaattaaaatatctttgcaaataaatttaaaacagtaaaaaacacgcacatattgtttaataattcatgatgcaaagaatgctacagagtgaaatcaggatttggaaagaggtaatcaaaaaccaaaggttaaaagtggctcatataacttgaaaatttttagatcaatggaatgccactttgaaaaagttttacggtcagctgttaatgaaatgacttacatttttggaaggactcctattcggtatgtagtctgacctcgcctactcgagtagttccctctagtatccttgccagtctttggcttctaagatctgagaatttctggggatggggagttcgagtcacaatattaagaactagtttgaagccagctccagggtagtctgtctttaagtctccactactccgctccaaggtgactcataaggtcggtccgtcaactctgcattatatggcctcaacaacgaaattaaaacacatactttaacctccagagcctcctttggcagtgcaaatatgtcacttcggatctgactaactacctttccaggctgatcttaagcaacattcaccaaattaccgatacgacagccaggcccatttcatcggtcaagctctttcacgatttccagactctgttaagcccctttctccccagggctgttaacaagtctccactgcggtgaagcttttttcattttccactccgcctctgctccttaaattaggcatttcgtccataatcaactacagcgcttctcaaacacctacacctgtattttagcactttgggctcaaacgatgatcacacagtgtgcgagactctttccaaggaatgaaaggtcgatctagcaggaaggcgccagagaggctgtttttgatgaggaggcggtctgaaccgtacttgcctagcctcccgtagctccgcgggcgcttcgagggtaccacgcactgaaatgatgggcggggcctgccccgaccctcccggcctccacaggcaggccagcctccaggtttcccggcaagctccgaaacccagaggaggtggggaaaggaggtcaccgcgcctgcgtgttaggaagcgtgacccgggtgggaaaaccctccgcgtccgccattttggctgcctctgtcggtctgttcagttaccacgtgaaccgccgacggagacccgtagtgggggaggcggcggcagcgttaagtgagaaaggaaaaaagacaacgaggaaaaaggaggtgtccgggtagggcaacgcggcgacacccgaggcctggtggtggcggcggatcgagatattcaaggctgaagcagctacggaacggcagcggcggcggtcggacaaactgactgaccgagccgggtggtggcgggagcagcgggagcagccggaacgatgccggccgtgagcctcccgcccaaggagaatgcgctcttcaagcggatcttggtaagtgtgaggctccgggcaagcggtggggaggatttagccggtaaccgggcctgtcacccctaacctcggcccggcgggcactgagccactcccgcccgggaccccgccttcatagctctcgtcaggccgaatgcattgctttgctccctctctgtggttcctactatggcccgcgcgccagggaccacaggcttcttcattccatccccacgcttgaggccctggttccggactaggccccgacctcccggcttctagactgccggttctcattctccccgatctgggggagaagaggcccggcctttggcgggcaagtgggcgacaccggcaggagtcgcggcccggttggtgtgggaaccctgctggcaggtcggggtggcacccttggaaggaacaggtggtgcggatgcagcaggctcattcattgcctaaacgcggttctccctccatcatctgtccctccctcttcctcctctcttgggattcacctgtctccgcccggcccggggtcacccaatgacctgagaggagggaaagaaggagttcagagaaggaaagaaagcttttcaaacgactacctccttgtagtcagttgcatactggagtcttcagctcctctgcctccgttgttctcgtttctggagtagggatgaggcatttatttcttagtttccgagcgggaaacagccccaccccgtcactcttctcgggaggtggggcccattgcgagggggcggttcggtaggaagtaaaaagttgagtctttagttgaaacgttgcagacctagacttttcttatacactgaagtatattaacacatgcaaaaacttaccagagaaatgagaatataagaacttttgagatggattttgttgacgctagctcagacttattccctacggttcaaatgtgtgcagtttgtatttttttaaaccataaatgcattgatgtttgcagggactgtttacattgtaaaatatgtcctgtagccttggagctataattaacacattgtagcacattttttgtttggcatttagtatgtgggttccccctttcacgcaaacgtttccttatgatagaattaactgtatttgccaaatttaagacttttaaaatttgggatgtgtgtgtgaaagtgttagccttttcccccgcagttataatttatttcacctgtttgaaaagtagaacaactctggggattcagtttttctagaaatgaataatcatccatttgaactaactttgattttacaaaagtgtccatatgccctacagatttagtgaattcattttgaaaaacattagaaagtcacatgcagtgtcgcaaaactgttaccttgaaattcttactggaattttgttttgttttaagactaagagtgtaggtggag

SEQ ID NO: 317144 - DNA, 4001 bp, Homo sapiens
gcacttgaccccaaatttgtcacctggatttctgcagtcgactcctaaatgagagggcagtgtctactctggctttctttcagtctttttcctgttccaatccctgagctgcatggcttctactcaccctgcacacctcagctttttttttttttttttttttgagacagagtttcgctcttgttgcccaggctggggtgcaataacgcgacctcagctcactgcaacctccacctcctggattcaagcgattctcctgcctcagcctcctgagtagctgggattacaggcatgcaccagcatgcctgactaattttttatttttgtagggatggaatttctccatattggtcaggctggtgttgaactcccaacctcaggcgatctgcccacctcagcatcccaaagtgctgggattacaggcatgagccactgcacccggcccacacctcagctttgctacttccctggggaagccttcccaggtcttcctacaagtccttaaagaatcgtgtatctctccttcacagaacttattaatttatatttctttaggtgattatttaatgaatgtctttgtgtcttcccaactgaagtataggctccaaaagaggaagtatttgtttttgctccccaggtgtcttgagtattcaaaattttattgaatgagtaattttcataaatattaatattcttaagaaaccatctaaaatccatctctgtggtaccctgaaacgattttagaaacactataacaataataaaaaaaaataggtacagagtacttactggcatatcaagtcaaaataaacaaaagggcaattggaaggagatgtaaaacttattttttcccaagtttgaaaatatattttcttagacttagaacctcatttctttcaagttgtaagcatatgctaatttcatagcaggcaactttttcttccaggaccaaaggctataagaagctttgcagaagaaattgaaatacagtgcaatattgcatgtaggcatgaaatacaatcatccatacatctagagggcttttaaaacatgatgccttaatcagaatatttttagtacaagttctggccaaatgaataccacatcgtctgcaatgaatgcctgagtggcaagaagctgtgctagtttactttaaaaagaaataaattcacttaagggaaccagaactgggtttcattgccccttaattagatggcaatatgaagttgagtgagaagttagtgctaaattttctacgtgtagttttagaattatatactagttgtgatatacttaccaattgcagattagccaagcaagaaagtagaattttatgctaaaagcttaaaatgggacgaagaaaacatatcagaggtagcagagatttgataatatcaatagtaaaaaatgcagctgtagacatgggaaaccatgtgtgtatcataaagaagttaagtaaggtgactcggataaaacaccttcactggattcccctagggcatcttgctccggcagcgtgagcccagaacgctagccctcctctcctgcgcaggcgcgctaggaccgacttctccctacagtaaagtgacgataaactctgtgaaaggtgggaccccaggaaacctgggccagagcaaagagatgacactttaaatcctggaaccctgatggggtctttattccatttcccccctgctgactgcatggcctgttacaggagtagctcacctgcggggagaccacaaccgtggaggctgcgagccgcaaggcgcggccctgcagactccgcagagcgcttccccgcacgccggtcaccgcctggcccgggagcacccgcgcgcgaatcttctctccattcagagtacagcctggtccttccaccatctctgtggccggcactgtggcccaccgattgcagggcctggtgagaataccgctgtgcaactcaacgctgcgcgggcactgaccgcacgcagaggaaattcaaatctcgcgcgcgtctggccccgcccaggccccgcccaaacagcaccctagctgttgaggtcgctccctacggcgcatgcgctgtggttcacccccgccctaggtcttgctgtgggtttattaagaaaacgcaaacgcgcgtggggcggggggcgtggaggacaactaactaggctgaactgtaaaagcagaagaaattgggacttggaaagctctgaatgtattttctttgcgttaaagttttgcccttgtctttgagctacttagtatacacacattttctgatctggtcctcttaatctgtccttgtctgtgacaggacagatatgtcacagacaatcttgtttttggctctgtttttggcatgctatattcggacgtgggtgggataagagaaacgaagaagagggtttttggaacaaacagcagaatatattctagtgtctatatttaaaaactccattattagatagttaagtgagccctacctaagtgcatgcatccattttgtaaggggacgccccaagatgaaagctatatgaaattgctttgttaaacgtagaggtttatataaatttgagggtaatgcgtagcttttcaaatttacccacaaccctaaccaaagatgcatgcatacatataaatctatgaagtttatgactccatatagttttgtaaattataaagtgtattcttttttgaaaactgaaatactacacattaaaacagaatgtcaatttctaagtgatttcataagcatagcactgtgctgccgttaaaccacaagagcatatacacaggtggttgctgacttaggatgccccagcgtaacagtgttttgactgtatgatggtgcaaaagtgacacacagtagaaactgtactttgagtactcatatagccattctgtttttcattttcagtacagtagtcaataaattattcaacactttattataaaatatgctttgtgttaggtgatttttcccaactgtaggctaatgtaagtgttctgaacacatttaaggagggcctcgtgaagctatgatgtttggtaggttagatatattaaaggcattttcgacttactgtattttcagtttacaacgggtttatcaggacataaccccatcgtaagttgaggagcatctgtatactagagagttgaatttgaatatactgaagacttgattgaaattttgaaaagtattaaatctttcctttgcagggagagattagtgatcaaaagttggctggatcaatttcaggactatttgtactttactcccttgttcaattcaataatctctgtcctttgatggagaaaagtcctatataccttctcctctttcagcgttgtactagttatttattgttacctcatcaattatcccatttgttatttcaaagtttctgtgggtcaggaatttggcaatagtctagctagccagagtcatcctggctcagcatttctcaagaggttacagttaaaatattagccaaggctaaagtgccccaaaggctttttgtagctaaaagatccacttccgagatgagtcacttgcatggctgttggcaggaggcctcagtttctcacctcttgtgtctctatagtgcagctcggctcttctaatgacatggcagctgagagtgtgatccaagagagaagtcaaggagaaagctgcaatgccctttattacttagtcaccctttattacttagtttactatggtaacttacttcttattccattcattagaagccagtcattaaatacagtgcattcacaaggggaggggaattaagctgtgatttgaaaggagggatatcaaagagcttgtggacaaatttaaaaaatatcaacctgttcatttatctgattcacctcatttctctttaaggtgttgtgtactgtgcacatttgggtcaaatacgatctttaattagtaagagttggggactgacactgaaggcattaagagatttcactggcgtgactgaaaggcggagtcagat

SEQ ID NO: 317145 - DNA, 4001 bp, Homo sapiens
aaagccacaaataagcaattttggacataataaaattttgtgagccacatataaacaattttagagtatatgaatggaaaagctcaacttcgatcaatctggaacacatacttaggttaagcattaagctctcatcaggtgtttcagatattctatagacaggctgtcttgaagggaaacatggtaaaggcatggcaacaggtttcaagaagtcttttggcgctgtatgcagctacaatccatacatacagttctgcctaagcaataaataccatcttgaatagtgggaggggatccatttatcttctcaggaaaaaagttctttatcttcctttattcgaaaaagcagaaagcaaaaatggaatttctattagacttttttcaaaatattttttcttctctgtaagtctattcagacaatattcaacagattttgtagtagaaactaccaacaggtaaataaagaatgtacattcgtgaaaaggtgtcatgttcatgacttagactagaaggcaggagattagacagggcaaaatttacttggaatacaatgtcaatgtactattcacacgacctcaaaagaacttctgtggtcaagtccgacgacctttattaaattcctgacagtgacttttaacgtgaaaaaaacctgttttcccacaaaataggctccttacatttcacctagaacaatggatattttaagtgaaacagatctgtagaacctctaaaaccagacaaatgtaaactagaaacaaggagttacttctctccaaatttggctcccctccatcagctctacaatactgctgcatcataaaaaaaggtcattaacttagattggatgccacttttaatccttcataaacatttctaatgaaacataccaaggcaataaaaaatatttctgcttcctaaagcagatcttaaagaacaaaaaataggcctgcaaaaaaagttatgataaactcttaaagtagtacaacaattaatgccttacatatggaaactgtgtcaaatcatggaaacagaaatctaagattacagggtaaccagctaactactactcatattcgcttcctaattaaaatttatcagtaatttaagattggacacaacataagcaatgcaaatgcttgcttatccatactaagattcctattattttaatcccattaccgctctagtttttaaaaataccgtaatgtccaagaatcgctttgttaatacagagtgtcttagagaattaacatttaaatgagattaaggtattttccctgcaaacacttaaggtatctgtgtaatctcaatataagcagttctacgcacatctcatttccaggatgatttttaccattttgcatgtcattccttcccccaagtggaactcacctcagtgacacaggacgttagtaggaataacggtgatgactaataagcatcagtctaggtgtggcagtcttcctacggggcttaataaagcagaggtaccatcccgcattttgaaaatgacatcctgaaagagaaaccaagactgtctaaccagcagcagctcacagtccagactgaaagggggcactgagactctccacacctgacactcgtcttcagttgataccacgggtttgactccgtcctgtctcgggcgacgcccgtaagacaggtcgacactaccccgacgaaacaaacaaactggtttctgagccccgtagaaacggcggggtgcagcagggggagtgcctccgttaccgcctctccaacttcacagaggtcgttgctagtggccacggcggggtggggacgggcggcgttcgggactgggaagctacttgactgccacgtgctcctgcctcgcaacagcggctctagattccgagttatggggacaactgctcgagaggccagggtagggtaaggactccgcaacctagggtcccaaaaccctggagcgaatgcggactaagggagagcggccggcgcgtcaccggcgctggcgtgtgacgtcagcgcgtggaaggcggcacgcagcggaggcggctgggaaggagcagtgaggctgggctagaaccgtagggtcgggcggggtgctgtgcgaaggggcgggcggggtgctgtgcgaagggacgggaggggcgggctctgcaggcgggaagacagaaaggacgagacgggagagatgaaaaggatggagagagtgtaaagctgttaagagtcatgcagagatgcgggagagaactcactagttgaaaccaatttggaatataaagcatataaaattttcccacagctactacaccgagaaagggacttttttattttacatgaaagcgcactacttagggatgccacattttaaagagcaattttgctttaaaaagcaagtcttttcctattatatcttggatggttgaaacagaagaatgtttaagtcttgagatatttttaaaaagctgtatggggttttctacacctttacatctaatgtatgtataaattacttgtctgtatgttgaagggtttggaaatgtacagcagtctaagtacattttttcactgcaggactggcgaaggtaggaagagattcccctaaaactataataagggatatcatctggcgtcatcctgagtggccctactcagggcaactttattcctagggacattgaaagattttggcggctttgccagacgatggcgctgcaagtcacccaacctgaaaagctggagagtttgttttatctcctcttcaatcgccatacagctacaaaagacttattttcctcattctttctacttctagtctacactcctgtgggccctcctacccccagttagtaggaattatcatgtctgaatgcacaattgtagttctacccacatccttttgtacatcaaagtgaagtgaaatgttgccaattactaatctaagcaaattctttttgctgcttacaggaagaatggctagtcagctaacctccttagataattctttaggctcatgtcataaactattggtaggactacaaactgctacagtctttctagaaggtatgctagcagtatgcatatcctttgactcagcaatttaacttctggaacaagtgagcaatgatttatatacaaggataaccgttattgtttataaccagaaaaactagaaatactgtaaatgtataacaataaagaattgattaaattataatatatccaaacaatgaaatactctaaagccatttaaaagagtaatcaagatctactttattgacatacaaagataccattgatatattgatgagtaaataaagcaggttacctaagaagattacctgatttccctttctggtttatatacccctgtacaattgatttttttttttatttttaaacaagagtgctttggggtttctttttctttaaatattttattggacttttctttcaaacaaaaaagtttttgcttcttgcaacaagccagtaacacaagtacacaaagataaagcctatcgtctccttcccagagctcttctgtgctgtcctccacgaaaccaatgttaacagttaattaatatcatctacatttttctctaagttcctaaaaacataagcatgcatttttatattttatatattagtcttagtcttttatttacttatttattttggagacagggtctcattctgtttcccaagctggagtgcagtggcgcgatcttagctccctgcaacctccgccttccaggctcaagtgattctcccacttcagcctcccgagcagctgggaccatgggtgcgtgccatcacacctggctaatttcggtattttttttgtagagatagggtttttgccatgttgcccaggcttcttgtgtgtgtgttttgtagagatgggttctaccatgttgctcaggctggttttgaactcctgagctcaagtaattctgcctgctttggcctcccaaagtgctgggattacaggcgtgagccactgtgcctagccggga

SEQ ID NO: 317146 - DNA, 4001 bp, Homo sapiens
ctctgaaaaataatttggcatgatcctatgatcctcacaattccactcctagatgttataccctagagaaatccaagattccaaacacctgaacatatgaccgtaatgtagtaacgggatgatttacaagagcacaaaagctaagcgtgtcactgtggcagaatggataaagtgcctcgtgctcacagacaggaataccacgcagcagtgaaaattaaactgcagtcagctgcaacgtggatgaaactgtcacggcgtcgaccaaaaagacacatgcacgccacacacaaaatacactatgataccatcacactaactccaaatccggcaaccaagctgtgccatttaggggtgcataaataattgctcacaccggggagatggcacagaaatgattacctttccaaaatgaggaaggggaaaggaagaaggccgtgattaccagtgggaggcttccaaggaacaggcatggttctacttctccacctgtgtaaggatcacaggagtggctcgcgatgctattattattcgttaaactgaacaaaaatgcacttttccatacatgtcatatctcaatcaaaagcaattacaacctataatagctaataatacatcagtagccaggaacgtttaaacaaccatggggcttcaatagtctgcaaaactactcggtttatttcgcacggaaagcgatacaatataaagtttaggaaaaaagaaaacaaacctcacacacccacttattggaatgacgcaaaacggcgtgtagaaaagagtaaaacggacacagagcgctccggacggccggggtctttgcgaggtgagaacaagaaaatccagtcagcggacactggagctaccgagcccaggccgccccttcctcacgcgggggtttctctcgggatccccgccctcgcccaggtcaccagggctgcgtccccgacgggaaaccccgatgggagaccccgctggggccggcgcacccccgctccaagagtcggtcgcttcggcacggtgggggattagggtggtgaggaccgaaggcgggggaggcgggggcgggtggggatgagtacccgggggcccagggaggggagtgaggacctgggggtcgtagcgagaacccggggcccggcggggaggagattgaggatcccaggggaggtgaaaacttgggtaggggtgaggacgaaaagtagggaggtgaggaccctagtgggggattcccagggggcgaggaggggcggggggtcctgaagacccacggtggggatgagaaccgaggtgggagatgaggatcgaggcgggggatgaggacccagggggaggtgaggactggagggaggtattcggaggagcgaggagggggcgtgagggcgggccgggggggttaacagtctgaagggggatgggaaggttgggggagggagcgaggagggtccggagttgggtgtgcgggtcggaggtgggaaggttgggaatctgggggccgcggggcgccacgcctgccttacctcgtccaccgtgcggcgcgggaggtgcagcgtcccgagtagcaacttgagcttcactgccgacgagaggccatggaagcagagacggatgttgtcgatgaccgcggccgtgagcagggacgcgatgctgggcggcgcccacagctcgtccgtggcccccagcttgttgtgcagccacaggcccgtgtcgctctcccgcatggacgccatcttgggggaaagcgcgcgccgctgccccggcatcttatgaagacacctacgcgtccctcgctaggaccccaacatggcggcgcccgtcgggctgcgggccgcagaggcggcgcaggtggcgcggtcccacgagcggggcttcccgggagagcgcttctgggtggcgaccgcgtctccgggtagcggccgcgtcttcgggaagctttgtggcaaagccgagagccggaaggacggggtgccgctgagcaaggactatcggcttccgtaaaacatcatggcggcgccctctgctggctctcgggaagaccgcaaaaaatgacgtcacgagcaggcgcgcgtattcgcgtcttgggagcccgggctgcggcctggcattcgcagtgcaggtgtcaagcgccgcagacttgctgctcgcgcggtggggcggaggctccctgtggcacctgccccgctgtccgctcttcgctttttccccgcttgggtctcggcgcggaccgtgtggacgccccgcccccgcgggcccagcacctgcacggagaggagccgcggccctgcggagcgagcctgcgggatcccggtcgcagcgctgagcttccgtcccccgctgagcccgctctgcccgtggcgcgccgccgacggggctgcgctgagcatgcgggtcggagggcgctcgggagctgtccaggggcactcgtgaccccacagtgcagggaggccccggcccccagtcgggctggagccgccaggcaggagccagtagtgaacttttcagttttaaaagcttgtcattagatacaaacatgagtaaaagttaaacttcattttattaaattcgttttacccttttgtctttttgacgaggccttcctatgttggccaggctggtctcaaactcctgggctcaagcgatccgcccgcccgcctctgcctcccagagtgctggggttacaggtcggggccgccttgcttggcttctgtattatatcttttttttaaaagatcttttccttattgttccactgccatgctcctgccgccgttcacagctattgccactgggcggtgggaacgccgggagaacagggctcagcccagctgctagcagtgccctggccctggcggcttgaacttggcagtcctgcggaagtcacacgggggaaacccgcaaatgctacaaatcagtgctggagcggtggttttgttgattgcttaaactgaagaaagtgatagagaaaatgttgatgataaagattaaacttaaaactgtcatgtcgacaaccgttacattgcaaatagcacataaaatttaagagaatattttttaaatgattcaaaagtgtcgaattcagcaaagacaagttattgactaatgggtgaagttgtgacatcagtggggctagtgctgaaagaagtttaatgattaggccggtcacggtggctcacgcctgtaatcccagcactttgggaggccaaggcgggcggatcacctgaggtcgggagttcgagaccagcctggccagcatggagaaacctcgtctctactaaaaatacaaaactagccgggcttggtggcgcatggcttgcctgtaagcccagctactcgggaggctgaggcaggagaatggcttgaacccgggaggcggagtctgcggtgagccgagattttgccattgcactccagcctgggccacaagagcaaaactccctctcaaaaaaaaaaaaaaaagtttaataattataatctgagggtaagaaatagtttaacagtggacgacatatcaaatttagtatgagaagagtgaaagttacttcaagttgtgaaatcatgattgaaccgtaaacattagttggttgaaatgaaaatttttgttcacagaaacctgtgtgcaaacgtttatagcagctttatttataatagccccaaacttgaaacaatccgaatgattctgacccccaactgtctgtagctttctgtaggatacgcagcacttttctgtatacagtgcttgatgcatcttgagtcttcagttttatgcaggaaaaatccaagttaacatctggcttaaccaagaagacaaaccactaggaggacttagttacagcatcagaaagcaatggattaatattcagaatgaaaaaaggaatgcttgtaaatcgacgagaaaaagaccgacaatagacaaatgtgcagaagataagaataggcaattcacagcctggccatcatagtgaaaccccgtttctactaaaaatacgaaaacagtggggcgtggtggt

SEQ ID NO: 317147 - DNA, 4001 bp, Homo sapiens
tcattcagatgctaagatacatttctttctactcgacattaacatctctatgtagaagcaaaggtgaagagatcacaggaaccagttgcattccccctgtgagattcacacgaactgcaccaagtccttcggcgttaaagagaaaggggaggagcgtcagtccgctctgcaaactctttagatatgccaccatcatctcttcccagggtctttttcgtctcaagaagcgcccccaaaacgccacccttggctttgacaataagctccatcacaccttcagtaaatcagagcccgtctgaatgaaggatacccaaagccaagaaatgcaagaaacaaccgaggaatcagaaaggctacacctgccctgtgaagtgagatggtttccagggcgtggaaaggaggggcaggggaagggaggagggctcgactggggacaggaaagggaacccactaaggcctggcgtgggtagcagaaatggcagctctagatacaatccctggctatggggaggtgaggtgcatagcggtgcttgtcgggaggtgggggctgccaatagtccatgtctgacccggccgggctggcgggcgataaagtgcagctgtagggggaggtggaattggaggacacggaggaggacggcgcggggctgttggtgcaactccacgtggaggcgggcgaggggctgtctccgctgctgctcagggcggcgctggctcctcccgggctcagcaacactgcctcggagaagagcgcccccggcaggcccccgccgccgcccccgcagtgatccgccaggcgcagggtctcggtgagtgcccagatgtagttgtgggcgaagcgcagggtctcgatcttggtgagcttggcgtcctcggggaacgtggggagcacctcgcgcagcgcgtccagtgccgcgttgaggttgtgcatgcggtttcgctcgcggttgttggccttcagtctacgggtcttcttgatgcgctgcaccgtctcggccgtcttggcgcctcgggagacggcccgcgcccgggaagggcgccgtttgcaatcgtgtaccagacccagcagccgtgcgggccggcagccctccgcacccgcagccacgccgccccgcgccccctgcccggcctcagccccgcgctgccgacgcgccccgcctgacgcgcccggctcctcctcctcttcttcgtcggcgctggatgacagcggggtcagggccgccaaggcgggggaggccgatccgagcagcactaacacgtcctcttcctccttcaactccaaggtctcggatttgacgaacatcctaccgaagagagaaaggggaaaaaggcagtgaggtgtaaggaaagaaacagaggcgcgatcttcgtgtcacaggggcgtgctccggcgcgcacccgagaagaccagctccgaatggcgcggagcaggaaggcgaaggaagaaacccaggcagtgctaaccaaggtcaggagcgccgctagcgctcgctgtgaccctgctgccagtcagccgggtcctgccctccgcgggcggtcctgcgttccctccccgagaagggactgcggcctccgcgacaaagattctgcgcggagcagagggcgtgcgggtgtggttggactgagtgcggggaaaccacctgcgtagttggaagcggtggctcgaatacttacttagttggctctaactgtgcctcagcgttgctgtgactttggcctgtgccgggaatctccgcgcagctgcgagcgcagcgccgggtccttcgcccggcgtgaaagctgcaagcccggcgctactgtggcgcagctccgcgggggacctctgcgaccggcgagtttgccaagagccccggcggcggcggcggcggcccgcccgggtctcgtgtgttgtggtggtggtgcgtgtctgtctgtcagtcagtccctggccgtgcggctcctggcacgcgactcccaggcactccagttaacgcgaagctgcttgtggttcagtggctgcgtgtctggcacacgactctccttaaaaccccttatataccaccaagaaaacaatcagatctgccccgggccccctcctcccccgccaccgcctcctcctcctgtcagtcctgccccccttctcccccgcttttccctcctctggcttattcttttcattgcattatcatcattcatttcttcctctttcttcaccgcctttccccctcccttggccctgccatccatcctcctcctcccaccacccccgcctctcttttccccctttatctaatcaacataaaatggttctaaagctcctgttggagctccgggctgcggccggagctggcgaagccgcagcggccgcagaggctcaagctgcggctgttgtcgccgccgctgtccattgtgattggtggctcgcgctcggctggagcgtgccgctaatttattaatgaatggaggtcgcgaggcgcagctggccaatcagggcgccctggactccgggaggcctgcgagccacgcgcaccggagcccgctccctttcagcagctcattaggggcccgagcgctgggggcggatggggggacccgtgctaccgcccccgccttcgtcctcgctgccgccgaggctccccccgcccggcgcgcgcgcaggcaccgcacccggcgctgccggccctcctaactcccgggtgatgggaactaggaattagttaatgggggtcagaatcccggggaaagcagttagccctgtggtgctgccgggcgtctcttggcaaagcctcttaggggttgtatcaaatagtaaacgattttaaaatggattcatttggttaggggaggagaatggcgtggatggagagatgtggacacctcgtgaacaagtgtgtttggggtccgtcgaaactggcgtgggagagtgaagggagaggacactggggattcaaacaggcgtctcttgggaggggaggtcggataggggagcagttgatgagcttttagaggatgtgagaatgaaatcactcacatgttagagctgaaaggatccccctcattttacatacaggaaactgaggctccgggcactgatgcaggttttgctggggttaacccagtttatagcctggagggacagcaaggaggcttcctgcgtgggtggcagcgaaccgagcgggaggagcggcagagctgctgctcctgcaagcaaatgcgctgcgctgacatttctgtgacctctgctccgcgctggggggcgttgtagggacaaggggcccatcttcccaattctgcttttcaatgagaaaaaagagctgaagggctactggacctcgggggaaacttgttctcaattgctcgttagccctccccactttccccacgttcatgcccaccctcttgtcgacatggggatggatccggacttcagtagaccggagtggcgtcccttgagatcccctttgcaaattaactttaggcaaggcacagttggagtgttaggagtggaagagtagaagggaaagagaatgctgtcttctggtttctgtctccctcagtttgtaggacttagaaacaagctgtattccaaagacggggtggttaaattagctgttagtattttggcatggctttaatttgtttaatgttttcttcagggaggtaacaaggaggattggaaggcacaaagtaaagaaaatgaaaattagaaacttgtgaaaaggagcattacccattgcagttcttcaaacttcagacttccttctgtcttggaattacttgaaaactatcatgatttccactttgctctttgatgtttgtgttttcatattctccctttttaaagcaaattcccaaaatataaaagcatcatttgccagtttcctcctcgactattttagaacagctaaatttcatgtgttagaagtgcagaaatgaaaatgaaagaagaaaagagagacactttcaatgtttctagcacacaacacctgcctctcacatatctttgggtttctgtctatcat

SEQ ID NO: 317148 - DNA, 4001 bp, Homo sapiens
agggcatttaggaattgcaggtgtatcaatatggatgaataatctcagattccaagtctccattaatcgtacatgttctttccattttagcaattcaattaaatcatgaatgtaaaattctacaggaaacaaatctttttatttcctgtcttcccaagtttataaactcaaaaaagtacattgcttcaaatttaaatacatacatttaaatacataattcctatagtgcctcaaacagtaaaaggattcatctctagaaagcacaatattaaaatcagaaaaacaacatactttagttttaagtttcccttttaaagttttaacaaacacgaatgcagtttaaactgcttgacaatattcagttgtgggattctgctagaaaaaaattattgaatatcttgaccctaacctttactatttactaaaagatcaccagtatgtagaatattttgatgccagagctattaaatgttttagtaataccataagcattttttcagattatgagctttataaaaaaatctttgagttaaatatggttatttcataaactgtaatgctgaaaacctctacttaacaaagtccatgaacatgtcaatcttgataattaaatcctgtatcattaagtcccatttgagtttcaggataaaccagcaagtcagggcaaacattccctggtgtctgtttttaaggaccatagaaaaacttgcatttaggataggccttgtttttacattatttttgtttcagcggtcatgcataatgcatggtggcactgtccaagagttttacataatcaagtctaaaaagtgctctaagtatccaggtaggtaatttattttctctctcaaatgccaggccccggaggatcagaatcaagtcctatagcaggtgactatatcgtgtgtgtgtgtgtgtgtgtgtgtgtgtgtgtgtgtgcgcgcgcgcgcgcgcacggagggggggaggggggagagagagagagacagagagcgagccaggtttcttttagaagtaggagagggatgaatagactctcctattcaattctggggagctggggagggctttcccagccaagaggactgacaagcacttctgctttcatttcatggaacgcccttaggtgaaatctggttctgcactgcaccaaccaccttccctctctcctccgcgccgcagcgcactccaaccttctcaccatcccccaggtggggctggggttggggattttaaaagtttgtaagagttcccctccggttcgcgttcccgccccgcggagggacgtgaagagaaatgaccgccgggcggccgcggcccttcggccgactagcccctgcgaggtccggatgtgtctttccccgctgtcgctaatcccatgtgcctctcagctactgtcaacctcctcccacggtctagcccagcggttagcgcaggaatgaggaagtccgagtggggctggagggggtgcggagggctgggcggcaggacttgggccacgcgtcccctgccgggcccccactcgcccgagtttggcttacccgggtggcgagtccgcgttcggcctcctggcgcgggtgggctctccctcctaagcggcgcgggcctgccggctggagaaggaagaggcggcggcaggccggagcccgggcgggcccgagtgcgggtcggggcgagcgggagcgcggcggggccgggccaggccagtcagcgccgcgccatggccgcagcgcgggcggagggaagcgcagggcgcgcggtggccgggcggcggcgccgccttactggccgggcggctgcggcctcggcggcgctgggctccgggagcggggccggtggctgcgtgcaggccgagggctgcggcggctggcggcccgaccgacgggaagggcaggggaagctgtcagcgcgtcgccgggccgctccggtggcgaaacctcctcttcctgccccggctcgctggtgcacttctctctctttctgtctcgctcactctctcacttcctggctggaaattcccactgacgtcgagagagcatacagacagacggacacacgcgcgcacgcagcgggggcgggaggtagggtcgctgccgggggtgggggaagcccgcacttctaggggcgctgtgcgcccccggcccggccttgccgctcgcctcggctcccgcccctcggggccgcttcggggcgccgggcgaggggcgcgcgttaggcggcctggacgccgcggcccctgcggggctctggcttcctagcagggcgctcccgaatcccaagggctggagccggtagggaagcccccaggaagcgcctgccgggcccaatcaatggtcggggaacgcaggcagcacggaggcggcggcggtggcagtgccgctgatagagtcatgcggtccatagcccctaagggcaggcccgagcagctggagggtcggcatggatccaagcatgccagatataaaaataaagctcatctgtatattccatttaagcgtgtctcagttacattcacatctcttcacagattaaactacaatttcgttatcataaacgacttgtgcccagtaaagtataaccctctactggtttttggtgcggtcttaaatctcctggttatagagcagttactcagaatgttcatctacaaggcattgttaggcctttatgataattactgtggatagaattatagtgatggtggtagcaatggttttggttcacagctcataaaatactgatctggcagaggggagttttctttttctctgaagagaccgctactggcacccactgacaggcctcccagtggccaccattcactggcatctgagctgctttagtgctgggcactgtattaggtacaggctggggataccttcgggtggattacctccccacataagaaagcttgagccgaaatatatattttagagctcattgtttcactactgggtggagtgacaactgaaagcttagctttaaaacatcagtaatcaggtcctcaccaggcaatattgcagtggcatttagattgcttatggcatgttcatcctagtcctttcgtgcccactctccatcctcctcctccagtaggttataaaaaccttcttggtggagtgtttttctggaaaaaaaaaataaacaaaaaaaacccacacacacaaaaacccagcgatccatttgattgcctatgaggtgagtctccgaggcgaccttggaggccccaacagtcgacctttaagtgatctcatttagctccgggaggctgagcagctggaatttagaggatccataaagactgaacacaatgactttttaagaaattctgtgagccgggtgcggtggctcacacctgtaatcccagcactttgggaggccaaggcgggtggatcccctgaggtcaggagtttgagaccagcctgaccaatatggtgaaaccccatctctactaacaatacaaaaaaattagccgggcgtggtggcgggcgcctgtaatcccagctactccagaggctgaggcaggagaatcgcttgaaccctggaggcagaggttgcagtgagccaagattgcgccactgcactccagcctgggcgagacagagcgatactctgagaaagaaagaaagagagagggagggagagagggagggagggagggaggtgtgagcatacacactctacttttcattctgcaaggggtggcagccccattaccaaaagatagataaatacaattgttataagagtagagccagtgtgacatatttgggagtaaaaaatgaagagcgttaattactgaaaaggattaaatcaaactccaaactcaaaatgattccataaaatgaacttaaaattcagggtagggtgttgagcaggcatattttcctggggctgctgtaaaaatttaccaccgactgaacagcttacaacgggaatttattctgtcacagtcctggagcctaaaattctgaactcaaggtgccattaaggccatgatc

SEQ ID NO: 317149 - DNA, 4001 bp, Homo sapiens
caggatggtctccatctcctgacctcatgatctgcccgcctcggcctcccaaagtgctgggattacaggcttgagccaccgcgcccggacagaatgcttgttttccttctacccacgagatggagaccatcctggctaacacggtgaaaccccgtctctactaaaaaaaaaaaaccaaagaacaaaaaacaaaacattagccaggcgtggtggcaggcgcctgtagtcccagctactcgggaggctgaggccggagaacggcctgaacccaggaggcagagcttgcagtgagccgagattgcgccactgcactccagcctgggcgaccagcgagactctgtctcaaaaaaaaaaaaaaaaaaaaaaagtttaccaaacctgttcacacgtctccatattgtataccttatcatcacggccattaactgcatgctaagagaataccacctacctttcaaattagcctaggagaaaaatcattcaagatactcaattctgctccacaccccccaaaaaaatgtatcctgaaatgcattccaaacacaaaaataaaatgatttcagggattattccctcggccccatgcacaattgtgtgtaagtcctccctggctccacgaaaacatggtcttggatgaaaagtattgatatatcggaggcaacaccagatatgtccacagaaggacatggaatttgtaaataggaactacagtcaaggaaggtatcaaaagctcaagtgcttacaaggaataagacaagtcaagaaacaaaggcaaaggtaaagatgacaaatgacacctggctccagaaatgagagagaatgtgagatggaatgcccaagtccaatctaaatgggatttctgtgactcagccgagctgactgttgccatgcacaaagataactaaagccacaaggttgttaaccagatttttaaaaacgacaaacaaccgctgacaatcaatccacatttaaaactctgtgttaaccaaacaacattatagaccaaatcagaacaccgggccacaatttacaactgatggtctggagattcaagtaggcaagagtggagggaagtaacaaaggtaataccacctaaaattaagatgaaagaggtgcgatggaaatctacctagagtgccgaaaagagcagccacccgaaaggctggagaagtgggcccgataacaaactcccgaacgaggggaaaagcagtgaaagaaagaaggcgagggcggaggcggtcctgactagtaactgccttaggaggcatccaggtgagcacgcgggcgggagccattctcaccgctggctgcggtagtctgcagggcttgggatcctgcggggctgtgcctgctccctgcagccgccgtggtcgcgactcctccgggactggtgccagaaggaactgcgcccaccgaccccttctctcgccctcctccggcgccgcggagatggactccatttcctgagggggcggcagtggcccgtccccgggatcggcctcggccaccggccacctggcgccaggaagcttccatccctgcaaaggagaaaaaaaaaaaaaagagtggaaggaggtgagcgcagcgaggaccgaggcgaaggagggtcagtgcggaaacccggtgtgaggggccgagtgaggaaggttcctgcagggcggcgaccgggttttaggaggtcgcggccctgcctttaccggagggcgagtccccgccaagcccgggctttggagatggaccgaagaggggagggaggactaggtacagaaataaaccgcggagcaagaagcacacagtgccgaagacagaaagccggaggagaagtcgaaaccgcctcctcagcctctgcgggagcgtggtaggggaagagtcacagactgaccctgcgtctcccgccgggaaccaactgcagtggtacaccccacggaaagctacgtctccttaccgactgcgcacgcccccaacagactacaactcccagaagcccccgcccgcgttccggcgactgcgtggcagcacgggccgcttccttatccggtaaagtgcgggggttgggtgggagggaaaccccaagcgcctgcgctggcccgaacaggcctttgggaactacaactcccggcgtgctctggggctagggaggggtcgaaggtcataggggcgcgtggtggtggaggcgggcgggtccggagggtttcgtgaccccacaatttgcttctgcttctgcaagactgccctaaactcacctgggtatgaggattacatggctctgtccctaattggctctctgccatcttttattagccttgcctttgagcttgcggatgacaggaggtgtcaatgtaaaataatcaaaagcgcgaagtttgaggatagcctacctagaaacaccgactccaaggaaggagtcagcgttccgaagtagagatttaagatttcacttatataggcagaaactgagaggttttttagcaggattacagcattttctcatacaaggttagagaatagttacaacaatttgattatagacagtgtttctttttgggaagtgtacatttaacatttttcataaaggattttctgtcatctggtctaagcaaaccggggcaacaaagcagaagttaatctataaggatcattaagaaggcaggaagtttttgtccttaacttcgtttaattctctctagccattgtatagaacaagaaaaataagaaagcaagttaatctataatctgagaaacagaagttgtaaccacgtgtaactcagatgacagtcacatctctctccaggcttagtgagttttaggctccaacaacctttaaactatttattttcatagggaagtctcactaacaggaaaggcacttacattgaaaacgctttgaggttggccactgtgaaggagggaaattcgggggagagttgcaggaaagtggcttgagtagtaaaagtacccttctaaaatgctagagccaatgtagaaaataaatctaaagcctgttattgtcatagtcctttgtagtgtgcaatgagctttccctgggacatgctaatttttaccttcacagcatctccctaaagtagattttgttaaggaaaatagttgagggccaggacctaaatcttatgattttgctgagttttccaataagatacatgtgcatatatactgacaggtagattgcaaaaattcattctggggtctgtctgggattgagaaacatattgatggcttattgtacagtccttcaacttagttaattcttctattttaaccataaatttctattataatatttagatagcatttattagatgtcaggcactgtttaaagtgttttacgttatgtattaactaatttggtactcacagtaaccgtgtttattatccccgttttacaactgagaacactgaggcacagagagattaagcaatttgcccttgatcatacagctaggaagtagtgaagccaagattcaatcctaagtagtctagtattagaaaccatgcttttaatgtcttaaacatagatattgcagaattgcctgtacattaaccaaactcaaaaatgacatcccatggccaggcatggtggctcacgcctgtaatcctagtactttgggatgccaaggcgggtggatcaccttaggtcaggagtttgaggcaagcctggccaacatggcgaaaccctgtctctattaaacatacaaaaattagctgggcatggtggtgggtgcctataatcacagctactagggaggctgaggcaggagaattgtttgaacccagggggcggaggttgtaatgagccaagatcgcgccacttcactccagcctgggcaaaagagcaaaactccgtctcagaaaaatgaaaagaagaaaagaaataacatctctgagaatgatataacttcattggctagaaactaacaggtgcacagcaactctcttaatgctgcacttgtataagaactgtaagtttaaagctgcaaccagct

SEQ ID NO: 317150 - DNA, 4001 bp, Homo sapiens
acgccattctccttcctcagcctcccgagtagctgggactacaggcgcctgccaccccgcccggctaattttttgtatttttagtagagacggggtttcaccctgttagccaggatggtctccatctcctgacctcatgatctgcccgcctcggcctcccaaagtgctgggattacaggcttgagccaccgcgcccggacagaatgcttgttttccttctacccacgagatggagaccatcctggctaacacggtgaaaccccgtctctactaaaaaaaaaaaaccaaagaacaaaaaacaaaacattagccaggcgtggtggcaggcgcctgtagtcccagctactcgggaggctgaggccggagaacggcctgaacccaggaggcagagcttgcagtgagccgagattgcgccactgcactccagcctgggcgaccagcgagactctgtctcaaaaaaaaaaaaaaaaaaaaaaagtttaccaaacctgttcacacgtctccatattgtataccttatcatcacggccattaactgcatgctaagagaataccacctacctttcaaattagcctaggagaaaaatcattcaagatactcaattctgctccacaccccccaaaaaaatgtatcctgaaatgcattccaaacacaaaaataaaatgatttcagggattattccctcggccccatgcacaattgtgtgtaagtcctccctggctccacgaaaacatggtcttggatgaaaagtattgatatatcggaggcaacaccagatatgtccacagaaggacatggaatttgtaaataggaactacagtcaaggaaggtatcaaaagctcaagtgcttacaaggaataagacaagtcaagaaacaaaggcaaaggtaaagatgacaaatgacacctggctccagaaatgagagagaatgtgagatggaatgcccaagtccaatctaaatgggatttctgtgactcagccgagctgactgttgccatgcacaaagataactaaagccacaaggttgttaaccagatttttaaaaacgacaaacaaccgctgacaatcaatccacatttaaaactctgtgttaaccaaacaacattatagaccaaatcagaacaccgggccacaatttacaactgatggtctggagattcaagtaggcaagagtggagggaagtaacaaaggtaataccacctaaaattaagatgaaagaggtgcgatggaaatctacctagagtgccgaaaagagcagccacccgaaaggctggagaagtgggcccgataacaaactcccgaacgaggggaaaagcagtgaaagaaagaaggcgagggcggaggcggtcctgactagtaactgccttaggaggcatccaggtgagcacgcgggcgggagccattctcaccgctggctgcggtagtctgcagggcttgggatcctgcggggctgtgcctgctccctgcagccgccgtggtcgcgactcctccgggactggtgccagaaggaactgcgcccaccgaccccttctctcgccctcctccggcgccgcggagatggactccatttcctgagggggcggcagtggcccgtccccgggatcggcctcggccaccggccacctggcgccaggaagcttccatccctgcaaaggagaaaaaaaaaaaaaagagtggaaggaggtgagcgcagcgaggaccgaggcgaaggagggtcagtgcggaaacccggtgtgaggggccgagtgaggaaggttcctgcagggcggcgaccgggttttaggaggtcgcggccctgcctttaccggagggcgagtccccgccaagcccgggctttggagatggaccgaagaggggagggaggactaggtacagaaataaaccgcggagcaagaagcacacagtgccgaagacagaaagccggaggagaagtcgaaaccgcctcctcagcctctgcgggagcgtggtaggggaagagtcacagactgaccctgcgtctcccgccgggaaccaactgcagtggtacaccccacggaaagctacgtctccttaccgactgcgcacgcccccaacagactacaactcccagaagcccccgcccgcgttccggcgactgcgtggcagcacgggccgcttccttatccggtaaagtgcgggggttgggtgggagggaaaccccaagcgcctgcgctggcccgaacaggcctttgggaactacaactcccggcgtgctctggggctagggaggggtcgaaggtcataggggcgcgtggtggtggaggcgggcgggtccggagggtttcgtgaccccacaatttgcttctgcttctgcaagactgccctaaactcacctgggtatgaggattacatggctctgtccctaattggctctctgccatcttttattagccttgcctttgagcttgcggatgacaggaggtgtcaatgtaaaataatcaaaagcgcgaagtttgaggatagcctacctagaaacaccgactccaaggaaggagtcagcgttccgaagtagagatttaagatttcacttatataggcagaaactgagaggttttttagcaggattacagcattttctcatacaaggttagagaatagttacaacaatttgattatagacagtgtttctttttgggaagtgtacatttaacatttttcataaaggattttctgtcatctggtctaagcaaaccggggcaacaaagcagaagttaatctataaggatcattaagaaggcaggaagtttttgtccttaacttcgtttaattctctctagccattgtatagaacaagaaaaataagaaagcaagttaatctataatctgagaaacagaagttgtaaccacgtgtaactcagatgacagtcacatctctctccaggcttagtgagttttaggctccaacaacctttaaactatttattttcatagggaagtctcactaacaggaaaggcacttacattgaaaacgctttgaggttggccactgtgaaggagggaaattcgggggagagttgcaggaaagtggcttgagtagtaaaagtacccttctaaaatgctagagccaatgtagaaaataaatctaaagcctgttattgtcatagtcctttgtagtgtgcaatgagctttccctgggacatgctaatttttaccttcacagcatctccctaaagtagattttgttaaggaaaatagttgagggccaggacctaaatcttatgattttgctgagttttccaataagatacatgtgcatatatactgacaggtagattgcaaaaattcattctggggtctgtctgggattgagaaacatattgatggcttattgtacagtccttcaacttagttaattcttctattttaaccataaatttctattataatatttagatagcatttattagatgtcaggcactgtttaaagtgttttacgttatgtattaactaatttggtactcacagtaaccgtgtttattatccccgttttacaactgagaacactgaggcacagagagattaagcaatttgcccttgatcatacagctaggaagtagtgaagccaagattcaatcctaagtagtctagtattagaaaccatgcttttaatgtcttaaacatagatattgcagaattgcctgtacattaaccaaactcaaaaatgacatcccatggccaggcatggtggctcacgcctgtaatcctagtactttgggatgccaaggcgggtggatcaccttaggtcaggagtttgaggcaagcctggccaacatggcgaaaccctgtctctattaaacatacaaaaattagctgggcatggtggtgggtgcctataatcacagctactagggaggctgaggcaggagaattgtttgaacccagggggcggaggttgtaatgagccaagatcgcgccacttcactccagcctgggcaaaagagcaaaactccgtctcagaaaaatgaaaagaagaaaagaaat

SEQ ID NO: 317151 - DNA, 4001 bp, Homo sapiens
agacggggtttcaccctgttagccaggatggtctccatctcctgacctcatgatctgcccgcctcggcctcccaaagtgctgggattacaggcttgagccaccgcgcccggacagaatgcttgttttccttctacccacgagatggagaccatcctggctaacacggtgaaaccccgtctctactaaaaaaaaaaaaccaaagaacaaaaaacaaaacattagccaggcgtggtggcaggcgcctgtagtcccagctactcgggaggctgaggccggagaacggcctgaacccaggaggcagagcttgcagtgagccgagattgcgccactgcactccagcctgggcgaccagcgagactctgtctcaaaaaaaaaaaaaaaaaaaaaaagtttaccaaacctgttcacacgtctccatattgtataccttatcatcacggccattaactgcatgctaagagaataccacctacctttcaaattagcctaggagaaaaatcattcaagatactcaattctgctccacaccccccaaaaaaatgtatcctgaaatgcattccaaacacaaaaataaaatgatttcagggattattccctcggccccatgcacaattgtgtgtaagtcctccctggctccacgaaaacatggtcttggatgaaaagtattgatatatcggaggcaacaccagatatgtccacagaaggacatggaatttgtaaataggaactacagtcaaggaaggtatcaaaagctcaagtgcttacaaggaataagacaagtcaagaaacaaaggcaaaggtaaagatgacaaatgacacctggctccagaaatgagagagaatgtgagatggaatgcccaagtccaatctaaatgggatttctgtgactcagccgagctgactgttgccatgcacaaagataactaaagccacaaggttgttaaccagatttttaaaaacgacaaacaaccgctgacaatcaatccacatttaaaactctgtgttaaccaaacaacattatagaccaaatcagaacaccgggccacaatttacaactgatggtctggagattcaagtaggcaagagtggagggaagtaacaaaggtaataccacctaaaattaagatgaaagaggtgcgatggaaatctacctagagtgccgaaaagagcagccacccgaaaggctggagaagtgggcccgataacaaactcccgaacgaggggaaaagcagtgaaagaaagaaggcgagggcggaggcggtcctgactagtaactgccttaggaggcatccaggtgagcacgcgggcgggagccattctcaccgctggctgcggtagtctgcagggcttgggatcctgcggggctgtgcctgctccctgcagccgccgtggtcgcgactcctccgggactggtgccagaaggaactgcgcccaccgaccccttctctcgccctcctccggcgccgcggagatggactccatttcctgagggggcggcagtggcccgtccccgggatcggcctcggccaccggccacctggcgccaggaagcttccatccctgcaaaggagaaaaaaaaaaaaaagagtggaaggaggtgagcgcagcgaggaccgaggcgaaggagggtcagtgcggaaacccggtgtgaggggccgagtgaggaaggttcctgcagggcggcgaccgggttttaggaggtcgcggccctgcctttaccggagggcgagtccccgccaagcccgggctttggagatggaccgaagaggggagggaggactaggtacagaaataaaccgcggagcaagaagcacacagtgccgaagacagaaagccggaggagaagtcgaaaccgcctcctcagcctctgcgggagcgtggtaggggaagagtcacagactgaccctgcgtctcccgccgggaaccaactgcagtggtacaccccacggaaagctacgtctccttaccgactgcgcacgcccccaacagactacaactcccagaagcccccgcccgcgttccggcgactgcgtggcagcacgggccgcttccttatccggtaaagtgcgggggttgggtgggagggaaaccccaagcgcctgcgctggcccgaacaggcctttgggaactacaactcccggcgtgctctggggctagggaggggtcgaaggtcataggggcgcgtggtggtggaggcgggcgggtccggagggtttcgtgaccccacaatttgcttctgcttctgcaagactgccctaaactcacctgggtatgaggattacatggctctgtccctaattggctctctgccatcttttattagccttgcctttgagcttgcggatgacaggaggtgtcaatgtaaaataatcaaaagcgcgaagtttgaggatagcctacctagaaacaccgactccaaggaaggagtcagcgttccgaagtagagatttaagatttcacttatataggcagaaactgagaggttttttagcaggattacagcattttctcatacaaggttagagaatagttacaacaatttgattatagacagtgtttctttttgggaagtgtacatttaacatttttcataaaggattttctgtcatctggtctaagcaaaccggggcaacaaagcagaagttaatctataaggatcattaagaaggcaggaagtttttgtccttaacttcgtttaattctctctagccattgtatagaacaagaaaaataagaaagcaagttaatctataatctgagaaacagaagttgtaaccacgtgtaactcagatgacagtcacatctctctccaggcttagtgagttttaggctccaacaacctttaaactatttattttcatagggaagtctcactaacaggaaaggcacttacattgaaaacgctttgaggttggccactgtgaaggagggaaattcgggggagagttgcaggaaagtggcttgagtagtaaaagtacccttctaaaatgctagagccaatgtagaaaataaatctaaagcctgttattgtcatagtcctttgtagtgtgcaatgagctttccctgggacatgctaatttttaccttcacagcatctccctaaagtagattttgttaaggaaaatagttgagggccaggacctaaatcttatgattttgctgagttttccaataagatacatgtgcatatatactgacaggtagattgcaaaaattcattctggggtctgtctgggattgagaaacatattgatggcttattgtacagtccttcaacttagttaattcttctattttaaccataaatttctattataatatttagatagcatttattagatgtcaggcactgtttaaagtgttttacgttatgtattaactaatttggtactcacagtaaccgtgtttattatccccgttttacaactgagaacactgaggcacagagagattaagcaatttgcccttgatcatacagctaggaagtagtgaagccaagattcaatcctaagtagtctagtattagaaaccatgcttttaatgtcttaaacatagatattgcagaattgcctgtacattaaccaaactcaaaaatgacatcccatggccaggcatggtggctcacgcctgtaatcctagtactttgggatgccaaggcgggtggatcaccttaggtcaggagtttgaggcaagcctggccaacatggcgaaaccctgtctctattaaacatacaaaaattagctgggcatggtggtgggtgcctataatcacagctactagggaggctgaggcaggagaattgtttgaacccagggggcggaggttgtaatgagccaagatcgcgccacttcactccagcctgggcaaaagagcaaaactccgtctcagaaaaatgaaaagaagaaaagaaataacatctctgagaatgatataacttcattggctagaaactaacaggtgcacagcaactctcttaatgctgcacttgtataagaactg

SEQ ID NO: 317152 - DNA, 4001 bp, Homo sapiens
agcaggaacctagtcctagagtctgggaccagactgtcttgcagatccctctatcccagcacctatgccagtgcttggcacatgggactcttgttatttgaatgaacaagtgaaaaattgagtctttgtttactccatgtcaagctctgagtggtgtagttcatatgtaatcccacctgcacctactcttcagaactgtaaactggagggatgacccccaatttatagacaggaaaatgctcaaggaagctaagttacagctcagactgtctgatgccaaagcctaatctcttcccactactaataacgtgcattcagatttctaagtctttctcaccagcttttcacacaattaattaccatggttaatcacaggtattaagcctggagcttaaatgtttcttgttggaactcaatgcataagcaaagcaggaaaaacatccagaagctcaaacaagtgggtgtaattcatataccttccttacttacagatccttgggtaaacaagtgtgggtgtgttagtaactgtcagatttgctgggttagaaattatttagaaaaagggcacacaacctgactctctaggaaataattctagattcagctgccttaaaatttttgttttttaatagtttgtgagttgttcaggcgttattgctctttttcagaaaaaaagactagaaaataattctagatccagcggccttaaaaaattttttttaatagcttgtgaattgttcaggcatttttctcctttttttggtgtcccttctcttccttgctagcatggtttggacgagctcacttgttaaaaaggaataagctggaagagtcaagaggagaggaaactagggaagttgcgagcacctttgcaaaggtgtatatgtatatacatatatatatatatatatgtgtaagggaactatatatatatgtgtatatatatagtagttcttaccatgcctttcactgcctcccttcccctttactgcattatcaggtaaattaaaaagctgctttccccttggtacggcgaaaaccatcatttcaatgtatctacatccttccagtcgctccccctacccccttccctacttttatcggggccttctgtatggagactgcagaaaacccgccagtgttgcgaacacttggcgaagggcaaggagcctcgcccagagatttcacggggctcaggtgagaagcagtaagaagagcctgcaaacgagtgctcccggttccaggtttcctctccagtacggctctcgccttaagcagccagagtgactgcacagcgagtcagacaggctcatgggtttggagaccttttcatttccaaggaagaggagagacgtgggcggcccagacttgcccaacgcccacccccgcggccccgggcgcccaacctctcgcggtgctcgatccccgggagccagcgcagggcgcagcgcagaactcccacgggccccccaggcagacacgccctctgcccaccgggtgacgtcggccgcagactctggaagggagcctgagtcagaggaaacgtccttctcagagggactcgggattcttcccatagcatcctgagtttccccgtcccacacgcagcacgcggtaatttacactggtcggcctcgcgaatcgagtgggagtcccacctgccttattccactcaggttttccagcacagcccgaatcgcctaggcacccataaataagtgttgaacgcctggctggacggccgactgactgaatgaatgaatgagtgaacgactacgtttagagtcggtacagcccccctttccagtctccgcaagtgtccggggaccgcccacccggtctcttcgccacccagctgccaggtccctcggctcagggcagacacaaaccttctcggcagggctctccgggcggcagcctcacctgtgcccccatggccccgggagcgggcttccggaacgcgggcgcttgctcctcacctgggcctctccacacgcacccgcggcgggcggggctgcggggtctgggaatggggcgccctgaccccgcccccggggcagcctccgccaatgggcatggccaggcggggcctcagcgccagccgagccctgctgcccggggcttgttgcgaattctcagggcccccgcaggcctgggagcggcctgtgataactggtgtatctggcaggagtagcagctgccccttggcgcgactgctggagccgcgaactagagaaacacagacacgcctcatagagcaacagcgtctctcggagcgtggagcccgccaaggtaactccgggaattgagtggagtggaggctgcactgaggcccccttctggctcctctctggtcgaaaaggctcccccgctagagagagccctgctgcttttggaagccttcaggtgttagttgctttgcaccgaagctgctgactgctggggttctgcgccgattgccaggctcaagtttattttgggggctgctgagcagactttgcccttctgtgctgttatcagcttctgtcgctgtccgtccacgcccgctatatccatccactctccgttctgtctccagcaggcaactccccctaccctgccccattttctgggtcataggggtatttgaaataaacctttaagggaaaagcaatgccaaaactggaaagacttatttccacgaattattaataactaatgtttatgatatccttgttataccatacatatgcaggcacattatgtattaattaaatctcacagcagtctattaacgctcagtttacagatgagggattagaggcaaagagtgaggttaagtaaccaaaccaaggttggaagacctgatagcaggtatttacaaaacaaggagtgggcagggctggcgggtggctcacccctgtaatcacagcactttgggaggttgaggcgagtggctctcttgagtccacaagttcgagactagcctgggcatcatggtgaaaccctgtctctacaaaaattagccagatgtggtggtgtactcctgtagtctcagctactcaggaggctgaggtgggaggacggatgacttgagcccaggaggtggaggctacagtgagacatgatcgaaccactgcactctagtccaggcaacagagtgagaccctgtctcaagaaaaaaaaaggtgaggggtggggtagtgaacaattcgggctcaaaccctcaccagggagaactggggtgcctttgtgctctggcattttaacactgaggaaaatattctcatgtactcaggtagcctttgttctaagtaggcatgaacagtgctattaattttattacctaagagtttcatagcagaggcctcaatcttgtttttcttgttcttaggcggatgagagaagagctaagaacaaattagtcaacataccagtccaaggcacccacttttataatacatatggatgactttgcagagaaggaacaccacggagagtggaataggtgaaagttgaaagcgagggagatttatgccaattttccataacaagccttaaaacttagacttctttttgtttgcttgtttgtttgtttggcttggtttggttttttttgagacggagtctcgctctgtcgcccaggctggagtgcagtggcgcgatctcggctcactgcaagctccgcctcctgggttcacgccattctcctgcctcagcctcccgagtagctgggactacaggcgccccccaccacgcccggctaattttttgtatttttttttttagtagagatggggtttcaccgtgttaaccagcatgctctcaatctcctgacctcgtgatccgcctacctcggcctcccaaagggctgggattacaggcgtgagccacctagcccggcccaaaacttagacttctatttaaacgttttctttggatttccaacttaaaattttgtctttatcaaaaattagtaatgatggtaaacgtgatctatggtgcttattttttatttaaca

SEQ ID NO: 317153 - DNA, 4001 bp, Homo sapiens
gccccggctcccctgcccgcgcctcggcccctgcgcagagttgccgcgggtagggccctgctcggcctcaccaggagggctgggcgggcgtgcaggtcggagtggctccccgcggcctaaaggcccggtcggccgagtctgaacagcagctccgcatcctccaagcagaggccctgaagtgactgcattttgagtctctgaaatttggaagaaagcatctctcccaggcagggtcgcctatgccccggcactgggggcctaagtcaggaggagtcggggcaggtgccctccacagagctgcccagcggcagccgcggcctgctctccggccaggtcggaaccgaaatctccggtaagaaatgaccaatcgctcctgtcagattcctccagggcgactggccacctggcatggaggccagcaggtggtctgggtccccgcgaccctcagcaggagtaggatccgcccctagacgaccgcgagcgccgtcccagccctgccccgggtgcctggcccagatgactccccggctgtagtatgcgcgcgccttcccggcttcagcgggatcccggccttccgccccatagactccccgcaggtggaggctctgagcgcagccgccgcagagtccgtagggtcccctccactcagccggatttgttcgccctccatctcggccgacccggaagaggccccgcgcaggtgcggcccgcagcctccaggcgcagagccggtggccgcggcccagcccggtccgccccgcgctgtcctccctgtgcttcagtagggccggaaagttggagggaggaggaggggacacaaaaagcaatcaggagcaggtcgaatgcaattcgcgatcaatagcggcccctaataagtgtaataggttttaatcgagtaattatccgaattttgaccctataatttagatgttcggggggagtttgcaaggtgcttgaaagagatatgcacgcgccgtaatgggatatcgacccgaccgggggcgcgggccgccccattaccggccgctttccgccgctaagcacatttccccttaactgtaatcgaagggatttaattgtttttccagcgataaccagcgttttgtcacaattagtctgatttgtccaaaaaaaaagagagagagggagaaaggagggagggagggaggcctcgggcgggcacagtgggggcggggaggtcacgggccagccaccgcgagcggcccctcgcctcctgcaccaactacccttctaggccggagacgcgcggaggcgaaccctggaccggcctcacagccctgcagcccctgggcctgacccggctaagcttctccagaggagcctggcgatgcaggccctgcagtccgggtcggatggaggccacgggtgggctggtgcggacccggcgctcagcgaactttccacggagcctcggcgtgggccagacccaactcgccacggtgtcccagggtcgtaaacgcatagaagcctccggtcccccgtccctgcgacctggtgccgggcgcatcctactcactcggcggctcagctccggcggctccgactcccccggcgccggcgagggcgcggcgctccagctcctccgcgcgtggcgggcgtcccgaggcggcgggtgcaggggcgcatggggccgaagcgcaaggggcgcacgcagcgggagccactgggcccagcagcacgcaacgacgcctcctgctgttgaacttgttggggtccaggatgtccagtaccgagaaggaggtggggcgcaggggcgctgcgggccgggccgctccagccccctcgggcgccgcaggcacagtgtcgctggccgcgagcggcggggctccagcgcggggaaaggccggcagctcggcgcgcccgtccatagcttcctgggcagcggcggcgggagcgggcggtgcgggccccgaacctggctggggaggcggcggtagcgcgggaatgtccccaggagcctcggggccgctagcgctcatgccggcctcccgccgctccggcggctcgggccccgccacctactgggctcccatccctggcggcccccgcacctccacacgaccccgcgcaggcggccgctgctccgctcgctctcggcgccgcgccctgcgcttggccggtgctgccttcgccgccgccttaggcgcccgcggcgcccggtccgcgcatttatggcagccccgccggaggcgcccacgcgcccacacgccgaacacacgtgcgcccgcaggcggccgcggggctccgccgccctcgttagcgcgcgcgcctaattggctgcgaacggtcccgggccgaggaggcggaccccgcacaggacacacggacggagccgccgggcgggacgaacagacacgcagcccggagcccagagcggtccgcaggcggctgtggtggtcagcggcgcgtcgctgcgcctccgctcgtccggaaacggcgcgccagcctccttggctaagggggaggagacagccccggcttttaaataattgcgggatcaatctgcggcggggccgcagcgaccccagggcgcgcgggccagcgagcgccaagagttggctgggacatcccggcgcaggatgcggtgactggcctggcctctcctccgggcccccagcgcgcagggccctgagctccgaaggctcccacagctctggcgcccctcggcagttggggtggggatggggggagaggttctcacgcgcgattctccgagtctccgccgggtctgcagccccctcccgcgcgttccgtgggtctcggtcccgcctctctcacttgctcccgcttggggtctccttttgcgtctccagggtctctcttgctcagggtctgtgcccctccatcccttcccacgcccgcccctttcacgtcgtcaaattagggcccgacctggagtgccagcagaggggcggagccggcggtccccgggccgctcattagaagtggaatcgaaaatgagagactgcttgtccctcttaacccgcccccaaaagggggaccgacaaattgcacacacagcaggcggcctacataaaatcgatcctcttcaagtaaggagaaaatgtgtgtttcttccaaaaagaatacgacaaatgcccccttctccacatctggataaataggaagccccgcggcctgagtctttatttgggtacgttttatctacagcggcggtgtttgcaggacagggccctgcggcccgcggccctcggccctcgaggattgggcctggcgtccggagtcccagtgcgggatcgtggtagctccccggcgggtcgctcctctccctcctcctcctgcccacgcagcgagcagccagacgcaggtggaccctggtgggcgccggcagtgcgagcgcgcgcgcttcttcagggtgtgagcgcgcgggcgcgtgcaccggcgggtgtgcgcgccgccttacactgcggtccccggagcctgttccgcgcgcagggcggtcctttgcaattaccgcgggcaatgatcctttggaagcagaaattaaaagttgggagaaataatggtggaccgatcggctgtaatttgggccaagctcggacacgctgagccccagggagcctggaactggttgggcggggcggggggggggcgcagggcttcccgtccctcttcccctccccttcccctccccttcccctcccccgccctccccgctgctggtccatcccgagattctaatcaggtccacagcaccgtgtccttccttgccaggacttgattattctttatctttaacttataaatcacctctggggaaggagggtgggtaatctcccatcgcagggaggcaattatctcctttgcccacaccttggtcttcactctctccccctcccccagctaaatttggatatagaggtgcacacgccactcacacacacactcgttcacaagtgcgtagcacacacaagcacccagcatccgttcacgagcatccgttcacgagcacccaggca

SEQ ID NO: 317154 - DNA, 4001 bp, Homo sapiens
gccaacaccgtcgtcctcggtccttgggctgcggtcgcctgcggaccccggtgggaacagaaacaagagactgtcagcgccacagacgaggtgaggccgggcctcaactgcaggggtcacgggagtggggcggaaatacactttgatcccactcaagcggagcggaggtctgggaggccctgggcccgggagaccagtcttagactcttgccccactgggtatcccatctaggcctcttctggggagggcggcagactcagccgctgtgtcaacgctgtgttgtcgagaccagctccccaccctctctgggccccaggctcccctcagtaacttggggcactcgacccgagcatccgcgaaagccctcccggctctcagcgttgagcattgggattctagactgcatttccgtctctctgcttgggttcacgcgcctctccacacttagttcacacgcacacacgcgcgcgtcctcgcagcacacacttgtctggtgcaggtaagggaaggtggaggcggatcctggggccaaaggtatttagaatctttcaccctcagccgcctgggattgctgtgagagacatggaaacaggctgagccgaggccttagatgagaggatggactggagagtaaagagggagggttgcccctgcatcgagtttttggaccctgatcccacaccagcttctcggtctcgtacccgcccttccgaagaactccagcagaaaggtccagcggtcccctgtgcttgaggcctacagaagcttgtacccaactagggcaggcacccgggtcttccagaccacaggacaggacaggccacggctgaggaggcctctctcctgcctccaggatgaactaaagacccaatccgggatcttcggcctagggctgctctcccagacctggggtctgagaaagccaaaccagccctttccccaaagctctagttctgcagattctcagctctggcccactcggaggtgttcttcaccacctatccacctactgtggggcccggccctgggaccttgaactggcaggtctctggtccagagctaggtcactggctacctgaggtctctgaacccctcacttttccgcttccctgattttggggatttggggacagacacggcagaaagcactggcgacgaactcaaaaactcccgaacgcaaggggcagcggttctcccaacccagtctaatgcacattggcccaggatgtctcaggcctcaccccaggacgtagggctctgaggagctactccggtctctcgcgggctcagttcccgaagtgatagagcagctcgcgccagagcgcagaacttcgggatttggccagcctccgagccccagggcgcagggtgctcaagccgaccaccccactcggcgtggttgccctccgcgtccatcccctcagcccggcccccatccccgcgaagccgcagcagacctgagacgctggcggacatctcgctgtcgctccggcccgcggcttcctcctctaggtctttggaagcggccagctcacagaccggctggccgaggctcaaggatccccccgcaaggccggccccgctggccccccgcgcgtccgcgcagcgccgcctgctctcgttctcctcgctgagcgcggagtccgagtcccagccttccgggctctccgcagtccgccccgcagctgttctggtaccggcaggagacgccagcagagagtcctcggcgccccccaacgcgcccgcgtccctctccccaaagagccgccaacagcagacagcgggagccgcggccaccgatgccgctgtgcccccgggcgccgggcgcccctctggcgcggccagcccgccgcgctcctctttcttgttgaggatcgcctggatggagaaggacgtcaaggtgttggcgccgcgcacagccatctgcgccgcgggcaggagcggccggcggggcgggcagctggggcgccgagcagctccgagcgggacagagagcgccggcggccgcagcgcgagtgagctgggtgtgcgaggccgccgccgcccactgctgcgcggcccagcagctcccgccccactccgtcccaggatcagcgccgaccctcgcccccaccttagaggcccaccccgcccggagaccccctccccccgaatccagagccagacgctctcctttcgcagctcagctggattatctcatcgcttctcgcccttaggggcgggctggggtctgccccctcgggggacgtgaaggaggattggcgggggcccctccgtggcagcagtcccctcccgagcgccgccggggcgcacagcccgagtcactttttctttgcgcgtctgtcccttcctcgcctgcaggatttcgctcctggcccgtcctccccttccctgctgggcaggctcttccggagcccacccccggcggcggcggcggtagccgcggccgcggccgctggattccgagaggcgcggggaacttttttaccccctgccctggttttatctgtttcttttctctttccttcccttgcgttccactgtaccacccccctcccgcccgggtgtcattcctcactgctgagtgacagcctgaggccacacccctccactgggctgtcccgggcgctcccggccgtccattggctggctccagttgggcgacgttgactttaacagacaaaactgggcacgttgcgccgctaaagacagggtctgacttaaccccttctctcctaagcctggtcctcgaagcaccctccagcaacaaggaggctcatccgacccaaaccacgtttcttacctctgcagatgtatccacttattccagcgctttaacagaacactgatactaagttgagtcaaatctgcggagaaaatccaagataatgcagttccataaatcatgctcgtagtttctgttctctaggaaggattataaacacgaagaacaaaatgcatccttttttttctccctacagtttcgccgcttcttcattgctaatgctctttgctgaaatgatcagttaattaagatcactctagaaatatttttctttcctcgtcgtctttgatttgattcgatttttatagaggaattataaaaaaatggtatagttagaactaaagtcaggagaagaattgaaaggcatctttgggagaatttctgtaaattttatggtcgtttccctggcagaccaatattgaatttaattggagtttgttaagttttgcatcaggaagaaaaaaaaaactttcaatttgttttttttaaatatctcttacttgtgagttgaataaaattataaatagatatgtttgtttgcttagaagtatacctaggaattaccataaagtgatccagaagtgacaacactttttgctctttaaaaaataagaaatgcattgtattatgtaatagtaggaaccaagctaagaaacacaaatattgtgggtatataaaaacattttaaaatgtgttattccttttttaatataaaatttgctcaattaacgtacttcactgttttccataaactttaccagagagttaacaccaaatacacaaacttgaaccattaaatacatttaaaggactatgattttaatttattaaattgctaggattggtagttttggtgtcattaaaataaataacatctccccttgttgctttctttttggttgttctttttctgcaccgcagaaggaaatacactgactattcatagttctcagtctcagaatgaggttttgcagcatctatacttttcagcatttcggttacatgatgctttcttgctttgtgcaaaccttgtagggtacctgggaaaaaacatccacttgaggtcattgccctttacagctctttacaattacatcagttttgaaggaacgccatttaaatttggtgtcagtgctcagcaagtgtaaggacgcagagtggaacagcagaatgcttacagtctttcaaaaacagtgtgtcctctcctcccccgct

SEQ ID NO: 317155 - DNA, 4001 bp, Homo sapiens
taactagatttttttttttttccttcaacgcttccctaacctgtgtccaggcaacaaaggggtccttgtttttgcacacaagagagctaaatcgcccccaagtctaacgtcgctgcagccgagggggagaggggaagggggagggggcacagcctttgttggcggcccctaatacggccatcaaaaccgatacaatagcgtctccctggcacccccaccaggcccggctgccacagtccccgggcttcccaagagaacctccacttggctttcgcaacttcccgcagttactgccgctcagccgcactaaggaggtccggagacttggaagaaacttcggagactcgctgaaaggcgaagaactgagcgagaaaaggaccccaggctgggccctgaagtccacctggaaggctgggagcctccgcggcgctgcggcctactaccccgaagactagcgtgatcttggggcaactcagtttgcctcaagcaaggtctttgcgggatggtacattttccccaggccgtgtcccttcatctcactcttctcctggctcgctcttgtgttagggtgttgagctccacgatgtccccaaatgtgcccggacgcagcgtgtgccagcccccagagtggaggcaggtgggaaagcgcgggcccagcgctggtgagcggctggaagcgctcgccctgccctggggacgctggactgtcttcaatgggctcacccaggccgagtgtactcgggcggcgagggcgaagaggtgaggtggggacaccccaggcggagacgtgcatgcaaatacactcacttcccgggcggtggagggctcaccgctgccgggcctcactgcttcgaagagaggcagcgggttaggctggcgaaggcggaatggggcgctggacgacagggaggagccgggaaagcagagatgcagtggcctctcctcccctctcctccccatctttctaatccaggccaggcctgcggtcctggccaggccgtttcaggaacagccagggcctcggacgagacacacgtccctcaccgcgttgtggtccacacgaacacacacacaccggctcagcccaggcgtactcaagacttagagagagggaggcgcttggatacagccacgcgagctcagaaaagcgagaatccctttctggaagccctggcccaacctaactggtgtgattccggcgctgtcaaactactggggcgggccacaggatggactgagcggcatgcacaccaggggccgcgacccgggagtgggcagaacaggcacggcaggcaggcatcggggcgcgggtggtagtactcacgaggggtacaggccaggcgtgcgtccctccagggcgggctctgcatcactccgggccagaagatgggcgtccggccaggcagctcagccagcggcttggggtaccggcccacggcggccacggccgcggcgctggggctgaagtagagcccgggcggcggcggcggcgggctcaggctgctaaagcgtggcagtccggccagcagccccgccggggatgaggcggcggctgcggccgcggcagcagccgcggcggcggcagaggcggaggaggcagaggcggacgaggaagaggaggaggaggaaccggagggcgaggcggagggcagggcggcccccgaggccacgggcatggagggccggctcaggatatcgttgatgccgtgtggggtggcggccgagagctgctgcggggggctgccgagggatgagagcccccccgtggccgggggcttcaggccgcctgggttgtgggtgcccagaggcggggagggcgacgaggaggacgacgacgaggacgaggaggagggggggccggcaggcagcgggggatacgcggcagggtacagcggggtcttcatctcggccatgctgtgcagggcggccaggggagggctgctgagcaggaatgcgctctgccgggtgccctccattgcccccaccgctaacatcccacggccacgccggagaccgtagccttgcagcgagggcgctggctggtgccccccgcggggctcagaggagccggaagcgccgagggcgcgagcggagaggcactcggcgcgcccggaggcgagctgccaactgaaccaaaaatgccgctgccgggagttgctcgcctagctgcgcagcagagatgtccaaaccctccacgcgggaggcggcagctcgccgagaaaagcaggcgtcccggcgggctaggcagtcctttcgttccgcgagtcctagattcgatccctggctattctctcttcctcacttttcctagctgttcaaagtgcgctacttctcatcttctgcccccgggaaataagcaaaacaaaacccaggctggctccggagagtttgtagcaaagttagttgccgaatctccactttgaagttggagggtgggggtggcttgctttctttggggaggttcaaaggacgccttgtgcagcccgtggcgctcctctgatcttactgggatgctctgctctttcggtcgcgcggctgattcgcattcgacgctcactgtgcccggggagaaagcgcatccagcccgcgggagatctagcctctgtgcgggcttcctccgcccacgctgccccgggctgctgcgccagaaagggcagtgccacggatccccgcggctcccaggtcctcacctccacccgccttgccctctggcccacggggcactggagttgcaatattgaaaagaaaaagggggaggaaaaacacagaaaaacaaaagactaagtgtgaaaagtctgacggctgggtttcggcgccgctcgtcagtccacttctgcaaacgggcccggcgacccccgccccacccccgctccctctctccctctcactctcagcctttgactctcctctctggcattttcttcgcggcttcccaggcttcggtcttctaagtcctgtcctctggccaaactgaccctctccgcggctcctccgctctttctctcctttcctctctccctccgggcctgacagttcagatgaagctctcaaaggtaataaaacatttgcatcactccctacccctctttagctgggggacgaaagggagggggaagtgggggaccaaaatgagaactttgagggacgtcactccgaggctgcgggggccggcgagccgggcgcaggccgggggcgtaaccaccgtgtccaatagctcgccgcctcgatccttgcgtcgcccctggggctcgcccactcgggggcgccgcaccctctgattggctgaggcgggccaggcgtagggccgcgcccgcctagtcccctcccgctccctacttctttctcctgtgggcggggccaggaggggcgggagctggtgagtggtgcggttccgcgctggggccagtggccgcctcaattaattgtgctaaataaaatgagaaaggggagggggaagcagagacgaagagggtattactttttaaagagaggaataatgaaaactcagcccttttatggaaaagcagttcatattcttcccttgcttccccactagcccgctcgcgtcatcctatccccttcccccaccagctctggagggcgcctcacctcgaaccaagtctggtcccttgtaaaatggagctaatggagcaggcagccggcgcagccctggcctggctccttcttttgaagggattaattaaaggccatctgggctctcccagaattgtgtaaattaatttgttgctccttaagccttatagatgtccttaatccccttgtaggccaaaggatcgtcctcttccatctttccacctcctgctttccttttctgttctttctcctccactttattttttttttcattcccgagttcccccccgcccgtcgcttcccaccgcgttcattatcatttatgggttactcaattcgctgaaaactgaatccgtttaataggaatatttatctgtcagatgatgtttatacctgagaacagtgag

SEQ ID NO: 317156 - DNA, 4001 bp, Homo sapiens
ttttagtattcagagcaggtctgaaggggaatgaagacacaaaagggcaatctaggggcctctgggtagtaaaagaagtatctcattcttttacttgaaaaatattggggatgtttatgagacgattggtatgtcagcagatatgctcttttggaaatataaaccaagactcatctcttttaggaaccagctgctgccttctacagttactgttcaatcaacagcagtctgaaattctccaacccaccccaaggcagttatctctgatgcaaatttcactgcatgcaaaattcactgcaagcatatagcatgcaaatgcatagaaagccattttctttacatagcaaagtcagttttcaaactatgcttatcagcatccttaagaaggcagataaagattaccatcctaagttaccaataatatatttaaaatcctaaaagatgaacatttaccttgggggaaagtcatgttgtatcactactggctatgtggagaaggtttaggtctgctagcttctgactgcctggatttcaaagccaagttatcttgcttttcaagtaggggagtctctctttctgtctctctctctctcacacacacacccccctccaatgcctcaggaaaggacaaaatcaaaacaatgagaggagaataataaaaatacatagattaggaaaagaataatggtctctatttccccatctctaattgagggctggactacaggctctgcagttgtgattttaagtacccaacgttctgaacaatgacacaacagtctgccacttttacctcacgacaggagagcagagggaagctaagagaaccttctgccaagctagaaaatgtatagccaggcagtggttggcaatggagggaaccctgacttggggatgaatgacggtccccataaggcacctgcaaacgtaagctgtaacccttagagaacccagaaaatgatatctcccctggaacgtttgcgttctgctcggctatgtctccaaagcttcagatctccttccctgaccttgcgtttcctatttcttccctctaagccaagctcagcatgtccctattgttatcaaatcacatctgccatcacttgctgtagctgtcgcactgcctgaaagcctggcttgcacacttgcctctccgactttatgtgatgagaagttctctattccttttcctgatctagtgcctgaaaaccgataaggcacaaagcccactccttcccttctaagcggttagcgtggggcccgttgtaccgctcaggtttatctcagcataacactagctcactcaccaaagaggctgagcactcgccaagtttaccttgcctcagcggatgaagtatcaaactcactcttgttttgcttcaaccatcaatctctccaataattgcaatcaaagggaaaacattttaatgttcactattttagtacccgtttccacgggccggggggtctggaaatcccgaggatgagggaaccctaccagtctccatctatcgcagccggcccggcgcagggtctccgctgggcatcaacgagcagggcctgggtatttcggccctggccgggccccttgctcctacgtcgctagttgccctggggaggcgacctgtgcctgggaggcgggaaaccccgcggcaccagagaagccaagtgaagtcccagaagccaagtaaaggtgagagaaagagggtggaggagagcggtgagtggagccagagagaggcgcgcatggcgtggaagcggccgggtgcggggccgtcttacctcggcaggcgcccgcgcaccaggcgagcagcagcagcagcagcaggagcggggacgccgcggccacctgtccggcgggcgacctggggcggcagctctctgttcgcagcatctcggcggctgcgggaggctcggtgctagggacgctgcgctgcgccacgcgtagctggtgctccacctggtgccctggctgtgcctcggggcccggacacaggactgagcgcccggcgagccgccaacttttaaatctcgcgcacaagtgggctgggctgcgcggtccccgccgcgcgtcacctcgccgcctgccgcccccggcctacctcgcctcaccccgccccgctgcctgcccgcgccccaccctgcagcaggacccgagccccctagcctgagtttctgacccgagtaccacgcattttcgctctgggataaagagaatggaatttaaataatgcaccattcccacctttggaaggactggactgggaacagggtgtggatggcaaaccaggccgtctgagtttttaaacttggtagtggcgacgctctctggtgtcctgggtctacgtgggacaccctttctccttcacctcttccagagctccggcagtcactagtacgcacctctgtggaagcacctctgttttgttccccggtttatccccagttccaagcgcaatgcctggtgcatatcagggcagtgttggttcaactgtgatgttgatgctatcgaccctcccccaaattcctgcaaaatcacagaccccttagggaaatgcagttgcctgttaataaaggacaaagaagaaaggactgctggggcttgaccacacacacacatttctaactggtctggagcgctggttatcctacggatttccaagcctaaggaaactcctttttctatgcatttctgctgctattgcatcctgatttctaccgtgacctgactccctctttccatctctatactttcctttatttccttgattggaaacgttcaggaagcagcctcttccaggacaccagctaatacatcctaatttccttctatagaaagagggaaaactggtctttattattattattattattatttcaagttacggggttacatgcgcaggatgtgcaggtttgttccatagctaaacgtgttccatggtggtttgctacacctatcaacccgtcagctaggaattaagcccagcatgcattagctatttttcctgatgctcctcctgcccccgcaccgcccctccccgccccctctcccccgcgccataggccccagtgtgtgaaaaccggcgaaaaccggtcttatttgacctccctttgaaaggtgaggaacgctgaggaaagggcaggaagtacattaacatttttgaaggggcatttttgcgtcaggcattttctcatgctattttatttaatattcatggcatctctgggatgtaaaagtactgaaattctcattatgatgccaggagagattaaacaatctgctcaaggctgtcagcatgtaaggaagccactggctattctactccaccaagatacttctccctcaatcaagagttttaatgtatcaggcacatacagttcaacctactgtaaacaagacccgagctttggggatacaagatttagtgacagttacaatttggtaaaggaccctaaacccttactcaaatagctgaattacaaggcagattgggatagtgctctgtcagaaatacgaagagaggcaggagaaaacctgatagattaggtaaaaaaaaaataatggccaccttctttaagttctttatacacaggaagcatgtaagaaaggctggattttagcgtctggtccaagttcaaggatgggtgagaaaatactggattcaaggttcttgtactttgatttattaccaaagtagtaaaaaaaaaaaaaaaaaaaaaaaaagaaagcacaaaggatgtaaatgacctacagatgcaagcaagtgaacatggctctgcttccccgtgaccttcttcctggtgtctcccagaggtgctctgaaagatcaccagtcccagcagccagtgtgagagtgaaatgtcagccagagcagagaagcctcaaacagtgggctcaatgttttttatatccccagcagctcagcaaaataagcaacttgtgtattaaaggtttttttttttcttttcctgcatgaaccaggctgcttggaatgttcttg

SEQ ID NO: 317157 - DNA, 4001 bp, Homo sapiens
aggtcaggggtttgagaccagcctgaccaacatagtgaaaccccgtctctactaaaaatataaaaattagctgggcatagtggcgtgcgcctgtaatcccagctactcaggaggctgagggaggagaatcactggaacccgggaggcggaggttacagtgagccactgcactctagcctgggcaacagagcaagacaagactccgtctcaaaaaacaaaacaaaacaaacacaaaaattagcttggtgtggtggcgcatgcctcgaatcccagctactagggaggctgaggcaggagaatcacttgaacccgggaggcggaggttgcagtgagccgagatcacgccactgcactccagcctgggcgacagagtgagactctgtctccaaaacaaaacaaacaaacaaaacacaaagttcattaggttcagacagtaaaaaggacgcacactttctggaacaatatacaaagaagttacaaagcaaatctccagaacaggaactttgctttgttccctggtctatctccagtgcttagtgactgggaacagagacgtgctccataaacacttccattgaaaattactacaacacatcctcaattttccctagcagtaagctgacacagaagagaggtgtgaccagagtggggagagaatttgtaaagggaagggtacaggcagcccgcagtggacattaagggaggatgtactcggtgcctcggccaggaccagacgtccaccttgccaggaaacgaagagggcgagcctcctaaaactcacctggccaaggggagatggtggctctgtcgatggcctcggagcccttggcagtgcagtaatcggactccaggagcgtgttaaagagagtggatttgccggcgttggtggcgcccactaagtagacgtccccacggtagcgccaggagcgctgaagggcagagatcaactcttccactccatagccggtcttggcgctgatcagccgcacgtccctgaccactgtgcgggaccagttcggcggattcggattctccccgtcctgtggctcgtccttgacggggcgctgtggcccttggtggccaggggccagcaggagcccggcgcgggcacagtcctcccacagtcgctcccgcagcctctgccggtagccaggagcatcctggggcaggaggtccactttgtttcccagcacgatcagctgcttggggcccaccagcgcgggcaagtcgggcagcagggcgtcgggcaggtccagcaggtccaccatgtagagcaccagggaggggccgggccgccgcaacgcggcgctcaccagctccaggtactgctcgcggctcacctgcaggcgtagagcgcgccggtggtgcgacagcagccagcagcgctggcacacggtccgtgccagcccgccgtctgcctccgccgtgcggaggaacttctctcggggcaggtagccgggcactccggcgtcctggcagtgcagctctgccccacagcccgagcagttcacgccgctgggcggcaatgccgggtccgggtgccccacgaccgggtgctcccgggacctggcccgtaggttttgctgtcgccgctcctcccgccgctgctgcctctgtcgctcctcctcctcctgctgttgctggagctcctgcagctgcttttcgcgggtgggttgcggctccggatccaggatgtactccgggaacagaaaacgctcctgcatgtcaccaccttctccaaagccctccgtgtccacggggtcataaggaagctcgcgtcccagactcgatgagtgctggaaggaggaggcggcagcgcacctcctctccaggagcggctcccggaggccatggcgcgctgccgtgggagcggatccacgaaggaaaaggctcagcagcctgaacggtaggcgagcgggcagcatgaggaagtagctccaaaggggcggagccaccagcgcgcacgcgcactagggtccgaggcgcgcatttgacccgagacgaaagcgcgtgggtacttgggagctgtcctggttggttttgcgtctaatcccgtcagttctcgcgatttaagctctgagactgagaacctacttaaagctatggcaaaggcactggaggattgagctaggtgggcagaaaagagcagtgagtgttttgggttttttcactttcaggcttaacgcctcactgctagcacaagccgcccttaataaatcacacttaaaaaggagcttccggggtcgggcgcggtggctcacgcctgtaatcccagcaatttgggaggccgaggcgggcggatcatgaggtcaggagatcgagaccatcctggcttacacggtgaaacccccatctctgctaaaaatacaaaaaattagccaggcgtggtggcgggcgcctgtagtcccagctactcgggaggctgaggcaggagaatggcttgaacgcgggaggcggaggttgcagtgagccgagatcgcgccactgcactccagcctgggcgacagagcgagcctgtctcaaaaaaacaaaacaaaacaaaaacagaaaggagcttccggccgggcgcgtggctcacgcctgtaatcccagcactttgggaggccgaggcgggtggatcacctgaggtcagcagttcgagaccagcctggccaacgtggtgaaaccccgtctctactaaaaatacaaaaattacccgggcgtggtgacccttgcctgtaatcccagctatttgggaggccgaggcaggagaatcgcttgaacccgggagacggaggttgcagtgagccgagatcgctccactgcactccagcctgggcgacagagcgagactccatttcaaaaaataataaataaataaaaataaaaaatagcttcgtgttttggtccttataaaggcaaataaattgagcatcccaatgttgcggattcacaggacgaacactttttaataataagtatacctggttttgttttcaggtgtcgttatttgtgcaacaacattgaaaaacaagcagaaataaaacattgacggaacggatacgaccgcagattgcgggagctgtcctctcaatcagcccggcagcggcggcccacaatttacgcgtgtgcaaccctaaccccggcccaagcttgacctacaatttgcgcaggcgcagatcctaactttggcgtccctgtgggcggcctttggtgtgagacgcgtggtattctgggaacgtcggagacggaagttacttcgtctttagctcctggcgctgctggcttctgggcggtttttgtcttttgatttcaagagttaggagctcgagaaccgtttggcaatatgtacgacgcggatgagggtaggtgaacgctcaaaacacacgccgtggcggtccatttaagcaggaaagcgttgggaactgattggattgaggatttggggccttcccatgcgccggctgcacagtccccagccttgttcccacacttaccaggccgggaacgaaactggggtagggagaggcggagggtgcagggaacatagtgttaatgttccaggttacgttcactgctgctctctgcactttctcgttccgttagatctgatcctcgtttcctgtggtgaagtagcgtgcagaatcgtaagataaattacgttttgaatttgaagcaaagggcaccctttaaaaattttccttaaagccacagtcgacttaacgaatagctcaattgttgagtgtcagcctgtgtcaggcagtgtggaaggtcctggaaatattccgggacagagaatatcggggggtgggggtggcgggggggactcggtttagtctgacatttcttcatactgtttgtaagtcaaagtaaattgtcttaaaggatgacttttaacttcctcttctcacaatgtcacagttctcagatgatatgtattctgctgcactgggccaatgtataatacctgtttgtttgcgcatatggaattcttagtagtggccgagcgcggtggctcccgt

SEQ ID NO: 317158 - DNA, 4001 bp, Homo sapiens
cccacatgaaaagacccaggcctcctgcgccggcctcacggcccctacacgcgttatcaagcttggagtcaactggacgacctgctgtccctcagacagctgtgagtgccacacttcaccataccgggacaatgtgcctttgcatgtgtgtcctctgcccaccctgggcccatgaacagctcactccccttgcaaaacttgactgtaactccctctagaagaatttttggactttcctaactattacactttttcctgaccgggatctcctaaggcactcaggttccatctttgatttcttcaaatatttgtgtttcttccaagggccaagcattggagatccaaaaaggagcagcaattcccgtccccgtcccaggccttcagcacagggcagggaggtggatctgctcaataccagaagtttgagcaacctgtcctatttgggttacatagcttgggtggtgaacctgagctggccctttagagactttcggaggtaaggcagaccttttggacaaactgagttgcaagaggcgaagcaaggacaacagccagactgtgcgggactcgaacgacaagccaagaaggttaagaataacagtatttagagaacacttgctgtgtgctctatgtgctatcttacttaattctcacaaaccaccacgaggggtaggatgtatactatcatctctacttttgaaatgagaaaactgaggcttcagtggtgaagacaaatgtgtctcttctagggaaccacactaccttattctcccaccccggcccgggggtgtgtaatgagggactcctatcgaagtcagctgtaagtctatcttgcctattcattatacaggctgtcgtcttcgcgcagtaaggataatatgtgttttgattcaaagaccatccagcttgcacactgtgatgaacagagatcaggagctcatgaaggcaagggcaagtcttatttacctttatctccccgaacctagaagcgaggtcaaacagaagcgctcggggtagcaagaaggctttgtagatattgaaatgtgaatgcatgcccagcccttaccaggtgcgtgaccttaggaaatgcacttgtcctttctgtgccttaattttttcaccaacctgctaatgtatgttcctcagtgaaaatttaaaaaaaaaaaagttaaaaaaactaggaagcaatgagtttccatagagttacttcccaaggaacaaggttacgcgcttcgggagagagccgatgaaacatcaaacgcagcatcctacacagcccctatccaccgtccccaaacctgcagagctcaaagtaaacgcggaagggttaacaagcagcttggtccagggcgccgcccgaagtgactgactcggcctgacccggttggaggagtcgccgaaataacacgagtgcagggtctccaagacggcgagagtttccaggtcactccagctcagagaacagcagaggctttcggactatcaagtcagtgccgtgtgcctgtcacggcctgtgccgctcaacgaggaaaccgacgcaccgagaaggacgcagccggccgagagcagcgtggggtccagatcctgccttccggctccccgtgcgccccccgcttaccttcctgagggcccgtgcgcgagacaccccgggcagtcccacgtcgtggcgcgtcttccggcccaggatctggaacttctgcctgttaactttcacctcgaacggattggagttggccttcgccgggccccctcgcgctcccgccggcgccccggaggccttccttcgcgccccgaccttcttcgccttcgccatggcgcgcgccccgctgcgcccaagggcccgagacccgaagagagacaggcgcgcgctaccctaagacacgtgccgggccgcggaaccgcttcctcgtctcgcgagaacagcgcagcacctccgactcgcgagaagtaaacaccgcgcccgcaggctcggcttactcgccgataggctcagcgactacaactcccagcaggccacgcgccgcggcccgccgtgtactcttggcgcagggccttctgggagctgtagtgccccggccgcggcggcgaggggcgctccctcttcagctaagccgttagcgccgagcccgcccgggagcgggtcgccggccgcggcgggcgcccctgccagtgagcccctgtccgaagtgagccacggcattgactcggggctgcccgggggcagggcactgaggagggagttgcgcgcgcgaggcgagggcgatggggccaagaagaaccggggcgatagcgcggcagcggtgacagctgggacccgccgcggtcgggctgccccctcccctcgccccgaccgctcccctgctggtgagggcctgcggaggcggcggcggcggcgcccttggtggcagtggtggcggcggagcagcctcccgggatcgtgtccggagctcgaggagagggtggtgcccggcgagctatgcacgggggcggcggcgtctcctcctgttccgcctcctcagtctcctcggtctcgcagaatccgccggcggcggcggcgccaggacatggagctcgagaacatcgtggccaactcgctgctgctgaaagcgcgtcaaggtgggtgcgcggcaggcgcccccgaccccccccccagagaaccccgaatcccggggaaccctggcccccctgaaggaacccgacatccccggagaaccccgatttccctggagagccccgacacctcccactgggggaacccagatctgcacggagccggagccggggtctgtgcagtgtggtcaggctgcccgggccaggtcccagtccccatctcctggcccagatgagagaagtctgcgctttgctcttcttagtcttgccctgtgtccttgtcctgtcctctcggtgtgacctcggtgacagtgttgcttcaggatgcggcaggcagtgtcctgcttgtgttggacaacctgtcccaccaaaaaagaacggcgtctttatggtcttaagggggacaaagaatagcagcctgggaactactctgggcgagaaccttccgataatgattgtagggcaatgttatttttaacatagctgcttggttttgaggtttgatctgaggctctatggtgtgtcaagtgtgctttagcacgacgtggtcacagatggacaagttggcaaaaattcagccttttatcattattaaagtgaggcagaaatttaaaaatagtaataagtactgcattcattcactccaagaaaagaaaaagccaaggcccagaatgtggcaaggcaagggttaaaaagaaaagaagaacaagttttcttttgcttagcaagctcactttaaggacagttataagataacgctgttctgtttgagaagtcgaatccaaaggaataggctccagacaccccccttccagagcaggggtgaagaaaaaaaaaaaagaggacaaatatctgtgtttagccagttcttggttttttctttcaacgcagctacaaggccaccagctatgcaaggccacaagttatgccaagtcatcagttatgctatagattatgtgacctgtcattatatgattaactgcctttgttttgcttctgtaagtttgcttataaaaatcctgcttagtctttgttcaaggctcagctttttggatgtgaatccactgagctggtgcgtaccttaacataaatatcctcctgttttcacccatgctggtctctctagtcctctgcatcccgccacaaaagcatcagttggtccagcccttcagcgggagacccccacaatcctctgtgcaatcctctgtctcggacctcatgtctcccttgcctgcgtctcaagagagctggcgacagagcctcggacctcaagtccctgtgctagccacggtagttcttcacaccccgtcactcttacggaattgctgatttcctctatttccttgcgtgatggagcagctctgctcggactgtgctccaggacagtgtaa

SEQ ID NO: 317159 - DNA, 4001 bp, Homo sapiens
tgaaaaattacgtattgggtagttcgctcactacctgggtaatgggttcaactgtacccaaacctcagcatcacacaatatacctttgtaacaaaccagcacatgtaccccctgaatataaaataagttaaaaattttttaaaagtagccattcttaatattagcaatagcacctagaaattaaaatgaatatatatatatatattttacagcagtgactaaaatgtagcatatataaaaataaatttaacaggcaaaagatggaatataaaatgatgacataaaaaataaaaccctactgaaagattttaaaatttctttaaaattgaacaacatgcctgatttttggaagataaattttaatactttataggtcatctccccaaattaacatatcaatttaatataatatcatttaaaatatgtatagacaaacagttcgtttggtaaaaatatttgcaaagcagtgacaggatttgttttggaatatgatttttaaaagttcagagggaagaaaatgtgcccaagaaaagctaagaacatttgtgaagaaaaacagtaaggagatatgctttttaggatatcagaaaaataatctatggcaaatataatcaaagcaatttggtgttgccatagaaatggacaaattggtcagtgaaacagaatcaaggatacaaatatagatcccattatatatgagattttaaaatatgacaaaagtgtgttttcaattcgaaggggaagaataaaatatttagtaagctgtttggaagaagtgaaagttggctcactatttatggcatgtgttttaaaactccacttgaattaaaaacccatgctaaaatttttaaaaataaaaatccttcagtaaaatctagaagactacatgtctaatgcagcaataagaaaaaatcatattaatcaacactggaatccaaaatgtatacaataataaatatattgtctatacaaatattttaaatgtgcatgataaagttatgaacaaaggcagccgacaatatggaaaacacctactatgataagcattaataattacaatattcaaagaatgtataaattgagaaaaagactaatatctcagtaaaatgagcaagaatattaataaatgatttacacaagaagtccaaacatctgaagaagataaaaatatatttaatttcacaagtagttaagaaattcaaattaatttaacaactaataacataaacagttacaacacctattgctgtaaggacatgagtaaagaacagtgtcatagtcttctggtaaaaatgtaattatttgtagtacttagaaagcaataaggcaacatacattaaaattgaaaaatagctttgctctttaaacctggagataaagtagtttttaaataactacttttattgtagccttgttttgtgacaaaacccaacaagatagaaacctctggaaacaaagtgaatgtttatcaagaagggaatggttgaatttgtttcttattatccatatcacggtatattatatacagccatttagaattgaattttatccataacaatcaacatggagggctttccacaaggtcatcatgagttagaaaacaagatgcatatattttttaaatgatgacaaaaagattgatttgagagtgtatatatgtgaatgggtataagagtagagaaaaatctaacataatagaacccaattaagattggttacctgtaatatggaagcagaagagaagaggtgggcagaggcaactaagaaaggaaattggccgggcgcggtggctcacgcctgtaatcccagcactttgggaggccgaggtgggtggatcacgaggtcgggagatggagaccatctggctaacacagtgaaacgccgtccctactaaaaatacaaaaaaattagccaggcgtggtggcgggcgcctgtagtcccagctactcaggaggctgaggcaggagaatagcgtgaacccaggaggtggagcttgcagtgagccgagatcgcgccactgcattccagcctgggcgacagagcgagactccgtctcaaaaaacaaaaaaaaacaaaaaacccaggcgccagtcccagctactcgggaggctgacgcaggagaatggcgcgaacccgggaggcggagcttgcagtgagccgagattgcgccactgcactctagcctgggcgacagagactccatctcaaaaaaaaaaaaaaaaaaaaagaaaggaaatttaaaaatcaagaattaaaaaacaacattatgatataatttagtttaggcacttatgcaaaattatatctctatatatgtatatattttcaaaatatattttaaacatgaaaaatcatgccagtgaaaacagtggaatggctaatgtaactttaataaaaagtaaacgttgtgctactttttattttcgtttttcctagtactcagatccagattattctttgaaatcaacatatacagatactatgcaacctgaatgtatattaaaatggtgcaatgatagctttttcaaatttttttccatattacaggaaaaaaaatatactgattggtattttagctaaggtaggatcaacagaaaggaattaaaaaacaggaatgataaggttgaagtttcggcaacttgtctggacctgtaaaaagatgcaggataatctaatagggaaatggaagtaaaattttcacagaacaaatattttctgagtatctactatgcactagactctgttctaggcactaaggccagcaataaatatgaaagcatactgtacatctctcatggagcttatatttcattttggggaataaaatcattaataagtgaacacataaatgagaaagtctcaactagcaagtgggctttgacacaaatcagacaatactgtgaggactagtagtgtggagaagcattccagacccgagatgaaatgacttaaagaaccccttccctgcagctctgagactcacgattcccaggcagggagagcatcacgtgcaaaagttgtaattgagaatgagcttggcatgttcaagactcgagggtgtcaaaggaggaaaaaagatgagagctgaggatagagacagtgagaaactgtaaggctttggatactgtagaatcttcaagcgggcactaattctgtaggtaaacatgaattagaaaaagttactaaaacctagataatcaaaatatcaaaagcaagctcaggatattggtcaagctcatgctggtctttgatacttctgtgttaagggaagcatagggccactagttttgaaagaagcatatatcacagaaattacttaatgtagtttttccagctgaaaaaagagcaggaacaaaggaaactccctcaaacagggaagattttagccaaaggctttgaagccttaagtaacactgatataaatgatataaacggctacccaaggacaaaaacaaacaaaacagtttgcacacctgtggaggatgaggaattccagacagaagaggagatcatgagtaagtagaaagggaaacacaagactacgaactctgctgagagagttgtctattataaatgagatacagcatccttacaaagactggaagatgtgatcctagaaagaccccacattcagtttattatcagtgtgccaagaatgcaaggacagaaagtaaaatgagaaggaaaatttagagactttaaatgaggtccttttttttttttttttttcaaacaagatcttgctctgttgccgaagctggagtgcagtggcataatcatggctcactgcaacctcaacctccaggggtcaagcaatcctcccaccttaaccttaacttcccgagttgctagaactacaggtatgtaccactatgaccagctagttttttgtttttttttttaatttgtaggcacaggatctcactatgttgcctaggctgatctcaaactgagctcaagcgatcctcctgcctctgcctcccaaagtgctggaattacag

SEQ ID NO: 317160 - DNA, 4001 bp, Homo sapiens
acatctgtaaaagagagtattggtgagcagtatgatttataggaactatgggataaaataatcatacaaataaaacaatgaatttctaatatataattttagatactttgtaatgtgttcacaaaatgcaccaagaataaaactgccagatgaaacagacaaacagatagatgaagcaaaaataagcttaagcctcaaatgctctgaagttttctatagacatgaagaaatcatggctagtagaaagatcttattggggtgtatggattttggaaaaacacatattgagaaaaagaataggataatgatatatgagtaacatgttattttcaagcaataaagaaagcacatttttttattattacaatagccagtctgtaatgttaatatgtgcctttaaatatagtgcagtaggtactgttactgcactatattgcatcactgttttattaaatgatcgatctatagaagtttttaacagatgaaagactctaattgaactctgcatacaattgccattctgttgatgataatggcactatttttgagcacattatagccattttgcaaattcatccataacttagattcatcattattatgataattttactcaatttattatggtttaattagaaatccagatggaaacaaaaatatgtccttcacagtttacaaaccattgatttttccatccttcctctcattagtagttcccacttgaaagttatttggatgtgaatggaattagaaatttagacatatgtttaaaacaactttgaatatttggattaaaaaaaggaaaccagcatctttgtataattcatgttatcattaagattttttaaaaagaaataaatatttcaaatatctacactatagctgaggggaaatgggagatgaacaaatgtatttttggtttttagttagtagttctgtctttaactagaacgacagcttgaagaagatcattttcctctcctccagaccctaaatttgacctagggcggcactgttggaaaatgcctgatggtttgacagaagaactaaaatggtattgtctggaaaccctatctcactcccagaaggggataaaacctctccaaacgccttcaataaggactctggtgtcctgtacgcagctcagaaacctgatttcagcttttctagcaagtggaaatgcacaagatgaagcctcagatacacaaagatcattgcttagaagcatcacggataaaaacagtttagaaactcgctagcttcagacccgctaaggaaattcaacaaagttacaacacaatacagccccggagagggcttggggggaactttaaggtgaagaaagcgccccacatcccttgaccaggtccctgctctgcaagcctggggccacagccatctgtggtgcagacatccagggcagagaagccccccagtgttgggccagtgaccaagcgggtgcctgtgtaattaggaagggatttgaaaaatccaaggtgtcggtccacaatcgctaatatgtgtcatcaaggcaagcgttgggcattagagaggggtcgcgcccccaagcgggggcccccagacaaactggcccatgctgttacctctcccggcgagccctgtcggcggcaggaaccagaatccaccaagcccgtctgcagcaacaggttctgtccctgctccggctccagctacttttcgcagtctgccggctcaatcccagccgacgtctgtcccccgcggactgcctgctccactccaggcttccgctccaggctggcccgccgcgctgctggacgctgagtgctctgcgctccctccccgcctccttgtccggtgcagatgagacgtcactttccaggaggcaccagctggccgctggggttccgaagaagctattcatatcccgctaaggggcacccaggtacattcttgtgaaactcagaatccgagcgcggcaaagaaaaggaagcatcagtatcaccattacttggctccagatcctgggcaagtgatttagcctctctgtgcctcagtttcctcgtttgtaaaatagagatgatgatgatattaatcagtaagtaatctgagaattatttgtctacatgcaaaagtgcctggaatggtcctggtacacattaatcattacattaaatgtgagctatcatcatctttaaggttctaatgggactgagagattcatcgcatattgcaaaccctctctctgtctgaagcagaccgtattttttgagcctttgcaaagatcttttagcttgcaagcaaacccctctgaaattctggaaatatattcacagcataatcagaaatggaaggggaagaaccctggggagactcacaatgatcctaacaacactatctgcccagttgggtcttgctaatagagagatgatgactagactttaatggattaacttagagatttatacaattactaagaaagggataattaaaggtgctttaagcatgagaaacctgtgaggagccttttagacctaatcctcacgatagcactctaggtttgtgaagagttgatatataattatttccaattcacacagaggcaccaaggtttagtgacttgtctaagattacagaggtggtatttaaatgaaagaaaagctccagaagccaaattcatttctttatctgctacatttctctgcctatatcactggtacacgtggaatacagaaaaaaagcctatggtgagacagaccttttaaagtaggattccttggtcttggattaaagttgcagattttgacaagtgtgtgtgtgtggtgtgtgtgtttaatgactaaattgaggcgtatttctcccaagactttaccaagttcaaggtaaggatactggtcccacttctctaaagtttatcaggatactcaaggcacagaaagtcatagaaaagaaaaagacgttaaagagataacacaggagtcataggatagaataataagttagttgggtaaaataaaactaagaagagaaaagcattttgtattcaacctgaaattctcaaatcaaagtgcaaaaataattgtgattcattgctctacacagtacctcataccactggaaaaataagtcattaaaaagaatgaaagcaatagcaacgcttttgatgagacagtgaggtaatgtccagcttgctaggattctattacaaattaaaagaaatatgaaacttatgtaacaatcatttaaactatgattccatttctgtatcatgaaacaacacactgcaagaactattctcctgctccccacccctaccattccaccaccactaaaaacagtagactatatccataagcaggagaaaattatataaaactagggaaggacctgatatgcacctttccctgagtacttctcctgtaaacacctacacaccctgctttaacttccatgcattcattcatcattctttgctataactggttttaatagaggagcttgtctttctttctcctagctaaagcccatgtctaccatggtgagcttttcttcccaccctctcccgtactttcaggattctcacactctcttatatatttcttctctccttgtgaaatgaattattcctggcttttatatatgtcaagatcttccatttaaaacaaaacaaaataaaaatcccactgttttcctgcaaggtctaagtgtaatacctacatcgttccttctcaggaacaactgcactgttctgctgcccaatctgtcatttgcacttcctcacttcccatccacttagcaacccactccagttagaccttctcaccagacaatcttgcaaaaatcatcagtacttccatgttgagaaatacaatgaaatacaatggatatttttcagactgcatcttatttggccttagaacagcttgatttctatctgcaacagttcctcctcttggcatatatttcatcataatcccctattttttgtttctttaccctgcatctctggctactcatttttt

SEQ ID NO: 317161 - DNA, 4001 bp, Homo sapiens
aggtggatgggggaaggagcagaaaggtttctcaaaaatcaagtgtaacagagctctttttgagacataactgtggcagaaacaaaaaaaacaaaaaagtactagaaaaaagtctaaataaaaccaaggagagtttaaagtgtagctgatatctcaagtatccttgtggtttgaaacgtgcttagatcaacaattcatagtattttcctctctaatgtaaataatgcctaaagaaagtaatttcaggatacagatttatccacctgattacacgttgacacattatttgctaaattgtttccttgtttagagtcacacctaaatgacttttttcctctgggtatcaacattttaatttgctgttttagacatctttttaaagttacaaaaagctatatgcattcacatcatatgcatatcttgtgatgggtttcttgttgcaaatatgtgtgcaagaaatgcataacatacccaaatgtgagcacagaattgcttttaaaaataaaataaaaaggtctacactctggctgctatcacgttttcttaaagtctccttatctttttcaattccccttttcttttacctgcctttctacccccaggcccaaagtacaaaataaccccgaactttctatttcctccgaccaggtagtgaacaagcagctgtgctttttcttggcgctccactggttcccctccgttcgcctccgggtacaagaaagcgaatcaattgtggaattgattcgttccaagattaaaggtaaaacaggtgcggcatctttctttaggactaggcagggacctacacggaggggtgggggcagaggtcgctgaaggaaggcgaccgggcgacggtgtgcgccagagtaaaacctcttttcgcagcagccatctgcacccgggacgagcctagtctgtaattgcacagaggtgagggggaccgagcacaccctcccgacagacccagtgtctctcacacaccggagcggccccggagcgcgggaggaccggctgagtgacagcggagacgcggcccgaggttgttggaacctgtcacagcacgccgccgtcaggctcgcccgagtctgaggagcggcgcagtgtgtgcgctctcacacacacatccacacactcatgctcacattcacggagcgcccaccctccggtcctcattttgagtctccttccctcaagaaaaccaaatggagaggcccacaaatctcccccgtagcccagtcgctgactcgcacccactctctgtgtgagcggccccgagagccctgagcagagcccgggcctccccccgggggcctggaagcttccccagtgaagagccgtctagttcaggcgcgggagtttcccgggtaagggatgtttcgcgcgtcacctcggcgtaggtggctaaaccgcgccctcagagccgagatcccaggctccagcggctcctctccctcagtcctaattcccgagccggggcgagtcgccctcggggggccgcggatggggtcccagactcgcaagggcgcgccctctccgcctcgggcgggcactcggagccgctggaccgctctcctcgcgccacgctgtgcggtggcccaacttctggatggaggagacgcctctctgaccacgaaaccccgcggggaaaagtgacccaagacagtgagtgtgaaattagcgcgggaaggaggagagggcgccccggggcccagctcacctcccgtcgaactcggcggccgcctgcaggtagagcgaggataccagcaccagcgccaggagaaaatccatgttgggcagcgggtcctggggcgcagcgcagtggcgcgcgaggaacaggttggggtggtgggcgccgatgggaggcgcccctctgagagtctcgaggaacccccagccctcgccgcccgggctactgctgccgctcccggaggacagcggcgaggcgcgcggccggagcaggtctgctgcgcggcgcccggagccccctcccgctcccttctagctaggggaggcgctgcaggggtagctgcaccgcccgcggggaggggcgccaggggcgggcagggggtgcgcgtgcgcccgactcgccgccctcccagccccgggcgaagggtgagcgcgctccgctcctcccgggggcccagcggggcaggcaactcgggggcaggggcgctgcgggacggcagtggctcttgggggttagccaagcagggcgagccccagcctgggagaaaagttgcaaaccctctctgggagagggaaagcagggtgcccagcaggaaaggggagtggaggaggaaaggagcccgaggcgtaggtgcacgctccgcaggttccgcccgaacaggtggtgactgcaggggcgagcagtagctttcaccggagggcggagaagccctagagcagagaggtttatggggctggagctgagcagtgtctgcatttactaaaaccacagcacgacttggacaaattagcgaaggcaaactctgggagtttgcttttcccgcagagttggcaaaggcatattttttattttgtaactaaccaaaagaaatatttggctctccagtcgggttttgaagaagaaatgagcagactgtttctgtctctatcagctcaactcccgagcacattaggacaggactgcccctctagggatgagtgcctgccagagaggaagggctgctactgcctagtagtgttgtggtgcctgatcttgaggggatcacttagaaaccattttaagtaatcattgttcagttgttgcagagtaaaaagtattgtactaaatgactgtgttcaaatgaaaacatgattatcctaagatgtacatgagcccaatcaagtcacccctcttcccaaccttacctcgaatgacagccttgtgcagtgatcatctgtcatctcccgtacctctcaatgtcctcatttctcttcctccagtccatggcctccttgcctttcttgcatgttccaggcatgcccctgccttggggccagtaactggctgttttctctatctggacccaaatatctacatggctcacaccctcacttccttcagtctttgctcaaatgtcacctcttccaggaggccaatcatgatcatcctatttaaaactgcaacttgccctctgcaaatatctacatggcacacgccctcacttccttcagtctttgctcaaatgtcacacctctttgaagaggccagtcatgaccatcctatttaaacctctaacttgccctccttctgatgatccttggcctgtcctactttgtcttttctccataccactcatcttttatattactatataacttgcatattttttgtttgtatgttttctttccgctagaatgcaagctgtacaaaggcaggtatctttatcacctagaacactgcctggcacatagtaggtgctcataaatgtttattcaattcatttgctacattacaaacgttttccccccatcttcattttctttttgaggtttctacaacttcaaatttttaatggaaagttctgtggtagggtgattcactatcctgatcattcagtgtgtgtaaaaacaggaattttcttcaaggaaaggaaaaataatggtttcaacttaaatggctctttgatttctaagttgttttcagttagcaaaacaagtttctattttaatctcaagaaagatccatgccaattcaggcttgggacattattttaggcaaacagcttggtgtcatccatttcaggtccttctaatgaagtccaaaaatgtaggagtcaaaatattttttctgcagaaaatcaaatttttgtaagtgtaggcatggttccaggttccagtggctactccttagctgtttttgtttgttggttggttagttggtgcctgggttagatttacaaataaacctcactgtgtgcaatggatgattagagagaaagggggtaatatacggctaaaaaactggagatctaaggaaaagacgaagagtggtggat

SEQ ID NO: 317162 - DNA, 4001 bp, Homo sapiens
gctgttactacttgaaaatacagctccctgatcataacctgctgcagatacattttttcaaatactcaggattggctggctgttcacctcacttgtgttggaaaagaaatgtcagccttgttacatacagcctcccaaagttactgctagcttatctaaatgaattacataattctctgctccttccttgctggggagggcttgttcaacagactgctgccttaagacaataaagactaataaagtagtagtcacggaagagcactcggtctagtcctgggtggggaacctggtcgggttagctttctgctccctcgcttgcttcgccagagagccggcccagggtcgagaacaaacagctactgcttttctgttccagacctgacagacaagctccacatgtcccctgcctgtgtgtgccatcccgcccgtcatgctttctcataggatggggagtgggggaagcaatgcgtgctctgtgtgtgtgtgagtgtgagtgtgtgtacatggaaacacactctcttttgctcctctcccctaggtttttcctgtgctccagaagttatcaaacaacgaaatgggaaatgggacatgttcagtcaaaattcctgttggcacgcttacccacccacctttttcatattgcgtaactaggtgaatcgcccgaaatttactccattcctgactccctactacacacacatacacacactctcactctctctctctctctcatcaaaaaacctttctaccagtgataagagactggcaaaagagaaaagatataaacaaccaaaaccaagcagatcccaaaccgaagtcaattctctctctttggcccaacatcagaccttaaaacattcttatctctccagtctacctgggaaccaatggcacaccctatcaagacacctccacctcctgtccattcccaatctcctaacccagccacgttccatcattacttttctaaaagaaagagctaaagagttccctgattagaactccgatgattaaaagcttcgggtgtctatcggggcgcagcgccacactcgaagcgcccggtactgcggagcgcggctcgattgcagccgagaagcgcggaacccgcaagtgggggtgggcttgcgcgctggggtccgcgccgagggctactcccacctccgccagctcccagcccgacacctgccgcgggacccgtgcgacgctgggcgacgcgccaagcccacccttctccggctcatcccagccagttactccgcgaaaactccggtgcggccagagccagcgcctccagccagctcaagacacgtaaggaaaatgagcgggtgtgggataggcgaactcgggcgccttcccagtgcctcggccttttaaagagaaccggggtaaaggaaaacttggatccccatccagaaattccccgggagcaggtggtgggaaagcccgaactccgcgtagggtaccctctcctttcacccgcgtcgtccccatacccttcggcaggagcccgcgaacggtccggtgatttggagcaacctgcgacctgcctgcactggagaccccaccttggtcccccagagccagtttcggacactcgcatcgtttttcttcccctctcatccttcaccttgtcaatgagagatttcgcagaagtctctggaaaggcataaactcgcaacttaccctctttggaatttgtctttttcgctcctgcttattaaagaaggaagggtgggaatggaagggagcagagtggggaagatccgctggtatttctcctgctcagatcctaaagattgatgaagctaggaagagacgcctccttaaagccgaactccacctcatcccggatcacgtgacggcgtcccgcgagtagcgcctgaagctcccccaaccccacaaacacctcacaaaggtgcacacctcggggaagcattgcctaggaattttggaaagaaaagcaatccaacagaagccacacattattcgacacagacctcccgcgcaggggaaaggaagccctaatccccacagtcctcgactccggggaaggcagggcagtttcccgaggcttgaaaaagtcggtgccactgtgcttttctttgtttgcaggtcagtgccatcttgtggccgaagtcatacccggctggagagctcgagcgccagcccaaaccaggaatcaaagggctcgctgggaaacatgaaattcgccacaataatggcactaatattttcttttgctttcttttgtgacgctcaaataactctcacgccagtgccgagaatttgttttcctcactttataagtgaacaaagagaagacctttaaaaagtcaaagcagtcaatcggccctcctttctttggcccactgagaaaatgcattaagtcagatttgttcccagcgcttagctgctttttagtttttttaggggagaaccatgagctgaatatttccctggtggtcgaaaagcgtcaatgcaattttctcggtgattagtactacagtactgaacattatgaagaaaaaaatagaatgtacaccgagtacgttgaaggcggccaaacccatcatggtgcccgatgattcaggccaattactggcacactgatcttagatgttttacctgattctattctagtttcaaaagtcaaagttgtaaacacacacatacacacacacacacacaaattatgtagacgatgaactgatgcaaatgagtagaacttcttccaaataaaattgttaaaaataagaagtctttctaataaagatacagggcactgcccagagaatttataaagatttcattagaaaacaattctaatggcagtctttcttctaattaaaatcaaaataaaattccaagacaagtggactcatctgaactttatactgttaaaaaacgttttctttttctgattgttaggctgaataaacatatttaaggttcagtataagctcatttatatagatagtgatgaacacaatctctggatgtttttccaagaaagctttccaaaatatgtgtcactagacatatttttatatagttggaaaggcattgtaattaagaattaaaatgtcatgattatgtaatgattgtactattagtgtataacaacagatataagcatacatataaaaatctctaatggttaagcagagtaaaatgacaacagattcatttatacacacacacacatatacacacacatacttttttttttaaccaaggcacaataatttttaccaaggcacaatttaggaatttcaactctttcagggaagaataactaatattcattcaggtttctatgcatcctctgtctactctattgccttaagtcacattctgttcttagaaggaagttttccccatggttttgatcatcaaattggctatctttagcctgctataagaattacaaatgaagtaatttaattctctactaagaatatatttttatgtagaaactattattatgtcagcaaatattttggacttgagaatataatttggactcaggtactatgctttctctatttcccaagaatactaataaaggcatgtctgccagagttctgaactattatggccattgtattttatcattttattaactcaatttttatgaagtgttctccctaaggaaaatttgtgaaactgcattcttgagttattaatgtcagataccaatctttgaaagatcattggtctcaaggactcttttctatgacaactttatgatacaaagagaagttctgaaatactcaacagtggctgggggcggtggctcacgcctgtaatcccagcacttttggaggcctaggcaggtggatcatgaggtcaggagttcgagaccaggctggccaacatagtgaaaccccgtctctactaaaaatacaaaaattagccaggtgtggtggtgcgcatctgtaatcccagctactcaggaggctgaggcaggagaactgcttgaacccaagaggcagagg

SEQ ID NO: 317163 - DNA, 4001 bp, Homo sapiens
atctgaaacaaatcattcatatcttggagtgtatgtttgatagcccacaccatatcccctagactaagaaagagactggttttagagtacagttactcaatcctgacaagccatttagccatttacagaattaaagagactccaagaggctggagtttggaggttatacctgactaaattgagaggaagcatgagattgaaggttactaggaggaagagtatacttgattttttgatttgctttgctttttcttctcagtcttgttttataaattttgaagcccttttatttacaacttctctgtaggaatggttgttgatctacaagctcttagaatatagacagtgttagctgtgcttaagcaggttactcccttcagccaggtcaaaacattacccagagcagaaaatgcatcatttcatgacagcacttctggaaaagtgggaaaggaaaatggtacacagaggaagttgccatcaaaagcacacaaaggaaacagcaagcagacaagggaataacctttctttgaaataaggcaaaatgagatatttacattactttaagacatttaaagagaacttttactggtacaattttcctgaataagggaatccttagaaactttgtcatagaaacatttctttgcagaataggaaaagagtttcaggacttcccccagcagcccaccacccgagattcaaataacctcaagttatttgagtcagagaccagttcatgctttgaggagagatgtttaaatctgtgggggctttttgcaacaatattgtcacaggttggccttagtaaacctacacatcttatcaagcacaatgtcttccagaacatttttcccagggaaaaatatctcagaaatcagtctcagaaatcaaaagccctgcatttgcctacactaattagttctaggaatgggggcaggggagggggaagaagggaagtttcaagaatgctacatacaagacatgattgtttggctaatcagtagaaagttgaaaatattcaccaaagggtgtgggaagcctttctttggaaacagcatctccatttcatgtcactgaattttaaatgatgtgtacctattgcaaaaagtctcaaagcttttaattttgcctctttccctgccaccaaaagctcctgccagtgggtgagcctttctgatggaaaatgagcaaacgcttaaatgaatgtgtctcctcttgaacggctttggagaatccaataggaccttctgctttagacaagtgtttgatttttaaagaggcaggaacaataacaacttactgttctggaaagataatgacctatctcaaagaagggtcaaggaaatagtaaataatcttcaacagaaaagggaaaatctagagaaagtagaaaatggggatggtattacatcctccaaatcgccacctcccgcctaaaggaggaggaaaaagtccatacactcatgaggacctcctcatgtccctcttcataggaaccgagcgctcctctagggattttcttgttcccaggaggtgatcagagttaggaattacacttactgacctggacctcgcgtttttgcggagacgcggaaacaagatgtgtgcagtccgtctgtccgatgattagccagccgacctggagagggccctggaaggtgcccaaaggcaagtccggttccgtcccctcctagggtccaggacagcccgcgccgcgcgggcgggcagccggagcagtcagagcggctgggcggttggcgctgccgggtctgctgccgacctctcaggccaagcgcgcctgggcaccgcactcactcgcggggtgggcgggtgaaggtgggaggatcagagatgggagcgtggggaggggggcaaaccccacccttaaacacaagaaaacaggtgcagaggctgcgggcgatggtcctgcaggggaggggactggaggagaagttttggtggcgagggagcaggaacagtgtccagggtctctcagccgcctcccgggcttgcaagcccgctcagccagaccctacccagaggggcgccccctcgcgggtccccagccaccacctgcagctgctgctgtcacctactgtgccacccccaagtttgatactctgggcgtttgcgccacccctacctcccttcccttccacgaatctctccctttgctctctaccccccagttccgcgagagctggcccggcgaagacagacctcctggacttgaggccgacttcaccaaatccgccccgggaaaaggcgagggcaaaggcggggcggacagacccagctgcggctgagggactgcggtccctagcaaggcaggcgagcgaaggagacctcaggctggcgggaggagggccggggctggagaatccccgcgcctcgtaggggctgagaaaattccacaacttccaatcgagagttgttttcttttgtgtgtgtaggagcagagatggggagctggatccgcgcagaaccccggaaaagcgccagcaggattgcaccgagaacaaatcctccgcaccctcgcccagggctggggcgcagtgcgctggtgctcctctagctgggcggtccctgtgctccaaacgagaaggtaaagcgagttcagatcctgctgcccatgatcagcaatttccctaacaggtgtctgcagacagtttataagttgagtagtgcagattcagactcgatagccaggaacctgtgtagtgagctctggctcaggttaaaagctaggatagggataggataggaaagctatgggacacgaataaaacacaatctctctctctctctctccagatagctgacttccgaatccttcactctttgatcctgacccaagccactcgtgccactaggagcgcatgcctatggaatactcgctcctgtctccttgtggtgaagccttccgctaatgcccagagcctcccaggctggattagtgggtaggagcaaaacaggatagtggagacaatcagcagagcagcagcgtctatttcctcgggattcctcccaggaaccctattcgaagccattccttctaaaagtttgcagccagtctctctttcctttgttggttttaagaggaggcagtagagctacctacatacaaaaacgaaagcctgatactggtaacctaagtctttacttaaccatcctcttcggaggctttgcacacattacttttcctctatgcattgtcatttctgaaataaggatggtcatactggtgtgcttggaatttctctgaaatatactcctaaaagattagattaagattagattccgctactctaaaatgaaaaaaaatatttatctgtttaaaaaggtaatacatattctccaagatgttaattaaaggcttccctcaaatggattggattttcagttccttcagggttttccacaccctaatagtattgcatttgtaaggcatttttacagtgtaacctgaaattaatcttcagttaatatagaattatgcccacaggagtataggaattgtttataaaacaaagcagcctgggcttttcaaatacctagaaacaaaggtaaacagaaatggaaatatttaacatgttctacacagttccacttaaagtcttttagtagttgtttttgttttgttttgttttgtttgttttttccttaagaaagtactctttgcccaaatatgtgttatatgtgacaggttccattcttctcaatatatctgcattggtgaagaatgaaccatataccaataagttataactttaaaagagtagaaatggatttaaacaacgaccacaaaaacaaatcaaatatccagcaaaacagatgagtgttgtcttttagagcaattgctttggaaaattcaactgatttcactgacattgattgcacaaaacacattttatcttctttaaaattgcctttcagaagcgtattagcagccataaccaactatttgcctcactctcttatagacgtgtgtttgtcttagt

SEQ ID NO: 317164 - DNA, 4001 bp, Homo sapiens
gggggggtgggggaggggtggtggtggacgtgtagtttttttaaaagtgcctcctggtagccaggggatagtttaaacattaggaaaattttgtacaataagatttaagttgaaaatctaaggtacaggaacgcacttaaaatgaaaaaacaaacaaaaaagcaggattttttccattaaacttaccctttcccttcctttttcctgaaaaacacaatgagcagacctacaatggaaatccaaatttcaacaagtgttattacgagtgctgtacatttttatgcaacatattttatctattataaaagtaatgatatatgtgaatcttctgaaattgctatataaattatgaaatatagccagagaaaaaatattttaacatggaatattatttgacaagaaatctgatattgacagcatgagacttttgtcatacctaattactatatttactcattctcttttgtattagttgtatctcccaccatcagaatttccaggctgaaacacagaactttaatctctgagtaaaaagtgtgaaaaataaaagttctttattaaactatggcaacttataaaaaataatatctttttaaaggtttactggaattttcttataaactcttctatatctgacacctagacaaatgaaaccttctgaatagattttaagtattttaagaaagtagatagttctcaagaataataggaggaactgcagggaattcaaaggatattaaaagtctgacttgtacatttaaataaggtttctttgtttgaataattttttgctttatgaaaatacacatcattcttttcacaaaggatgacaatcacacaaaagaataaaatatatgtaattctttttcctcctgcaatgatacaatatcaactattgtctgttttgctgtgatcgtggaacagcagcatgattccatgttctcaaatattcccatggtttgttcttaaagccagaatctggcacaatttgaattggaaagataaatacagctctgctcagctgacaaacacacaggcatgcaccaccctcccttccaaattctaacagcagagtttctcttcccttgagaaatctgaaatctaaaattgcattcggactgcaaaattctgctgaaagagccttaggctattttccatggtctaaggtaaaatcgttttggctttggtccaacacaacgcctcagttcctttaaaagattaactaaaggtctgtgaacttggaaaaaagaattcccgtttctggaattcgagttctatggatgtttgttattgctcgcatttgttatatgaagacacctcgcaaacaggagcgcaaaccttagagcgcagctgcctcccgggctcgggtcagcgctggaccgcgcggcagctggacggcctgagtggcgccccgcgggctgcgcccccggcctcgccagagacccgctagggttgagccctgacccgggcaccccgcgggctgctgttcccagctccggatgccagccgggctgcagccagagcgcgtccagccgggggcagcgctttgtccatcccccgccccatccccaggaggctccttcgcggatccccgacactctcctcccgggttcggcccgcgcctgctccacccgggtgagttgggaaccggagggacctgctcggcacgaaagaattcagcccagtaccctctccgctgtctcttcactcctgacaagtgcctgttccgccaccctaatccccatttttccagccgcgctcccttcaccttccccaccccgctctcttgggacccccgacaacgccctggcaccagagacgggtgcgggctcccagggacctgcgcagactcgcagcccgcgcggggacccgccacggcccctcggtgcaggcctacccggcgcgaaaggggttggcagggaggggcgggagcccgtacctcggggcgccccggccgctgcaggccctgggctcccgggagcgcggcccagcgcgatcgctcctgcaccccggcggtggcggcagcagcgggagcaggacctggaggcggcggtggggaagagggggcgggggtttaacggcgtctcgagaacacgtgactgttccggggacccccgagaccctgctccaaggcgcctgctccgcgccagcctcttccaaagccgggggccgggggcgtcccagacctacgccgctgtttgggcgctctagggagaagccacagggccccgggatgtcgtcccttcaccctggcctcgggtcccaggccgaccaagttaacttgatgggcaaatcgagttttgccggtccagccctcaaccctgtgtagtgaactctgagaagtcttggactggtgtgaggatggctgtgcccctaagttcttagtattcctgagaacaagcttcgactctcaggttttatctttgtttggggtgggggacggtggggggtggtgtggtgatagaaagaaagaaagaaaaaagacaaaacactgctcttcctttgcacctctttgaagtaaggaagagtggaggtggggaggctgacccaatgttcaggagaggcaacagcgtctgcggtaatgagcccagcagaatagaagggaagtttccccactccaaggagtggcagctgtgggtgtgggcaagtggcaggagcaggggagtgaagctgaaatgaaatcaacgctgctcaagactatattcaatagcaaagagaagacgaagggctaaaaacgaattgtcacaggttaaaaaaaaaaaaagacgggaaaaaagcccacacaaaagaagaagagaaaacctgtccttctgttccttcccaacatgatttccatccctaatgtttccaaatctgtattgcgcaggtttgctttatttttagctaatcattaggtggcaggtactttaggcgcgcgcgcgtgtgtgtgtgtgtgtgtgtgtgtgtgtgtgtgtgtgtctgtgagagagagagagagagagaaggagagaagggagaaaagagacattgggtagatgtccatgtgtctttggacatagctttaccatgagaaagggtgtagttattgtaccctttaatactgagaactattatgtaacagacagcatctcctgctgagtagagtcgtgtgggataaaccgaagagaactgtaccccttgggagcaatgtgacttgtaattctaacatctggggcagacatcactgttacagaagaggtcaaagaaaattttttgtgtcccctttctgctggatttcagcattcaatactcaggggatctgtatagattgctatttcatcagtcaaagagtcatccaagagcttttaaagaactcaagtaaacacagttcctgttttattcttctgtgtgttatttctgaaatattaatatattctccccaaaagcttaacagaataggccgtctgagcaggcacctgggattctgcagtaaggagtaggggatgaaagtgtcaagaagggatgaccttgagaaaataaggcttgttttttagactttcttaactccactgtctctgcggttaatgcagtacacattgccacataaatttctatctttccatctcttgcacagtcataacatgtacacttcaaatacacattgtctttaaaacaaattccaagtgaaccccattgtgactttcaaaacactagtctatgctacaggcttttgcatattaaaagtattaaaaaatcttattttttattttccacaaatttgttttctattttgatgatatgaacctttaggttgaagtcactgttattagagtattgaaaataaaaggctacctgccactgatacaaagattctaattaacctggctattttcccttcccactgcacccacaaacaagcaagtctcaaaaacaggagttggcatttcttctttaaatacacgtgacaatacacagtattaagaacacttggagtggacaagttattaagagtttttttgaggaaattataaatttacaaattt

SEQ ID NO: 317165 - DNA, 4001 bp, Homo sapiens
tcaggcttgcctgcctcacaatggaaaccataccaaagattctcttaggacaaatgcaaaaaacattatgaacttttaattttcatgcaaatgggcctcgccccaaaacacaaaaaaaaattcactaaaggaaaagcactggtggaggtgctactttaagccatacatatgctctcaaacacaaaagaaatgctgttttcacaaaggaaaaccttaaagttttacgttttacagtctgtgttaaattgcccttttccataaagaagtacttttttcgggaatattaacaaagatccttgcgaatttgtattttatctggaaacactttcacttttagtaacccccaaaacccaatctcatcatgatggaaatgatagaaaaggcatcttttttatatttatttgactataagatggcactttaaagactaaagcttaagaatctcacaatcatctatagactgcatagttgtaaaagttcactatatgtaactattttttgtcattccccactacataactattatgttcctctcttttatagatgaggtaaatgatagaaatctgcccaaggtcacctgagagagcgggagaaccagttagaactgagcacacctgatttctattcactcacctaatttaccgagccacctgatctttccaaaaatcgccaaacaaaactatgcctcccttaaaggaaaaagctccactttaaattattttttaaaacttctcctctcaagcttttccatgatagctgccacgatgtcaaacataaaatttaaacttcacagcaggacttcacagatggagaatgctgttatcattactatgtaaatatcatcaataacagcacctagagaaatggcaatacaaaatgttaggaagcaatttggtgcctttaaaattcggcggtttcaaaagctcgtctgctatcaaaagttttcctaactcctatgtcataataaataattaaaactgatggtgccataaaccattattatttaaacctggtctttttaaattgagtaggcaaagccacgcacctaaaattcagtagcagagtaaggatgccaccaaaagaagcttcgtccccttctcccttgcccttaaaattccaactgatgccataggaagcgtagcctgtctcaagagtttcgcgaatgctagcgaacgggaaatgcacgaatttccagagccccttttatacaggatctattaggatctatatctccttcaactgcccttatgcgctacacctccggctgagatttgggagcgtccgcaattgataaaggaaagaaatattattcaaacgtcctttaaaaattgtacagggaaaatgatccgaaattcatctttgggtaaagggaagggtggtagacctcccactgccaaaggcagttaaaagctgctagttagagggcatttatccaaagtggccaaactttcccaaaatagtcctctggcggccaaagggggagaaaagtggaaaaccaaaacaaaacaacaagcacacagcaccatactgactgtgcctccggattacgcagccacttctccctgcaaagtgcacgctcccgcgccgcggccgcacgccgagcacggcaagcggtgccccgccgcgcgcccctacacacctgcctcggccggggtccgtctctcgccgtctacctgttgcagcgcttgccaccgccacgaaacccctgctgcggagcccccctaaatccaaccacatccaggccagcgagtgccgctctccctgcagcgggagagcccgaggcagcaacgctcttgcacccaggtgactgactgcacgggcttcctctgagcagcctgaagttggctcccgtctcccgggcccaatgacaccccgggcgcggaggggctgagaggagggggcaggggcaggggcagggccagggcgggcaaaaaagggagggagagagggcgggcgaaagcccggagggggagtgggccagctggagggctggcccttttaaaagcgggtcacatgtccagataaagttcaggttgctatcccgcccccctgaacccttcctattggcccgaagagaagcaaggctccacgccgcacgggtcaggcgggcttcttattggacaatccaggctgtcagtcaccaggcgggcgacatgactgatacaaagttgctgcgacacagcctggactcggcagcttccttaaagccgcagccgcggcgggagcttggggtgccgggcggtggctacatcaggcggcctccgcacgctgcccccacccccatcgctcggccgccccaaacttgcttacgtccaccctgctctccttctgaccgaccccaggatatctggagagatgtgaaaagtgtgctgacgcggaagaagtcggtttttccgcgagcaaagtgtcgtcccctcacgctctccacctgcagctccaggtgagctgcagcccagaccctggcgccgcccaacagcgtccgcgcgcggggaggactctgggtgggcttcacccgaccctcgaggttcctctcccagcccctttccactgtctccagagttacctctcagcagagcagcagcagccttcgctgccagcgagcaagacgatcacgttcactcgatttgaatttagttgttttaaccgtgctggaaaaaccctttaaacacagctttcctcccatcccttagacccctaacaccaaaaaaaaaaaaaaaaaaaaaaaaaaaaaaaagagagagagagaaagataaatgaaagaagtggcagggtcaagagctgctcctctacttccttataattttgtcactgtacttactactttagtattggatttttccactagttcaatttgaaagcaagcttaccatcgaggatattcacgttataatgggtggagggggtgggtcacataagtgggagaaacagacaggaggggggaaggaaccaaactgttttctaaggatcggttgtctgcatgaagaaatttcggtttccctccaaccgccccctcctcgattctcctcccgcccacccaaatgctgcagttactaagcaaaaggatggggttcctaactttgatttctaaggacttttaggcttctcatgtaaggccccgttttaggctccccgctggcccggagtcagcatcagtgacgtatacacctaaatctggtcccccggccctcggcgacccgcagcccggcggcggcagctgtgcggcctcccgcctcaccctcgcttcgcgcccgccaaagcccgaggcgggggaccgggggacaccctgtgcccaaaggcccctcctctccttaacagttagttaagctccgggattccggacccctaacccagggctgagacttgaactctcagccgctccagtcaggaactccctggagataggggcgacagcggcagcgccgcgagctggtcctgaccccagactctaatgcccctcggtccccagcttggagctgcccccggcgtccccgcagccaggagtccccgccgagcgtcccaactttcccgcggggcccaccgtcacgcgcactctcccggcccagcgaactgggcatcgatctcacgtcggcagagcgcgggcggcgggcgggagcaaggggagtcccggacctagagcctgggcacgcgaggcggcggcggctccgcaagcgttgccgaattattcattattaaaggaatggacgtgtctcttttactaagtttttatctcctttgaggagggccggtcttgccctggatctcagcttcttgcaaaatctaggttagaaccgtgcaggggcagccgccgcgatcactcgcccgccacccagcacccttgccccagggccgccagcgggcaactcgtctcctgcccgcatcccacctccgctcgccaacccgcgccctctgccctgggcgcgcaacctgccttgcccggggccgcccctgcgctctccggaccccctctcgccgctgtcagcgcaaagtgactgtcgctgcac

SEQ ID NO: 317166 - DNA, 4001 bp, Homo sapiens
caggggcaggcagaaagggcgagaacaattcagccctggggaggggccatctgaccaaggagaacgctcccccgcctcggtggggcaagtcgggctgaactgccacacccgggaaggtacaggggcagcctcgcccgcccctaggctcacccccgatccagagcccctggggccacggggcaagggaggagcagggcagctgcggggccagggccctctcggatgaggctcccaggaaaaacgcgaaggaatcttgccccaccgcgttccactgtcaggacgagaatatcatctaaggcagggctcccctcccccgcccagcatcccgcgatccagaatcccgcgcgggtacactgtcctcgccgcgctccctccggcctcccgagcccgcccccacttcgcgtacccagcgcacgcggcgcgtttcttttgttgcgcccgccgtgcgagatttgggggtgcacacccggcaacgtggaggggcgtgggggggcttaccttatccgggggcgggaactgcagctgattgacatcgaggggcgtcatcaggggaatggtgtcgaagccatcctccagcagcggctgcttggtgcccttctctgcgaaattgttccccaacttcaccatcgttccgggagctccgaggctgcagcctgcggcgggagggccggggggagtcaccacaagcaagacccggggcggggcgggggggaagtgggcacccacacccaccggcgtcccggcgtccgcgagctccccggccccgcttcgtctcggggagggctcgtggggacgcggtggtcacggcccgatgcgggggtcgggtggtgctgtgtatttctagaccctcatctcgcaggacccaagcgccgggcgcaagggcgcaccgcggccagggaagggggcgccgcccctgcccagcacctccagacccggtccccggtcctggggccgccgcacccgggcgacccgctgttcacagccccgtcccgcgtactccgggagatgggcatcccccgggcactgctcctgggcgggcaaggtctggcctcggcaagcccaggcgcggccggccgcactcacccacgcccggctccggcaggtcagctgagcgctccgagctccgcgtctcctgctcctgctcgcagcaatggcggaggcggcgccgcgcgcggacccgggaaggggagcgaacgattgggctccacggccgctccctcctcctcgcgccgccgcctcccttcctgcctctcccgggggctgggtgcgcgcgggtgggtgcgcgcgtgtggccgcgcctccaccttgacgcagcgcccgcccggccgcacaaaggagtgcggggctgggcgggagcctcccctgggaccacgcgcccgccctgagccgggggagggaacaggggagcgggagaggacgcgcccccagggggtctcggagcggcggagggcgcccggagcgggagggctgcgggctgcgccaccccgggcggcggcctgggcgcgaggcgcttagaaaggagaaaggggaggcggggaccgtagggacagagcgacccccaggggtgcggggaggtgcagagagggtccccgcccgcagcgcgccgcgctcacctgggggtcctgaggacgttcaagggtttggggggatgggtccaggaggcgctgggtggtggcggagaccagagcagggtgctccttagtgctgggttggggagggggcgaccaaaagagggcgcgtccgcgtataaagggggcgcggcccgtaaaggaggcgcggcccgtaaaggaggaggaggttttcggtggtgcgggaggcggagtagcgctctcccagggctggggtgtgggcgcccagggtgaggctgccccaggcagcgggagggaagtcgttctaggcaaagagcgctcagtgcgccgcttggagggaggcggaaaggttcctccgctctggttggcagagaaggtggaggtcccactgcagccgccgcccgagcatcctgggcacagaggaggggccgctgggacgatgcccggacgcggagagaaggggggtggttctagcccgacctgcgcccccaaaccccgagctcagccgctgtcgcggcttcccagagagggtcctgtttgcagacctccaacccgtcctgcctgcaggactcacggatgaaagactatggggtgtgggggcgaggccgaaatgggagtggagcccgcgcgggaggaggccggctgcggggatcggtgcctcctgggcacctgggccaggagctgggccctgtcaggcgctggacgaggaggaggcatcacccaaattcgatactttttcacaccctttccggggacttccccgcggcactacggagggtccggggcgttttccatcagccgtctgagaatcctgggaataagcccagagcacaggagcagccaccgccttgagccccaggcacagcctgggaacttgccgcgggtgccctgatttcaaaatccccaggagggctagccgtctttgacaggtgacctagtgggtatctcgtaactcgccccaactctccagccagggtctaagtgtgcctttgaccacaggccagcctggtctgaacccaggctcctggcagaggcaccccgcccccaacccagggaaagcgggtgtcagactctggcccctgccacgggcctcggggacccacagaacccacctttttggcactttgatgcctccctgaagcaggtgaagaagagaagatttctcttgctccacttcagaaatctgcccaggcatctgccatgagagtgacccactggtcaggagaaaccctttgggcttaagcaaggaaatggctttcccgcacccccccccgccccgccccccgtctcaggctcaagcatttaacagaacccaacacacacgcgcgcgcgcaaacacacacacacacacacacacacacacacacacacttggtcagaattccacaccaggaggaacaaagtggaggccctgcccctcccttagagactctgtcaactgaggaggacagaaaggcaagaaggacctaggttgtcccagagatggacggtgaacaatcatgtttctctgctagctggccttttgtgctgtcttgggtcttcactggtgctggtcattgggactgtttcatcctgtggttttcttcctctgctgattgtatctgggccctgtgaagggcatggacaatgcaaaatgcatgagacacagcgccacccgcagggagctacggacaagggcaagtctttgctgggagcagtggccctgtgggagagtggcctctgcctcttgccaggagggaggacatccagagactgtgggtaaagactgtggataaagcttcctacaggtgggcctgagagaggtgcgtgcagaggggaaggcattccaggtaggagaacagaatgtgttaagacagtatatgagcttcctgccactgttggaacaaatttggcttaaaacaatagaaacatgttctctcctggctttggaggccagaagtctaaagtctaggtcccagcagggcctcactccctctacaagccacagagaagaacctgttctttccccctccagcttccagtggctccagacattctttgactgtggctgcatcactccaatctctgccttcatgtcactccagtcatattgcctcctcctcttctctgtgtctcttataaggacactcatcataggatttagggcctgctgggataatccaggataaggtctccctctcaaaatccttaacttaatcctatctttgccatataagataatgttcactcttttactatgtaaggtaaatcaggttcccggggttagcatgtggacatatcttttaagggtcgccattcagctcactacaggcattaagcttgcaagggtgtggtgatttggagaacccaagtcattcacagagggtggcagaaattaggttgaagaagccacagccaccaaaatggggatgg

SEQ ID NO: 317167 - DNA, 4001 bp, Homo sapiens
gcccctcctgcaaagcctagcctggaccatcagtggcccagagtggcaccaccgtggcctggggggcacaggtgtggccggctgatccccctttcttgaactgaaacccccgctgccagcctcttcccggctcctgcctccctccccagacgacacacacaataaagctgggaggacaccttcacaggggtcagggcccccaccaggacacccccaccccacaacacccaccccgtcagcaatcaccaacttgctggaacgaagacagagccctggctcagagccccttcaccagggactaaatgagaaaataaatagaaaagcacttccgggaattattcgtggctgtggtggttcgtaagcggcagcaagatgctgagagtagatgctgtgtctatggtcttagatgtgaattttacagtacaattgcctagacatgcaaagatctatttacatttttaagtgttaactcttggaaatattattcttagcaaacagaaactacttaattggatgctacattcaaaaagaggagattctttaaattcagcagaaaacactttggggaaaggttgatgaatggtttttcccagtgacaccaatactgagcgagcccgggcacttatttggagatttcacaaaaggaacaaagaggaaggagaccctgtgtgagcgcgcacaccctcctgcacctagcgccagcctggcaggggcaggcagaaagggcgagaacaattcagccctggggaggggccatctgaccaaggagaacgctcccccgcctcggtggggcaagtcgggctgaactgccacacccgggaaggtacaggggcagcctcgcccgcccctaggctcacccccgatccagagcccctggggccacggggcaagggaggagcagggcagctgcggggccagggccctctcggatgaggctcccaggaaaaacgcgaaggaatcttgccccaccgcgttccactgtcaggacgagaatatcatctaaggcagggctcccctcccccgcccagcatcccgcgatccagaatcccgcgcgggtacactgtcctcgccgcgctccctccggcctcccgagcccgcccccacttcgcgtacccagcgcacgcggcgcgtttcttttgttgcgcccgccgtgcgagatttgggggtgcacacccggcaacgtggaggggcgtgggggggcttaccttatccgggggcgggaactgcagctgattgacatcgaggggcgtcatcaggggaatggtgtcgaagccatcctccagcagcggctgcttggtgcccttctctgcgaaattgttccccaacttcaccatcgttccgggagctccgaggctgcagcctgcggcgggagggccggggggagtcaccacaagcaagacccggggcggggcgggggggaagtgggcacccacacccaccggcgtcccggcgtccgcgagctccccggccccgcttcgtctcggggagggctcgtggggacgcggtggtcacggcccgatgcgggggtcgggtggtgctgtgtatttctagaccctcatctcgcaggacccaagcgccgggcgcaagggcgcaccgcggccagggaagggggcgccgcccctgcccagcacctccagacccggtccccggtcctggggccgccgcacccgggcgacccgctgttcacagccccgtcccgcgtactccgggagatgggcatcccccgggcactgctcctgggcgggcaaggtctggcctcggcaagcccaggcgcggccggccgcactcacccacgcccggctccggcaggtcagctgagcgctccgagctccgcgtctcctgctcctgctcgcagcaatggcggaggcggcgccgcgcgcggacccgggaaggggagcgaacgattgggctccacggccgctccctcctcctcgcgccgccgcctcccttcctgcctctcccgggggctgggtgcgcgcgggtgggtgcgcgcgtgtggccgcgcctccaccttgacgcagcgcccgcccggccgcacaaaggagtgcggggctgggcgggagcctcccctgggaccacgcgcccgccctgagccgggggagggaacaggggagcgggagaggacgcgcccccagggggtctcggagcggcggagggcgcccggagcgggagggctgcgggctgcgccaccccgggcggcggcctgggcgcgaggcgcttagaaaggagaaaggggaggcggggaccgtagggacagagcgacccccaggggtgcggggaggtgcagagagggtccccgcccgcagcgcgccgcgctcacctgggggtcctgaggacgttcaagggtttggggggatgggtccaggaggcgctgggtggtggcggagaccagagcagggtgctccttagtgctgggttggggagggggcgaccaaaagagggcgcgtccgcgtataaagggggcgcggcccgtaaaggaggcgcggcccgtaaaggaggaggaggttttcggtggtgcgggaggcggagtagcgctctcccagggctggggtgtgggcgcccagggtgaggctgccccaggcagcgggagggaagtcgttctaggcaaagagcgctcagtgcgccgcttggagggaggcggaaaggttcctccgctctggttggcagagaaggtggaggtcccactgcagccgccgcccgagcatcctgggcacagaggaggggccgctgggacgatgcccggacgcggagagaaggggggtggttctagcccgacctgcgcccccaaaccccgagctcagccgctgtcgcggcttcccagagagggtcctgtttgcagacctccaacccgtcctgcctgcaggactcacggatgaaagactatggggtgtgggggcgaggccgaaatgggagtggagcccgcgcgggaggaggccggctgcggggatcggtgcctcctgggcacctgggccaggagctgggccctgtcaggcgctggacgaggaggaggcatcacccaaattcgatactttttcacaccctttccggggacttccccgcggcactacggagggtccggggcgttttccatcagccgtctgagaatcctgggaataagcccagagcacaggagcagccaccgccttgagccccaggcacagcctgggaacttgccgcgggtgccctgatttcaaaatccccaggagggctagccgtctttgacaggtgacctagtgggtatctcgtaactcgccccaactctccagccagggtctaagtgtgcctttgaccacaggccagcctggtctgaacccaggctcctggcagaggcaccccgcccccaacccagggaaagcgggtgtcagactctggcccctgccacgggcctcggggacccacagaacccacctttttggcactttgatgcctccctgaagcaggtgaagaagagaagatttctcttgctccacttcagaaatctgcccaggcatctgccatgagagtgacccactggtcaggagaaaccctttgggcttaagcaaggaaatggctttcccgcacccccccccgccccgccccccgtctcaggctcaagcatttaacagaacccaacacacacgcgcgcgcgcaaacacacacacacacacacacacacacacacacacacttggtcagaattccacaccaggaggaacaaagtggaggccctgcccctcccttagagactctgtcaactgaggaggacagaaaggcaagaaggacctaggttgtcccagagatggacggtgaacaatcatgtttctctgctagctggccttttgtgctgtcttgggtcttcactggtgctggtcattgggactgtttcatcctgtggttttcttcctctgctgattgtatctgggccctgtgaagggcatggacaatgcaaaatgcatgagacacagcgccacccgcagggagctacggacaagggcaagtctttgctgggagcagtggccctg

SEQ ID NO: 317168 - DNA, 4001 bp, Homo sapiens
caatctcccaagtatctgggactaaagacatgtgccaccatactgggctaatttttaaatttttttttgtagagaggagatctcactatatgcccaggctggtctttaacgcctgagctcaatcaatcctcccaccttggcttcgaaaagtgctgggattacaggcctgagcaaccacccttggcctcagattgataactaaccatccttgagtctcaaaccctgaaagcaaattagaaagggaagttctactaaagtttggctcctcccattaaagctagtggctatgaatgggatagtcttaattggggttggtgtaattttgatattcattttttaaattttgcaccttttctttttattccgtctctgttcctctccccatcctccctcactggttttatatttgtgaaagctcataaactaaaataccaaaaaaggtaaacacagggaatggaaagaaatacacagggaggccaggcgtggtggctcactgcctgtaatcccagcactttgggaagctgaagagggaggattccttgaggtccagagtttgagaccagcccagacaataaagcgagacccctaagtctacgagggaaaaaaaaatacagggagagggaaatgatcattggaataaattgtttccttgttgaatgtaatgaccgcgcactacaccgatctaaggacaaacacagtgcacggggaaatctgcaatcctgggctggaagagctagtttcatgggaaccctaattccttgacacttgcaattaaccaaagatatgcacatgcctaaaaccaaaacctggtgtgaatgaggggaagggaggaggagggctgcattccccaaattctctcgctattattttcttttagtgttgatcttccagactggcacaactcacatttcagggcactgaaagccagctcataagacaaacgctgaaaggactgatcctcagactcggacaaggaccgcaggggttcattcccatacttgattaagactttctgtgccgacttttcgattcgaataccctgaaaaatgttggctgccatgacataaacggagtccggatagcccgttttttcgggcacaccagctgagcttttcccaccggacagaggcagggaagtgagttgggagatgatctcgggatcttcttcgttcgaaaactccagttcgcccgtggaattcagcatgtctgcccctcgcctgtcgtgagtccttcaccctggggttagaattccgatgttccaggaaacggctttcctcgcatctgcagcatggtctctgtgaagagagaaggtgattgcagtaaatcactctttctgcagcacccctgtgggtggcccccttcgttgtggccttaaagactaagagggagcatttcccgtcccatctgagtgtcccagacttcgagcctgggacgctcaaaaaaaaaaaaaaaagcgaggaggggtgcagcggcggagggagaagagccccaaggagaccgacggcttccctcaagccagtctgggggcagagctgcccccggagccccgtccgcgtccccacagcccagtcaccggctcccccgactcctcccttaccccgagggcggatggttcccggggcttcggggacgaagacgcggagggcggcgtcggtcacaggcccttgggagccccgggactgcggggcgacggctgctgcccgcgaaggccgtttggttcaaatgcagccactcccaccggcaggattcggggcaggggggtcgcagcctctggcgcccggttcgctccggtgtcgtgaagtggtgggcgcctcggggcctcgcctggcctcgcgcgtgaggccttcgcggacgtggcggcgaagaggggtgagcgcggtgcccggggtctggctggctcaggccgaggaaagctcagcctcccgagtctccggcagtcgactgctcccggaccgggtcttcatggcaaccgcgagcggaggtggggcagggggcgcggcgcgagggccgttcccgcgggatttggcgggtgctacctgttgccgggagagtcgctcttcccccagcgcgcggagacacctgtttcagcccctccgagccagaggcctcttgcacagttcctggacctcaccgggcctgagtgcgtgcccttggctttgtttataaacatttggggatatttttgaggtagtctgacgtagttccgtggttttaactcacaagttcctgaagtccctgttaaaactacacattctttaaaatatttttaaaatatagtaataattttttttttgagacatggtctcgctctgtcgcccaggctggagtgcagtggcgcaatctcggttcactgcagcctcctcctcccgggttcacgtgattctcatgcctcagcctcccgagtagctgggactacaggcgcccgccaccacaccctgctaatttttgtatttttagtagagacagggtttcaccgtgttgatcaagttagtctcgaactcctgacgtcaagtgatctgccggccttggcctcccaacgtgctgggattacatgcgtgagccactgcgccgtctgtaataattttttttaataacagagacagggttcccattatgttgcccagggtggtctcgaattcctgggctcaaggagtcctccctcctcggcctcccaaagtgctgggatttcaggcgtgaaccaccgcctccagctaaaaaaaaatccttggaacccatcctagagatttgagttgctaagacccagtaatttgcatttttatcaggtaactggcgattctgatgcaatcagcccaaagaccacagtttgaaaaactctggtatagttgaaagacaactggtcctaattccacctctgcctttcctccttagggatttgcccttccttctttaggctaaggccatttccatttccagccagtggttagtaggatgaaggggaaagagagggcagcccatatttttcaatgacctgaaaggtgcacatatcactttggctcacattttattggtcagaactcagtcatatacccagcaaccaagaggctggtaaatgtgtccagctaaaaataagggaactattactgtagaagaaggagagaatggataatggggaaaaaattagcagtacagaactctaaccctgaccccttctctcagaaatccacccactttcattatccccggaatacgttaaacattccgtaacattttatgtatacatgcattcattcgttcgtttaacaagtatatattaaattcttgctgtgtccctggcattgtgttcagccctacaagtaaaataatgaatgtatagaaatgatcagacacctgaccgggcgcggtggctcacgcctgtaaccccagcactttgggaggtcgaggcgggcggatcacgaggtcaggagatcgagaccatcctggctaacacggtgaaaccccgtctctactaaaaatacaaaaaaattagccgggcgtggtggcgggcgcctgtagtcccagctactcaggaggctgaggccagagaatggcatgaacccgagaggcggaggttgcagtgagccgaaattgggccactgcactgcagcctgggtgacagagccagactccgtctcaaaaaaaaaagaaatgatcaaagaccttgccctcaagaaattaaagatggatatatttgtattttgtcaccttttcatttttgttataaagattcgtgtacatacctgcattaccccccttctgccatctttctatccacacaacacacacactctaaaatagtcttgttttatctttatcttttcatttttattatatatcttttttattcccagatgctagcaaaatatcactctctttcacatacagacattcacagaagattacaaatatggaaggtgtcttagaggtcatgatatattttatcatgcatcacccagtacacagtgatgtgaggcaatagctagctataaactttgaaatattgt

SEQ ID NO: 317169 - DNA, 4001 bp, Homo sapiens
acctggtacttaaacccagaatgtgcacctccaaatcgcacagctttctgctttgtcatgctgactggggtagtgctttgatcacctgtttggtcattgataagtatcagtgggtacaacacctgtgtctacccacacactggaagataaaacgattgattctcctattagtgacactgttgcagtataagcgggcttgtcagcaattactagcaagtaggagagaaaataatgtgaagaggtaagaagtctgggaatgaggatgagtaaacattgaaataactagctcaattatatttacagatatgcttcttgccatattgctcaataggataaagattattttgagtttccagtgtgagagatttttccatagttgaatttgcatgctatgccttcaattagattataaaaccctcagaggccgtttgaaaaactgctgcaccactaaatcgacttcttccaaagtgaaggctcctccatccaagctttcttatcattgggctcaaggttgaaagccagtaaaaagttttcttattgaagactgaaaccacccaccaccgtccctggttaatcataaaagaagcgttattctaaaaaactccagttctcgctgagacagctgttgacccaatttgtatacaaatgtgacactctgaacctctctggtttagtatttgatagcccaacagggtgactatattcaataaagattcaggctgggtgcagtggctcctgcctgtaatcccagcactttgaggggccaaggcgggagaatcagttgagcccgggagactgagaccagcctgggcaacacagtgagacaccgtttctagaaaaaatagaaaaaagccagatgcgcgcctgtagtcctagctacccaggaggctgaggtgggaggattgcttgagctcaggggttggaggctgcagtgaaccctgatcctaccactgcactctagcctgggagacagaatgataccctctctcaaaaaaaaaaaaaaaaaaaaaaacaaactgtacatttaaaaataactaagagtaactggattatggttgaatgcttgtggtgatgagtatctcatttaccctgatgtaattattacacatttatacctctatcaaaatagctcatataccccataaacatacacacctactatggacccacaaaaattaaaaataaaaaagaaaagcctctttggtccactcagtccaccacccgtattagaatgtaagagtttttttccttgggaaaagtgtccgacagaaccaaggctcggtaaaggatactaataatgtaataatataatattaacaaacatctactgagctttaaatacgtggcaggcactgtgctgtgcactttatgtgcattatccaaattaactctcagtaattccaggagttcttatcaccggggtctgtggaagaggaaatggtggtttacggcaatttccgaatgtcgcacagtagaaagtggaccagcaaccagggttgcagatcccaaagtccgggatcttcaccatttcacccaaccgccttagagacctcccagcaaaaggtctaagcacgaatgctccagaaaacaggtccaggtcacgcgtgccttctccctttccctctgggctcgacagtggtgcacagagcgactagggagtgggggccgcggttatttcattagaaaagctctggagccccgggagcccttcgtcccaggcgcacttgccctgcaagcccttctggaaggcggcagcgtccaggcggtccagcgcatcgagccgcgccaggcgcaccgagatgcccccgaatctgtccagctcgccctgcagatcgcacgctccaactggcggattccgcacgtaaccctgtgcgcccgaggcccagcggtaacccgccgaaggcccggggccgtaggttcgggcaagcatcgcgcgccagcggccccagctcagtggctgccgcatctccacgccgcttaattcgtccgttgcccaaatgacccctccgcgctccagagcggagatcgcggccgtacattttagaagagtgccatcaataccctcagagttgagctggggttaccactctgcagagctatgccaaggagaccgcgaagtggtccaccagcccttctcagcaatttgccccgctccagttaagcggggaaaacctcctcccccaccgccactcacttattttgtttggtagtttaattcaacagacgttggtttagggatggggaagccgggaggagatgcaaaaacgtcctgtttttcaggaatttacaatctaagtggcagttccgttcctggaacctatcttctttcacagatgccgttacagctgtttcaaagactgctggttttgaaaacgctcagtccctcccaccacgctgtgcactgctgcgctccactcaggggattacggcgcaggggcggaccctcgctgacttctgccccggaagtttttctctcagttgaagcgcgcacattgagtcggcttttctactgcttcggctagggtaccttgtgaccatgtcttccaagaagaatagaaagcggttgaaccaaagcgcggaaaatggttcgtccttgccctctgctgcttcctcttgtgcggaggcacgggctccttctgctggatcagacttcgcggcaacctccgggactctgacggtgaccaacttattagaaaagggtaaagaattccgggtgggagactagaggccgagggggcgcaacctgaggggcgggagactcagtgatactgacttggggtgcagagacttttgaaagttgggcgtggcatgggtctgagagcggcacagaagcgtgtaagacttctgtatgtaagaagcatgcaaacgtagccgcgcctgcactggagaagttaggctgaaatggtttatccgtgtccaaggtttctcttttgtaaattattttgaatttttaagttgcacttgaaacgctttgtctcatttaacattaacgacacatttaattgcaaaattgttcataactagcgaacatgggatacttatcctaaaaaactaaataaccaattcagtaaaaatgtggatcactctgcctttaggagtgatgatagcattttcttccagtactacgcaggttatgatatttaataactgctagtaactgcacactagtgttagcagtatatatagctcatctaatttctacagaagccgtgaccgatgggtatagtaatgacagttttatagagggaggaaagttaacgtgattccattcaggctacacaggtgctaagtggcagagccgatatttgagtccagatgtgtttgacttaaaagccattcctagatgacagctcctttgatttgggagaacgtatttatactgaaaagtcttataaattgaattaaaaattgaaaatttatatttgatgtgtaatagctttgaaaaatggaccagactagtggcaaaaacttttatgtctaatcagaccttaaagacaatttagagttcacatggtattttcactctgccttaggtatcagaggacaacttgttctgtcctgaaggttcaacttgtttttgaactagatccttcccattgacatgtaaacatgctcatttctcttccatcttaaatcagaacaaaagctccacattttcttcctgcaaccgtctctctatccattgccaagcttcttaaatggagtggtctctgccgcctcaccacttacatactctccctagcctattcctctttgacttccaccccatcattccatggaaactgttcctggtgtggtctccgagcatctccgtgttgataaaccttacgtgaccacagcaacttttggtattgttgaccattccctccttctcgaaacacttaacttcttatgtgttgtcaaacttgcctggttttcttcatctttgttgatgtttcatcatttttctttgcaggctcgtcctcttcccttgaccattaaatgttgaagttcgtcaattc

SEQ ID NO: 317170 - DNA, 4001 bp, Homo sapiens
caattagattataaaaccctcagaggccgtttgaaaaactgctgcaccactaaatcgacttcttccaaagtgaaggctcctccatccaagctttcttatcattgggctcaaggttgaaagccagtaaaaagttttcttattgaagactgaaaccacccaccaccgtccctggttaatcataaaagaagcgttattctaaaaaactccagttctcgctgagacagctgttgacccaatttgtatacaaatgtgacactctgaacctctctggtttagtatttgatagcccaacagggtgactatattcaataaagattcaggctgggtgcagtggctcctgcctgtaatcccagcactttgaggggccaaggcgggagaatcagttgagcccgggagactgagaccagcctgggcaacacagtgagacaccgtttctagaaaaaatagaaaaaagccagatgcgcgcctgtagtcctagctacccaggaggctgaggtgggaggattgcttgagctcaggggttggaggctgcagtgaaccctgatcctaccactgcactctagcctgggagacagaatgataccctctctcaaaaaaaaaaaaaaaaaaaaaaacaaactgtacatttaaaaataactaagagtaactggattatggttgaatgcttgtggtgatgagtatctcatttaccctgatgtaattattacacatttatacctctatcaaaatagctcatataccccataaacatacacacctactatggacccacaaaaattaaaaataaaaaagaaaagcctctttggtccactcagtccaccacccgtattagaatgtaagagtttttttccttgggaaaagtgtccgacagaaccaaggctcggtaaaggatactaataatgtaataatataatattaacaaacatctactgagctttaaatacgtggcaggcactgtgctgtgcactttatgtgcattatccaaattaactctcagtaattccaggagttcttatcaccggggtctgtggaagaggaaatggtggtttacggcaatttccgaatgtcgcacagtagaaagtggaccagcaaccagggttgcagatcccaaagtccgggatcttcaccatttcacccaaccgccttagagacctcccagcaaaaggtctaagcacgaatgctccagaaaacaggtccaggtcacgcgtgccttctccctttccctctgggctcgacagtggtgcacagagcgactagggagtgggggccgcggttatttcattagaaaagctctggagccccgggagcccttcgtcccaggcgcacttgccctgcaagcccttctggaaggcggcagcgtccaggcggtccagcgcatcgagccgcgccaggcgcaccgagatgcccccgaatctgtccagctcgccctgcagatcgcacgctccaactggcggattccgcacgtaaccctgtgcgcccgaggcccagcggtaacccgccgaaggcccggggccgtaggttcgggcaagcatcgcgcgccagcggccccagctcagtggctgccgcatctccacgccgcttaattcgtccgttgcccaaatgacccctccgcgctccagagcggagatcgcggccgtacattttagaagagtgccatcaataccctcagagttgagctggggttaccactctgcagagctatgccaaggagaccgcgaagtggtccaccagcccttctcagcaatttgccccgctccagttaagcggggaaaacctcctcccccaccgccactcacttattttgtttggtagtttaattcaacagacgttggtttagggatggggaagccgggaggagatgcaaaaacgtcctgtttttcaggaatttacaatctaagtggcagttccgttcctggaacctatcttctttcacagatgccgttacagctgtttcaaagactgctggttttgaaaacgctcagtccctcccaccacgctgtgcactgctgcgctccactcaggggattacggcgcaggggcggaccctcgctgacttctgccccggaagtttttctctcagttgaagcgcgcacattgagtcggcttttctactgcttcggctagggtaccttgtgaccatgtcttccaagaagaatagaaagcggttgaaccaaagcgcggaaaatggttcgtccttgccctctgctgcttcctcttgtgcggaggcacgggctccttctgctggatcagacttcgcggcaacctccgggactctgacggtgaccaacttattagaaaagggtaaagaattccgggtgggagactagaggccgagggggcgcaacctgaggggcgggagactcagtgatactgacttggggtgcagagacttttgaaagttgggcgtggcatgggtctgagagcggcacagaagcgtgtaagacttctgtatgtaagaagcatgcaaacgtagccgcgcctgcactggagaagttaggctgaaatggtttatccgtgtccaaggtttctcttttgtaaattattttgaatttttaagttgcacttgaaacgctttgtctcatttaacattaacgacacatttaattgcaaaattgttcataactagcgaacatgggatacttatcctaaaaaactaaataaccaattcagtaaaaatgtggatcactctgcctttaggagtgatgatagcattttcttccagtactacgcaggttatgatatttaataactgctagtaactgcacactagtgttagcagtatatatagctcatctaatttctacagaagccgtgaccgatgggtatagtaatgacagttttatagagggaggaaagttaacgtgattccattcaggctacacaggtgctaagtggcagagccgatatttgagtccagatgtgtttgacttaaaagccattcctagatgacagctcctttgatttgggagaacgtatttatactgaaaagtcttataaattgaattaaaaattgaaaatttatatttgatgtgtaatagctttgaaaaatggaccagactagtggcaaaaacttttatgtctaatcagaccttaaagacaatttagagttcacatggtattttcactctgccttaggtatcagaggacaacttgttctgtcctgaaggttcaacttgtttttgaactagatccttcccattgacatgtaaacatgctcatttctcttccatcttaaatcagaacaaaagctccacattttcttcctgcaaccgtctctctatccattgccaagcttcttaaatggagtggtctctgccgcctcaccacttacatactctccctagcctattcctctttgacttccaccccatcattccatggaaactgttcctggtgtggtctccgagcatctccgtgttgataaaccttacgtgaccacagcaacttttggtattgttgaccattccctccttctcgaaacacttaacttcttatgtgttgtcaaacttgcctggttttcttcatctttgttgatgtttcatcatttttctttgcaggctcgtcctcttcccttgaccattaaatgttgaagttcgtcaattcttagtccaaaaccttttttttcctctcaataaatcctgtctccttggcaagttcatccagtgcccagagtttcccatctatagtctcttcagtgtcagatttatatttgtaaatcttttgtttttgcgccttgatgtggttgccttttagccaaatgcttctcaagctctctgtggtgaagactttaaaatttataataggtcacagatcagcacttttctaaaatacagtaaaaatgattttctagaaaaataaggaaaaatttttattaaacagatgtgaaattactctgtaaatttcaataaaagcttctatatacttattctcctgttttgtacttgtcatgaagcagtaacaaatcgttgtgggtcatattttgaatagcactgtacaataac

SEQ ID NO: 317171 - DNA, 4001 bp, Homo sapiens
aagaatatgcaccaaggccgggcgcggtggctcacgcctgtaatcccagcactttgggaggccgagacgggcggatcacgaggtcaagagttcaagaccagatcagcctaaccaagatggtgaaaccctgtctctactaaaaatacaaaaaaaattagccgggcgtgcgcgcgccagtaatctcagctactcaagaggctgaggcagaagaatcgcttgaacccaggaggcggaagttgcagtgagccgagatcgcgccactgcgctccagcctgggcgacagagcgaaactccttctcaaaaaaaaaaaaaaaaaaaaaaacgcattagggagaaatgctattcctacaagctgagccgagctagaggtttcaagcttgaagtcagtgggcccaaggatcataaactggcagcgcgacaataaccatggaaatcactcagtcctcctccctccccaatctccaagcaaaaagtccaaaatagttatgtttgtctccaagataaaatcaaaagttttttagaaatgaaggggtaggacccctactgtgaatactggtgttaagagtacacagcagaaacttaggcttaataattttacagttcacacggaggaaataaacagctatactcagcagagaagttgctccaccactactgcaaagcctgaagcaaaaggcaggttcccagtctacccatctggtacctgctcacatgccctcaactgaaaccttcctatctaggcaacctggtacagagccaaaagtcaattagcgacccatgtactgaaaacaagacctattactcatattaatcaaaatatagacagataaccagtgcccatcacatgttcgagaaaaagcaacagaaggaaacaggaccaaaaagacacagaacaattgaccaacagtaagtaaattatttaggaaatagatttttctaattatcatctttgtagattcaagacttttaatatctataaaataagaaaaggctgctgcacctaggaccctgtgtttactaactcaaagaataaaaactggagaagggaagaacagaaggaggcagtgtaagacaccataaatccctaaatttaaccacaatagacaaattattaaaaaaaaggaggtagatagtaaatataatatattgtccaccctggaaaggggacagggggaatagtgattttacttttcattttacattttcaagttgttttaactatgtacatgtattaatactaataataatgttttaagtattaaccataaaaaaatggcacgggacaccaccaccccaaacaattgctatttaaactctctcgtgatactaacaatgatttacagagaatggcaaatttcaaaatcagaagtcaagaagggtccctgccactcgttttcctcaaaaggcagataaaatattttagagcctttttgaaaacttgtatatgactataaaaacccgagaggcaaagcaaagcctacagaatacgccagaaaaaaaagctgcttcccacccccaactcaaggtctagggcaaaggagccggtagtaggagggtggaatacctgaacgcctggatgccgcggcagcgcgaggacctgatagtcacagaggccaaggccagagagagagacaccgcggctaaagcctttcccaggaggcgtcccgccatgagcgccccgagggcggctttgcgatgctaggtcgctcttagttggtgcctccgcctccccacaccccacagctccgagtcccggccgcgggtatctgatgggcactaggacctgtctgccgttgggttcccgaacgggagtagctgtgcctatctataaatcacagatcaagagccctcccacgataagagtccaccgctttccccagtgcatcgagaaaaatccagaccagcacgtgacgccgaagcctccagcgccagctgcctggggaaaccgcggccacgaacctcgtaactttctctctgcgtaatggcgctttacggccgcgccgcaaagcaaaggtcgtgcgttgccggcttggtagcgccttccttctccgacttcccagacttcccagtctgcgcaggcttacttggggacgcagggaactaccaagaaagtgtcagaggaaaggaaaggtgaaacagacgaggaactggaacgggaataagtgggaaagaagccaaggggtttgagagagacttgctgccctgggtttttggtttttgttttttgagacaagagtctggctctgtcgcccaggctgcagtgcaggggcgcgatttcagctcattgccgcctcaacctcctgggcttaagcgagtctcttgtctcagcccccgacgtagctgggactacaggcacacaccgccatacctggctaatttttgtatgttttgtagcgacagatttttgccatgttgcccaggctggtctccaactctcaagctcaaataatccaactgtttgggcctcccacagtgctgaggttacaggcctcagccaacgcgcctggccctgctctggtttttttagggagtaagttgttgcggaaggacgcaggtcttagccatatttttgaataatacttcgttatgggaatgaaaccgcctttgcaaaattatgactgatttgggaggccgaggcgggatcacttgcagtcaggagttcaagaccagcctggccaacgtggtgaaacctcgtctctactaaaaatacaaaaattagctgggcatggtggtaaacgcgcctgtagtcccagctgctcaggaggatgaagcaggagaatcgcttgaacccgggaggtggaggttgcagtgagccaacgtcgcaccactgcactccaccctgggcgacaagagtgaaactacgtatcaaaaaaaaaaagaaaaaacctctgctccctgaatgctcagggagactgatttgagtaataatagaactccggtctcacacagctggctctgcatgaattactctttctctattgcaattcccctgtcttgatgaatcagctctgtctaggaagcgggaaaggtgaaccccttgggcggttacagcaagaggagatagtccagagactcagccctcgtatcttgaagggtttcttggttttttgtttttgttttcttaaccaagttgtctgctccaattgctggatttcattcacaaggctttgctaggaccagttgtggcccttggaaactcgtggaggagaaaagctgtgaaaataggcacacatgctggaggaggaacagagggcaacacacataatactggataataaacttgagaggcaaaaattaaacaaaccgacaaacaaagttggaaacccagactgtccaaagcagcttgtaatcaggcttacttcatttatattagcttattgatgtggcaactatttgacttttacttacatgatccgctgtttctgtggtgtggttccaatacaccgacgttacaaaactttgaccatcttaaaagccagattaatcgaattttaacaaccattgttctgaaaactgcagaactctcgacaggtattgactgttcaaactacactgtcaacctagacgctgaggcacgagatagaacttaaagcatttactttagccaaagtgaggacagctgcccagaagacccagacccaagtaaccttaaatgtgaactcctgtccacctttgttacaatcaggtttttaaaggcaaaaaggggacagggagttgactgatacaaagttgtaaagaattactggtttgtagaaatagtattggttagtggttggctatacgttaagctatagggtgcgagttacagtgtccagtgtaccattattaggttaatttttagctacttgtggctatagtaagcagtttaaagagatgaatgcataacaaagtggggagtaggatgtaattgctgtctcattttaatgtctctctgggcctggtaatttaaaaggatttaccttcctcatataaaagttcttttctcggcactgagagatttg

SEQ ID NO: 317172 - DNA, 4001 bp, Homo sapiens
cagagtaggacaaagtaaaataagaatatgcaccaaggccgggcgcggtggctcacgcctgtaatcccagcactttgggaggccgagacgggcggatcacgaggtcaagagttcaagaccagatcagcctaaccaagatggtgaaaccctgtctctactaaaaatacaaaaaaaattagccgggcgtgcgcgcgccagtaatctcagctactcaagaggctgaggcagaagaatcgcttgaacccaggaggcggaagttgcagtgagccgagatcgcgccactgcgctccagcctgggcgacagagcgaaactccttctcaaaaaaaaaaaaaaaaaaaaaaacgcattagggagaaatgctattcctacaagctgagccgagctagaggtttcaagcttgaagtcagtgggcccaaggatcataaactggcagcgcgacaataaccatggaaatcactcagtcctcctccctccccaatctccaagcaaaaagtccaaaatagttatgtttgtctccaagataaaatcaaaagttttttagaaatgaaggggtaggacccctactgtgaatactggtgttaagagtacacagcagaaacttaggcttaataattttacagttcacacggaggaaataaacagctatactcagcagagaagttgctccaccactactgcaaagcctgaagcaaaaggcaggttcccagtctacccatctggtacctgctcacatgccctcaactgaaaccttcctatctaggcaacctggtacagagccaaaagtcaattagcgacccatgtactgaaaacaagacctattactcatattaatcaaaatatagacagataaccagtgcccatcacatgttcgagaaaaagcaacagaaggaaacaggaccaaaaagacacagaacaattgaccaacagtaagtaaattatttaggaaatagatttttctaattatcatctttgtagattcaagacttttaatatctataaaataagaaaaggctgctgcacctaggaccctgtgtttactaactcaaagaataaaaactggagaagggaagaacagaaggaggcagtgtaagacaccataaatccctaaatttaaccacaatagacaaattattaaaaaaaaggaggtagatagtaaatataatatattgtccaccctggaaaggggacagggggaatagtgattttacttttcattttacattttcaagttgttttaactatgtacatgtattaatactaataataatgttttaagtattaaccataaaaaaatggcacgggacaccaccaccccaaacaattgctatttaaactctctcgtgatactaacaatgatttacagagaatggcaaatttcaaaatcagaagtcaagaagggtccctgccactcgttttcctcaaaaggcagataaaatattttagagcctttttgaaaacttgtatatgactataaaaacccgagaggcaaagcaaagcctacagaatacgccagaaaaaaaagctgcttcccacccccaactcaaggtctagggcaaaggagccggtagtaggagggtggaatacctgaacgcctggatgccgcggcagcgcgaggacctgatagtcacagaggccaaggccagagagagagacaccgcggctaaagcctttcccaggaggcgtcccgccatgagcgccccgagggcggctttgcgatgctaggtcgctcttagttggtgcctccgcctccccacaccccacagctccgagtcccggccgcgggtatctgatgggcactaggacctgtctgccgttgggttcccgaacgggagtagctgtgcctatctataaatcacagatcaagagccctcccacgataagagtccaccgctttccccagtgcatcgagaaaaatccagaccagcacgtgacgccgaagcctccagcgccagctgcctggggaaaccgcggccacgaacctcgtaactttctctctgcgtaatggcgctttacggccgcgccgcaaagcaaaggtcgtgcgttgccggcttggtagcgccttccttctccgacttcccagacttcccagtctgcgcaggcttacttggggacgcagggaactaccaagaaagtgtcagaggaaaggaaaggtgaaacagacgaggaactggaacgggaataagtgggaaagaagccaaggggtttgagagagacttgctgccctgggtttttggtttttgttttttgagacaagagtctggctctgtcgcccaggctgcagtgcaggggcgcgatttcagctcattgccgcctcaacctcctgggcttaagcgagtctcttgtctcagcccccgacgtagctgggactacaggcacacaccgccatacctggctaatttttgtatgttttgtagcgacagatttttgccatgttgcccaggctggtctccaactctcaagctcaaataatccaactgtttgggcctcccacagtgctgaggttacaggcctcagccaacgcgcctggccctgctctggtttttttagggagtaagttgttgcggaaggacgcaggtcttagccatatttttgaataatacttcgttatgggaatgaaaccgcctttgcaaaattatgactgatttgggaggccgaggcgggatcacttgcagtcaggagttcaagaccagcctggccaacgtggtgaaacctcgtctctactaaaaatacaaaaattagctgggcatggtggtaaacgcgcctgtagtcccagctgctcaggaggatgaagcaggagaatcgcttgaacccgggaggtggaggttgcagtgagccaacgtcgcaccactgcactccaccctgggcgacaagagtgaaactacgtatcaaaaaaaaaaagaaaaaacctctgctccctgaatgctcagggagactgatttgagtaataatagaactccggtctcacacagctggctctgcatgaattactctttctctattgcaattcccctgtcttgatgaatcagctctgtctaggaagcgggaaaggtgaaccccttgggcggttacagcaagaggagatagtccagagactcagccctcgtatcttgaagggtttcttggttttttgtttttgttttcttaaccaagttgtctgctccaattgctggatttcattcacaaggctttgctaggaccagttgtggcccttggaaactcgtggaggagaaaagctgtgaaaataggcacacatgctggaggaggaacagagggcaacacacataatactggataataaacttgagaggcaaaaattaaacaaaccgacaaacaaagttggaaacccagactgtccaaagcagcttgtaatcaggcttacttcatttatattagcttattgatgtggcaactatttgacttttacttacatgatccgctgtttctgtggtgtggttccaatacaccgacgttacaaaactttgaccatcttaaaagccagattaatcgaattttaacaaccattgttctgaaaactgcagaactctcgacaggtattgactgttcaaactacactgtcaacctagacgctgaggcacgagatagaacttaaagcatttactttagccaaagtgaggacagctgcccagaagacccagacccaagtaaccttaaatgtgaactcctgtccacctttgttacaatcaggtttttaaaggcaaaaaggggacagggagttgactgatacaaagttgtaaagaattactggtttgtagaaatagtattggttagtggttggctatacgttaagctatagggtgcgagttacagtgtccagtgtaccattattaggttaatttttagctacttgtggctatagtaagcagtttaaagagatgaatgcataacaaagtggggagtaggatgtaattgctgtctcattttaatgtctctctgggcctggtaatttaaaaggatttaccttcctcatataaaagttctt

SEQ ID NO: 317173 - DNA, 4001 bp, Homo sapiens
tgataatcacattgcagtaaccagtgaatgaacaaaataacaaacttcccaattaacttttagggagtaaataatgtttatcaaatgcatataattggcatgggcacaagaggcataacgtaagagactatggacgataaattcatatacgagcagctgaagaacaagtttttttctacagtgtcactatgtaaagtacccataaacctattttaaatgtatatatcattattgttttgcaaaatttctaatgagctgcaaacaacccacgtgcatatgaaaatcttcataattatctttttgaatgcaaagacgtctagcttaccttttagaattcgatgctatatcacataaaactaaactgctctctttgagcatttcccaaaattccagcaaagaactggggattctttctataattacaaatcttatagaaattacacatcttatagtatcctaatctgctgagttgaccaaagaaatacattattatcattataacacaagttaaaaaacaaaacaggttactgctgttcgtataagacttgtttctctttggaaacacaaggacaataaaatgaaatctcaatgaaagatgcagaaaaaatgaaaaatgactgcaggagtccaagaatcccaggatgggcttgactggtggtgagtttatactttggaagtcctacctaataattttaaagatctattcaaaattataatccaaatgcttatcatttggaagataagtgcacatttaataaaggaacactgtaacttgcaaaactttcctaaaccacatcttttaaggcagtaaaaacttgatacagatgtttttgattcgagataaggaaataaatttcctttccctattagacaagtaactgttctttcccaaactccaggaaccacaatattcttggactccagctcccaacactggttacacatacaacccgcagtatctacctgcacttgccagactgttaccaaaattgaacggagtcgccgaggtagtagaaacaccgaaattcccaatattaaagttcactgcaggattagcagttaatccgaaacccccaaaattaaacccactggcggtggagttggcagtctcaagcccaccaaatcctgataggcgtgtaggcaaagaaacaaaattttaaaaagggggagagggaaaaagaaaagaaagcaagataaggattagaagaatcagcaggaggtttcacagaagtgaacaaacctggttttgctccaaacagtttaagaaagcagagtgggggtggggtggggcagatggaagaagcatgacggataaaccccacagcgaggaccacagggggccgggggtggaactaagggagtcaatgggcagtgccggtggatccccagccctatcctcgccgagtccggcagcgggaaccacgcaagcgttcccgcccatccaggaggctgaggtgcagaggggagggaggttctcgggcaaggggagagggaagcaacctccaatttctctgagtaggactccccggcagcgggaagcgaaccgctcaagccagggccctgtggaaactcacgcgcggcaagcgagcttctagtgggaccccgagtacccccgtggcctcctcgggtgccgcctcggcccactctgccgccgcccgcccttttccaatgcctctaaagtctccgcgtcggcgggagattccaggatccccaggtcggagagtctcggacagagggggcggaccagacccttccccttcttcccgggtgaaggtctagggggatcactcacccgcgggggccgcggtggctgcagcggtaccggaggtgcccgagggagccccaaaattgaaggccatgtcgcgaaagcaggagaccaagtaggttactcctgcgacgcgcagcgcgctccccttctcagtccggccgggaaaccgccagtcagatcaccgagttccgcctcctttctgacctagcctaagaggccggaaggcgccaagggcgtaggaggtgggtggttgtgagggaacgcccccagccagctcacttccggtgggcttcacatgctgtggggtgtcactgttaaggtaaaatgctgggacgctcgcgagggtgtgccgcctgagagtcctttaaaaactgccgtagggaggttctttgggaaaggtgtgcagaggctgaagttgttactgtagggatacgcggtagacagctagaatttgtatgtggtagggttgaagttgctgcctcatcaactagcgggcctgggaggtcgggcagcagggctggggttgagaacccccccaacacccacgaggaggtggtatttgaacccagtgctgaaggatgagtagacggagcagaagcagtaaagaggatgcacgttggaagaaatgaaagcgaatggaattgtagcaaacacgttgcgtttactatgtgccaggcactcttctagacattttacataatttaatcagctatcttatgaggtgggttgctgctatctccaatttataaaagaggaaacaggtaccaaagggtcaggctgtttacagagtaaatactcctaaccacagctctaaggggagcactgaaaaagaggggaagagtgggccccctctgttgtacttgtaatataatttaatcctcagaataaataaatagagaagattctgtaactgtattttgcaggtgagatgagagaattgaggtttggagttgttaagcagcttgcccaaagtcaccttgcaggtaggttctggagtctggttttggactcatgtttctccactccagagtcccaatttgtaaaaattaccattatattatattgccttgtaaattatggtaaggatttcagactatttcttgagggtaatgggaaacctttaaggggttttaggcagaggactagtatgactagaattttgtttttagaagatccctctggctgccataaggagaatggattggaaggagccagaatgcctgaggaagatagagcttttaggagtctgttgtagttgcacaggtaggagatgataatgacttggattacatctggcagtggaattaggagaataaatttgagagatacttaagaaatagcatatatgagactcgtagtatttggacgtgggaagtaaggattcaaggacaacctcctgctttctggcttgggcaagttggtgaatggtggacccgtgtctgactcctacaaactgagtatgctctcatacccactgccctgccttctttcactgtttgtcacagataatttatcaatctaatttttccttacaatagtatatattccataagtgcaagaaccatgtccctcttgttccatgcccatcacaagtgcctggcatataacagggggaaataaataatgaatgaatgacagataggtggaaaccagatcttgaaagaccttccttagcatgttaaggagctttgatttaccagcagtttgtccagctgcggcccacaggccacatgtggctcatggcttaggatggctttgaatgcagcccaacacaaattcgtaaactttattgaaacattgtgaggttttttgcgattttttttaaagctcatcagctattgttagtgtattttatgtgtggcccaagacaattcttcttcttccagtgtggcccaaggaagccaaaagattggacacccctgatttagcacatagcctaacgcttaagtacttagcttaccttaaaaaaacaaacaaccattcttcttcttccagcgtggcccagggaagccaaaagattggacacccctgatttagcacattgtctaatggctaagtactcagcttaccttaaaaaaacaaacagccctcccagtctagcagaaaggaaaaccaatgattaatttatggaatctgccagaagctcaggaattggagatatcacgtatcttcataagttggggtaaagggaagttaaaatgagaggaactggttgaaagtctatttaagaagc

SEQ ID NO: 317174 - DNA, 4001 bp, Homo sapiens
aggggcatgactggctcctccctcctgtttgctttcctagggttaatctgtgctaaagcttttattcgaagaaactaggaaatttgaagaatcatatggacaggcttaaaaaaatgacattaaccttgagtactaactcaatattaagctgatagtataaattcagtatcgtttttatcttagaaattgcaaatctagacagcaagaaaaaaattacacatattagcagaattcttattgtattttagaagccacaagtttaaagaaaaagagtgatttagctagcttcacatcagcagattgaaacacatttcacatgacttttttaaaagctcagaactaaaaatgtctaacatttaaacattttctaacataattctctcacttaaaaatgttctagcaatattttaaagaagtaaccctcaacccttaagtcgcagattgccttaaataggctgaatatctccattttttttctttaaatccagatataggtacaaatcctagacgacatctttgagatacaatgattttttgagtgtaccatatcatcctaaaagcctccttaagttctttgaaagtgaactgtaaactgataaaaggacagtcgtgccgtcccccaagagtatatcgtctttctaatactaattagtgcatgttatcgttttgattctctccccaactccttctcataatgtaagctttacctcagacttctgctagtgctattttttccgaaacggtaattttctagaaagttacttttgttggtcttctccgaaagctttttcaagaaaccagaaccttgggttttcaaatgagaattatatccaatgatcgtttgaatgtggacttttctcctcgactcttttcgactcaaggcttgttagagtgcagaaaacgttaattctcaaatctttcacctctgtcagtctcccatggactcatagccaaacattttttttcctagaaaagagcaattcctgcagttttatcctgccccagtcaaatacatctttccttccccaactccccaattactgggaatgaaatctaacgttgaggactaaggactggaaggtagtgatgagccaggatttgaccgcccagcgttcaacctctgtggttgtgaatgcaacaagaaatcaacaagttttcatggagtgcctaccaggtgccttaagcaggaacatgactgagtaggccaagttttagatacagaagaccaagccctgtgacccaactgagatgagcccatcctgcgcgccccaccgcgaagcctgttccgggacccacagagggtgtccccctcgacctccggttcacaaaagtctgcttggcctctgcaaagggcaccatcgcacctgcaggaggagagtctcaaggaactcacctcgcctcagctggaaaaagtggccaaggaggtagccccgcactcaggaacccgcctcggggaggagagctactgtttgtgtttgcggtcatctcggagaagaaaccgctttaaaaaaaaaaaaaagggcgggggacaggaggtggtggtggcggcggcggcagaatggagcttccagaagggccggctaatgccttggatgtttcttggattgacccaggggaataacccggggtggagaatgggtgtcctaatagaagtgtgcaggcaaaaccggccagcgaggggagaaaaaaagtgattcaaattaaattcccacgcgctcagggcggccacggctttagctggaggaagggagcgcagggcgcaccgggctgtggggcggacacacactctccagctcccgcagcgctgacggacagaaggacggacgggcaaacccgagcgagggacgtaccttcagggttggcgctgatgaagacccggacgctgcggccggcgggcacgaggtgagagggcagggccgtgaggttcccagagaaagccgcccgccggagcgcagagtctcggggacagggcagcttggtgcccgcgccggccggccacatcgccctctgggaggaacagccactgccgccgccgccacctcctgctcctcgggttcctgcccgcagctccacggaacggctcagcaggcggtcgatctcagcaggcggcgcggctcagagccgctccgagcccgaagcgcctttggcgagctccgtggcgcacagcacccgccggcgaggagaagccatacggaccctcgggctcctgtcgcggcggtctcctgcccttctgggcctccgccttcgcccgctgctagggctccgagcagcagccagctggagcgggaggtcagcgtggcggcggctacgcgcgcagcgcccgtttgcgccgggaagcgccggcggccatctccccgcccgcgcccgccgtgggaggagggggccgccaggcggcagggaccgtgcgagcgaggagagcagatgaaactttatgtaccagaaggcgtcccgactttatccgagcccgcctctctcgggcgcagaaataacttgcggcttagaggacggccggggcttgggcgcgggggcctcgggggtgcgcaggagcctcctggactcctctgtggacagccgagggctcctgtctgcctccgtggtggaggacaagaaatcaattagcctgagatttctactacgccccctccaactctcctaaaggtcacacaagccctgagaattttcgggaatccacacgctcgggcgtctgtgcgtctctgcccaagtgcagggaatccagcctcaaagttcgacgcacacaaccccaagccagacccggagagtttaaagcatcaagtctccagattgtctctggcgtcctggagggacgatcgcttcatccctatctctcctggcgcaggtggcagcgtcctgccgctccggttgctccccacgcgcgcttgagcggggtttttatagccaagctgcgccgttcacgtgctcctcgccgcgtggtcccggaacctttctgggagcggatctccgcgggtagttcctccgaggcctccaaggttcctaggggcctttctgctcccatcaaggcgcactcaccggctgttctgctcgcctgacagctcccgggcccgtcggccgccaggttgctggagccccgcgcggccgggtgcgcacctgggccgggcgggagggtgtgggttctctggagcgccccccagcgcaacgttacgcaaagtgcaggtggccgtggattgggaccggggtgcgagaaatcggagctggctgtgggcagcagcttcttgtgtgcgcttcagccgctcttcaaagtcagtgcaacgcgtaggtcagctccacctgaagttgatccagggcggccacagaggacgcggggccgtcctcgggttccgggctcaaggtggacggcgcaggggtccagtccacgtcctaggtgacatgagacgcagagggacccagatgtaaaatcgccgtctcccttccactccactgcacccatggaaatactgcataagccaggacaggaacgaagacctcgcaaaataaagtgtaattgtgttgggggccaacggcgcagggagaagggagtgtttgtagccttaattgcagtttagtcaataaatcacttattctgggcttctgggcaggaacacctgtcttttagggaagaagaacagtttttccaaatctctgagattggggaaggggtgggcgggcacagggtgaggcagttcagacgcaagtgttctcttcttgcctggatggtcctaacctaagcagcccggcctcctctgggcctgcacttcctctggggcctgctggtggcagtgaagtcctatgcactgctgttcatttttttaccccaccccagccccaacacacacgttctggggtaacctctttggaagaattgggtctctaggtttgtaaggctgcctctccactcctgagaaccagggggcagacagcagcagttcttactttgtgataatttgatgcaacccgtaaagaaggcttgaacatacccagttatt

SEQ ID NO: 317175 - DNA, 4001 bp, Homo sapiens
caggctggagtgcaatggcgcgatctcggctcactgcaacctccacctcccggggttcaagcgattctcctgcctcagccttccgagtagctgggattacaggcacccatcaccacgccaggctaattttttgtattttagtagatacggggtttcaccatgttagccaggctagtctcgaactcctgacctcaggtgttccacccatctcagcctcccaaagtgctgggattacaggcatgagccaccgagccaggccacttatacactttcaacaaactttgacttcaaatagaattaatgctactatctgctagtcaggactggctacctaatgtgctgggcccagtgcaaaataaaaacgtgggactccttatccaaatgattatgaatttcaagataacaagactagaacatgaaaccaagtatggggcgctgtctgcacatgcccatgaagccagcccacctgccactgttactcaaggcagtgaaaattcctttacataggaagtgcttctaattataaatacttaatagatagttacggggaattggtcttggaacctctgcattcggctctcgaaaatcagccctcccattcatctttcctgtatcaaaaacattacatattaagtattagaaactatcactagataggtcaaagtaaatcaagacgtatgatatagtaaaactactagtctacacagcaatcaatcaacaaatatttattaaacactactatatcttacgtactccacatgtaaatagctagatgaaaaagtaacagacctactgattaatttggaactcactattcaggttaagtcccttaattgaaaaagcatatgcgttttataagtttataattttttttactatcaagatatcaataaaataacagacatattttttcctcctggaagtgggttctttcacatcctatgttttggtcgtttctcgaatctatgcccaatgattaggataattccccaaaatagaagagaaaaaaaatttcaagtcatttctgagcttccatattaaaaaatgaaataatcatcagaaacattcaacctctcccacaaaggagcactccaaaattatggaataacaaagacgacatatccttctccctgtgaggtaaaactaacagcaaattctgtatctccaaatttccttccaccccaagaatataagaaaaaaatgcataaaattccaagaatatacattttttatttggttctttttttaaaaactcatatattgggactcagaccaacagatcaagtaaccgtattttacagaacgtttacgtgggatcatgattattctcattttaaaaacaatttgcatggaaacaggaaatggcatacacaatgaggacagcaactgagcccttccataattcattcagtcaataagccatgaaggcctactacatgccaaccccttaattagagaaaagaaataaaaaaggtcagctgaattcatggatggatggagcctgctgaataaactacctttaccctacaaccgtatgagaaaaaatgaaaccctcttatttcccataacggcatccttcctagaaacaccaggaagactgtcagggctgacacggcgcttaagacaataccattttaagttctttacacaaaacaacgctggattaaagcctaagcggcctacaaccgctgattaccgcactccatcctccacccagtgtccgtctcccacctgccgttacagactgagcagcaaccccacacgcatccgtgaccacgaacttccccagctcacacccccagaagcactccgtcgcctcccgcagtcaccggcactcaggaggccgagacccgagcgcgatctgtccaccctcacaggcaggaaaatggcggaaggtgcgaaagtcgtggatggccgcaaaggtggtgaggggatacgcggagggcaacaacggggctgtttgcgtcacctcacccacctcccgacgacagcagcaggcgactgcaaggaaaaccaagcgatcaggggcagaaggcccggagggtggactcgagagggggcagggagggagaaaagtgcaaggtaccgcggggagggggaggggtagaacagccgcaagaagtcatccagacaggggctcaaaatgaccgcgacccggaggcactgtatacttacggcaggaaatgacgtcagacctcactgcgggtctgagagccagcagcctaggaatagacgcatgcgtatactcgtccctttgccctttcaggcagctgcggccacgagccgcactgcgactgcgcaggcgacagcggcggaccaagaaccctgccccgccccttccctggatggcggggaagggggttgggagtaggcttgactttgggctgttgtgatgcacctctctggtcttctcgtggcggctggcgggaacgttccggaaccctctgttgtccctcttttgagagcgactttataaattatctcttttatgagataatttcattctttgagcctgtaggctaagtagtagaaagtaatttttaagcatgcatacctggttatttgtcacaccctcttgatccaagtttccaacaagttctacaacctctggcagggtaccgtgatctctctgaggctacggtttttctcacctgaaaagtggaattacatatagggttgttagaattaaaacaacacatcactgtctattaatgagggggctcacgacttctacacatcagacatggtgctgccacacccagccaatcagcattttactcattttcatacattccttcctgaagtatttattagtgccatgtactgcaagttattagtgactaaacagtgggcaaatccagtcctactatttgtcaacccctcaaagcctctcaggtttctcatctctttctgagcccctttgccactttatcatttaacatttattctcccgaagacatacttaagggagacagtcacgtgaaacgaatccaacgctgtgtttccttccttggagtcttttgatagctccagtcatgcaccgaatataaggcccatcatggcctggtggtgcctgtgccttttgagcgtcactttcttctatttcagggttcactaacaagaaacagcctggaggtctttgccctcagtgttctctgtgcactgtttccccagtacaactctactccctgctttgtcaattctaacgatatttcaaaattctgcttttacatcaccacctttgtgatgccttccctgaaatacaccccagagaagtaatcactcttccttcttagtccttagcttgtccatactgctgtcactgcaatgtacttttgcactgaatagtgatcttttttacttacgtctgtctctgttacagagctcctttaggacagagatgttggcttgtaagtctttatagaaccaaataaatccctgagataatcagtattagtaactaatactcattttgttcctgggacaagctaatttacttctgggcccagggcttgtgcaattgctgttccctcttctagaccactgttcttccagatgttcaacgtggctttttgtctgagacttcagttgatgtcaccacatcagagaggcattccttgaccacccaattaacatggcaccccagtcactctccatgttaccttgcttattgttttcatagtatttgttatggtctaaaacaatgatttgtttgtgtattgtctctcttcactaaaaaggtctatgacagtaggagccgtatttgcctagcatcagtgattggcacatgatcatatgaagccaacaaatatttcttaaatgaatttgttgaatgcatttttataggagaaaaaacaaaaataagaaaattaaaagacattctagaagaaacaaaaataaaaaaattagaagacattctaggtggtgagctttatgttaaagcaaagttttttgttgtttttttttttaggacagggccttgctctattgtctagaccgta

SEQ ID NO: 317176 - DNA, 4001 bp, Homo sapiens
cctgacctcaggtgttccacccatctcagcctcccaaagtgctgggattacaggcatgagccaccgagccaggccacttatacactttcaacaaactttgacttcaaatagaattaatgctactatctgctagtcaggactggctacctaatgtgctgggcccagtgcaaaataaaaacgtgggactccttatccaaatgattatgaatttcaagataacaagactagaacatgaaaccaagtatggggcgctgtctgcacatgcccatgaagccagcccacctgccactgttactcaaggcagtgaaaattcctttacataggaagtgcttctaattataaatacttaatagatagttacggggaattggtcttggaacctctgcattcggctctcgaaaatcagccctcccattcatctttcctgtatcaaaaacattacatattaagtattagaaactatcactagataggtcaaagtaaatcaagacgtatgatatagtaaaactactagtctacacagcaatcaatcaacaaatatttattaaacactactatatcttacgtactccacatgtaaatagctagatgaaaaagtaacagacctactgattaatttggaactcactattcaggttaagtcccttaattgaaaaagcatatgcgttttataagtttataattttttttactatcaagatatcaataaaataacagacatattttttcctcctggaagtgggttctttcacatcctatgttttggtcgtttctcgaatctatgcccaatgattaggataattccccaaaatagaagagaaaaaaaatttcaagtcatttctgagcttccatattaaaaaatgaaataatcatcagaaacattcaacctctcccacaaaggagcactccaaaattatggaataacaaagacgacatatccttctccctgtgaggtaaaactaacagcaaattctgtatctccaaatttccttccaccccaagaatataagaaaaaaatgcataaaattccaagaatatacattttttatttggttctttttttaaaaactcatatattgggactcagaccaacagatcaagtaaccgtattttacagaacgtttacgtgggatcatgattattctcattttaaaaacaatttgcatggaaacaggaaatggcatacacaatgaggacagcaactgagcccttccataattcattcagtcaataagccatgaaggcctactacatgccaaccccttaattagagaaaagaaataaaaaaggtcagctgaattcatggatggatggagcctgctgaataaactacctttaccctacaaccgtatgagaaaaaatgaaaccctcttatttcccataacggcatccttcctagaaacaccaggaagactgtcagggctgacacggcgcttaagacaataccattttaagttctttacacaaaacaacgctggattaaagcctaagcggcctacaaccgctgattaccgcactccatcctccacccagtgtccgtctcccacctgccgttacagactgagcagcaaccccacacgcatccgtgaccacgaacttccccagctcacacccccagaagcactccgtcgcctcccgcagtcaccggcactcaggaggccgagacccgagcgcgatctgtccaccctcacaggcaggaaaatggcggaaggtgcgaaagtcgtggatggccgcaaaggtggtgaggggatacgcggagggcaacaacggggctgtttgcgtcacctcacccacctcccgacgacagcagcaggcgactgcaaggaaaaccaagcgatcaggggcagaaggcccggagggtggactcgagagggggcagggagggagaaaagtgcaaggtaccgcggggagggggaggggtagaacagccgcaagaagtcatccagacaggggctcaaaatgaccgcgacccggaggcactgtatacttacggcaggaaatgacgtcagacctcactgcgggtctgagagccagcagcctaggaatagacgcatgcgtatactcgtccctttgccctttcaggcagctgcggccacgagccgcactgcgactgcgcaggcgacagcggcggaccaagaaccctgccccgccccttccctggatggcggggaagggggttgggagtaggcttgactttgggctgttgtgatgcacctctctggtcttctcgtggcggctggcgggaacgttccggaaccctctgttgtccctcttttgagagcgactttataaattatctcttttatgagataatttcattctttgagcctgtaggctaagtagtagaaagtaatttttaagcatgcatacctggttatttgtcacaccctcttgatccaagtttccaacaagttctacaacctctggcagggtaccgtgatctctctgaggctacggtttttctcacctgaaaagtggaattacatatagggttgttagaattaaaacaacacatcactgtctattaatgagggggctcacgacttctacacatcagacatggtgctgccacacccagccaatcagcattttactcattttcatacattccttcctgaagtatttattagtgccatgtactgcaagttattagtgactaaacagtgggcaaatccagtcctactatttgtcaacccctcaaagcctctcaggtttctcatctctttctgagcccctttgccactttatcatttaacatttattctcccgaagacatacttaagggagacagtcacgtgaaacgaatccaacgctgtgtttccttccttggagtcttttgatagctccagtcatgcaccgaatataaggcccatcatggcctggtggtgcctgtgccttttgagcgtcactttcttctatttcagggttcactaacaagaaacagcctggaggtctttgccctcagtgttctctgtgcactgtttccccagtacaactctactccctgctttgtcaattctaacgatatttcaaaattctgcttttacatcaccacctttgtgatgccttccctgaaatacaccccagagaagtaatcactcttccttcttagtccttagcttgtccatactgctgtcactgcaatgtacttttgcactgaatagtgatcttttttacttacgtctgtctctgttacagagctcctttaggacagagatgttggcttgtaagtctttatagaaccaaataaatccctgagataatcagtattagtaactaatactcattttgttcctgggacaagctaatttacttctgggcccagggcttgtgcaattgctgttccctcttctagaccactgttcttccagatgttcaacgtggctttttgtctgagacttcagttgatgtcaccacatcagagaggcattccttgaccacccaattaacatggcaccccagtcactctccatgttaccttgcttattgttttcatagtatttgttatggtctaaaacaatgatttgtttgtgtattgtctctcttcactaaaaaggtctatgacagtaggagccgtatttgcctagcatcagtgattggcacatgatcatatgaagccaacaaatatttcttaaatgaatttgttgaatgcatttttataggagaaaaaacaaaaataagaaaattaaaagacattctagaagaaacaaaaataaaaaaattagaagacattctaggtggtgagctttatgttaaagcaaagttttttgttgtttttttttttaggacagggccttgctctattgtctagaccgtagtacagtggtgccatctcggctcactgcaaccttcgcctcccagattcaagcaattcttgtgcctcagcctcctgagtagctgggaccacaggtgtgcaccaccacgcccagctaatttttttatttgtagaagagacagagtttcactactttaccagcctggtctccaattcctggcctcaa

SEQ ID NO: 317177 - DNA, 4001 bp, Homo sapiens
attttttaaactcaaataataaaacaactggcttatgcactttttttgttttttgagacagtgtttcactcttgttgcccaggctggagtgcaatggcgcgatctcggctcactgcaacctccacctcccggggttcaagcgattctcctgcctcagccttccgagtagctgggattacaggcacccatcaccacgccaggctaattttttgtattttagtagatacggggtttcaccatgttagccaggctagtctcgaactcctgacctcaggtgttccacccatctcagcctcccaaagtgctgggattacaggcatgagccaccgagccaggccacttatacactttcaacaaactttgacttcaaatagaattaatgctactatctgctagtcaggactggctacctaatgtgctgggcccagtgcaaaataaaaacgtgggactccttatccaaatgattatgaatttcaagataacaagactagaacatgaaaccaagtatggggcgctgtctgcacatgcccatgaagccagcccacctgccactgttactcaaggcagtgaaaattcctttacataggaagtgcttctaattataaatacttaatagatagttacggggaattggtcttggaacctctgcattcggctctcgaaaatcagccctcccattcatctttcctgtatcaaaaacattacatattaagtattagaaactatcactagataggtcaaagtaaatcaagacgtatgatatagtaaaactactagtctacacagcaatcaatcaacaaatatttattaaacactactatatcttacgtactccacatgtaaatagctagatgaaaaagtaacagacctactgattaatttggaactcactattcaggttaagtcccttaattgaaaaagcatatgcgttttataagtttataattttttttactatcaagatatcaataaaataacagacatattttttcctcctggaagtgggttctttcacatcctatgttttggtcgtttctcgaatctatgcccaatgattaggataattccccaaaatagaagagaaaaaaaatttcaagtcatttctgagcttccatattaaaaaatgaaataatcatcagaaacattcaacctctcccacaaaggagcactccaaaattatggaataacaaagacgacatatccttctccctgtgaggtaaaactaacagcaaattctgtatctccaaatttccttccaccccaagaatataagaaaaaaatgcataaaattccaagaatatacattttttatttggttctttttttaaaaactcatatattgggactcagaccaacagatcaagtaaccgtattttacagaacgtttacgtgggatcatgattattctcattttaaaaacaatttgcatggaaacaggaaatggcatacacaatgaggacagcaactgagcccttccataattcattcagtcaataagccatgaaggcctactacatgccaaccccttaattagagaaaagaaataaaaaaggtcagctgaattcatggatggatggagcctgctgaataaactacctttaccctacaaccgtatgagaaaaaatgaaaccctcttatttcccataacggcatccttcctagaaacaccaggaagactgtcagggctgacacggcgcttaagacaataccattttaagttctttacacaaaacaacgctggattaaagcctaagcggcctacaaccgctgattaccgcactccatcctccacccagtgtccgtctcccacctgccgttacagactgagcagcaaccccacacgcatccgtgaccacgaacttccccagctcacacccccagaagcactccgtcgcctcccgcagtcaccggcactcaggaggccgagacccgagcgcgatctgtccaccctcacaggcaggaaaatggcggaaggtgcgaaagtcgtggatggccgcaaaggtggtgaggggatacgcggagggcaacaacggggctgtttgcgtcacctcacccacctcccgacgacagcagcaggcgactgcaaggaaaaccaagcgatcaggggcagaaggcccggagggtggactcgagagggggcagggagggagaaaagtgcaaggtaccgcggggagggggaggggtagaacagccgcaagaagtcatccagacaggggctcaaaatgaccgcgacccggaggcactgtatacttacggcaggaaatgacgtcagacctcactgcgggtctgagagccagcagcctaggaatagacgcatgcgtatactcgtccctttgccctttcaggcagctgcggccacgagccgcactgcgactgcgcaggcgacagcggcggaccaagaaccctgccccgccccttccctggatggcggggaagggggttgggagtaggcttgactttgggctgttgtgatgcacctctctggtcttctcgtggcggctggcgggaacgttccggaaccctctgttgtccctcttttgagagcgactttataaattatctcttttatgagataatttcattctttgagcctgtaggctaagtagtagaaagtaatttttaagcatgcatacctggttatttgtcacaccctcttgatccaagtttccaacaagttctacaacctctggcagggtaccgtgatctctctgaggctacggtttttctcacctgaaaagtggaattacatatagggttgttagaattaaaacaacacatcactgtctattaatgagggggctcacgacttctacacatcagacatggtgctgccacacccagccaatcagcattttactcattttcatacattccttcctgaagtatttattagtgccatgtactgcaagttattagtgactaaacagtgggcaaatccagtcctactatttgtcaacccctcaaagcctctcaggtttctcatctctttctgagcccctttgccactttatcatttaacatttattctcccgaagacatacttaagggagacagtcacgtgaaacgaatccaacgctgtgtttccttccttggagtcttttgatagctccagtcatgcaccgaatataaggcccatcatggcctggtggtgcctgtgccttttgagcgtcactttcttctatttcagggttcactaacaagaaacagcctggaggtctttgccctcagtgttctctgtgcactgtttccccagtacaactctactccctgctttgtcaattctaacgatatttcaaaattctgcttttacatcaccacctttgtgatgccttccctgaaatacaccccagagaagtaatcactcttccttcttagtccttagcttgtccatactgctgtcactgcaatgtacttttgcactgaatagtgatcttttttacttacgtctgtctctgttacagagctcctttaggacagagatgttggcttgtaagtctttatagaaccaaataaatccctgagataatcagtattagtaactaatactcattttgttcctgggacaagctaatttacttctgggcccagggcttgtgcaattgctgttccctcttctagaccactgttcttccagatgttcaacgtggctttttgtctgagacttcagttgatgtcaccacatcagagaggcattccttgaccacccaattaacatggcaccccagtcactctccatgttaccttgcttattgttttcatagtatttgttatggtctaaaacaatgatttgtttgtgtattgtctctcttcactaaaaaggtctatgacagtaggagccgtatttgcctagcatcagtgattggcacatgatcatatgaagccaacaaatatttcttaaatgaatttgttgaatgcatttttataggagaaaaaacaaaaataagaaaattaaaagacattctagaagaaacaaaaataaaaaaattagaagacattctagg

SEQ ID NO: 317178 - DNA, 4001 bp, Homo sapiens
cactgtgcactgagtgtcgattatgtgccaggccaggggatatgaagaaggataagacaagatcaccgctgtgaaggaattcacagtccaaaaggggagatagacaagtcaacagttacacaacatgaaaagtatgcatgggatgctaaggaagaaaagaaagcagggtccattccatctagtcatgtcacaaaggaactaggactcctaagctttcaggaggatctgtggagggtagatggactctggggcaggaggaccaggttggaaggtggtacactagtccagacaaggagttacagggacgtgaacaaagaccctggtgggaatttagcatctttgatagagatgctaaatttgggtttggaaatgttggatttgggtgcctgtgggggcaaacagtggaattagccactgttaatatttgacgatttgggtctagagttccagaacaggggtaggctagagagatgaagttgggagctgccatcatagagatgagagttaaagcagggaactttaataaatgtgtctaaaaacagtactggagaatatgaacactgagcccaagggaatatcgaaaagagaagaaagattaaaaaaaaaaaagcaggccaaggaaatgactgagaaggaatagctgatacagaggggagggaatttctgaaggagggagtgaatcatcaacaccatcacatggcttagaaaagtggaccctggatttggcaatgatggacataatccaggtggactttgagcctcctcctgcccccagtggccactgcattctgcagccctgaactctacctctacctctgcttttcttctgcaaaatgaacctcttatatacaattctgtttcctacatcagttactaaactttgaggcatttgagccaaggggacccgtactcgcaccaagtttcatcacaggtgtctaatgtgattacaggggcagcacggtgccctgcacgggaaagtactggggtcagagagaccagagttcaaatcgtgactctttacccctgcgatccctttggtgcaaatgacttaatccgtctctgcctcagctttctccactgttaattgggcataatggacacaacaatggtgaggggctcttgcaggaatgaagactaggatgaggatgaggatgagggatacgtccataaagcccctgcacaccttccatttcctgagcactcccaggaagtctttgctgaccacgccaaattagattatctttgcttagccattaggccgctgccctatattgggaggcaaatatacctctcagcttcggtggccaggtcccctggcacccacttagtcctcagtctgcacctaaaagcaagccttccgagggtcttgccttgcaggtgtagctcccaccccccacgctggggtggtccggggaccctctgtttcctcagtggtggggaagggacccgtgggttcgtgggtgctgaccgacgaatgtgcggaggagggcgcgccccagcatggggggcgggggtgcttcttaggatggcttggaggggggcgcctgcagggctggacggcggacgggggacactgcactttctgatgcggtcggggaagccgggagtcagcctactggagtccgctgccatccctggccagaagcagccagcgccaccccaagctccccagcccctcgcccgtgccggggccgccggggtccgagttaggggagagtggggggcggccaccgctgcaccgcgcggccttcgaaggactgccctgcggcgccgcgttcccccgaggccaccccctcccgccgtcaacactccccggggcgggggctcacctgtgtggtctgggtcgcctccgaggccgagtccctcgttgccaagcccagcaggcctcgctcccccgtgactgcaccgccggcccgctccagcttcccgagtaccccacctgtctccccggcttccttccggccctttgtgttttcttctcttgctccgccccctcgcctgcccgctaagcacttaagctggtgaagtcaccctactgccacctggcagtcactttcgctgttggtggcaacccaggctggaacccagctcttgccggaacccctgccccatccttgaggcttgtcccgacaccgagtaggttctagttcctttgtgccttccaaatgactcccttcctccagcaatcacagccgcaacagccatgtattgcgcccccgccctaggccaggcgtgggcatcacctttgcactcctttctgcagccgtgtgtggtgcccactgtgacctgcacttcacagacgggtcatctgagttgtgcaggccactaagggagcctggagtcaaccccaggcctgcttggctcccaggccttctctttccattgctctttgtcggtcccctgctgcctcctgtccctccccaactctgacttgtggagggaagcctttgacatgtgggggtacctttaataccgatatcacttgttaccggagaggggtcccgatccagaccccaagcgagggttcttggacttctcgcaagaaagaattcggggtgagtccgtagagtgagagcaagtttattaaggaagtatagaaaacaggccgggtgcggtggctcacgcccataatcccaacactttgggaggcaaaggcaggcagatcacttgagctcaggagttcagaccagcctggccaacatggtgaaacactctctctactaaaaatacgaaaagttagccaggcatggtgctctatgcctgtaatcccagctactcgggaggctgaggcaggagaatcgcttgaactccggaggcagaggttgcagtgagccgagattgcgccactgcactccagcttgggcgacagagccagactctgtctcaaaaaaaaaaaaaacaaaaaaaaaacaaaaaacaagaagaacaacaacaaaaaagaatggctactccactggcagagcagctgtgtgggctgcttagctaattatactggtagttatttcttgattctatgctaaacaaggggtggattattcatgaattttccaggaaaagggtgggcaattcccggaactgagggttccttcactttttagaccatatagggtaactttctgacgttgccatggcacttgtaaactgtcatggccctggtgggagggtcttttatcaggctaatgcattaaaattagcatttaatgagtaatgaggacgaccagaggtcactttcatgaccatcttgattttggtgggtcttggctggcttctttactgagtcctgtttcatcagcaaagtctttgtgacctgtaccttgtgccaaccttctatctcatcctgtgactaagaatgctgaaccacctgggaaggcagcccagtaggtttcagccttattttactcagtccctattcaagatggagtggctcttgttcaaacacctctggacacagttaccccagccatggctgacaaagttttctgggctgagctgccaggactgactgagtgtgttgacttggagagaggctgtggatctccactgaaggccctcttcatttctcaccttttcctattgtgcgaattggtccctgtacctgtggccgcttcctcctcacgcctccccgatccacacctccaacttgttgtttctcagattcacacagctcttttccactggaggccctcccctgcctgcagcctctcccgattggtcctgtcctggctttttcctactccttctttttgactgttcctcaggaaaatcttccttgaccccagcctaaggcaggcctttcttctttttcatagcacaggacactattgttttccttcatagcacttatcacaactcattatgtacttattagtgtgttcatttatataaagcatattttccctgctgcagagtaatcttcatgaggttcagaacaagatggtgtcagttttgttcaccattgtgtagcatcttggatatagaaggggctcaataaatatttgttg

SEQ ID NO: 317179 - DNA, 4001 bp, Homo sapiens
aaatccctgagctgcttttcctagagctagccatataaatttatcctttgtgttaacaagtttccacaacaaaaagtcatccgttacatgtgctgacataaactgcctattattgaagttttcctatcttatcctagacttgtttttaacttttttggcttgttgctgtatcctagagtagctgatttaaatattttttgtcttagaaatcagaaaataaaagaaagaacttacagcgatggtagaaacatataatgagaaaaaatattgttcaaaaacccctgcctatttcaaagctgattcatattcattgtcagattaaacatgcagttctctctcctcagaacaaaatgaaagaggcctgacttacgtgactggggcctggttgtgtctgaggcggtgtttgaagctgtaagggatcaacttggcctgcctgggctccttgggcaaaactggcctctcctgttaagggtatctgatttgggagcagtccagcaaactggtctagagctgataaagagaactgggagagtcctggaatttgagcctgctgctgctgttgtaaaattccagagaaaggtggaatccatgaattaagtgggccctaaaaagacacaaaggaaagaaagcatgttcccttcatgccaaaaagaatttaaaaattagtcctgagcaagaaagaggcaaaatacaaacaatttctatagttccaatgttgcaacataaaaaaggacagcatcttgattcattttgaaccaagcaaataatacgaagcaaatgctaaattcccgatggccatgagaaatatggggcaggataaggttgataaaagagcccaacatctgcatatgccacactggttttaaaccgtctgtattttcccctaccttaaccctaaacctgccaacctgctgttactggttaactgggcatgactttttgtaaaataattacttttaactatctcatagttgtgagaattagtgcctggcatataccaagttctcaataaataagtgttgttcaaattacagtttttactttaatcttcaagcaaatggccactagaacatatgagacaaattcataatgttaaaaactgagatttccaaaataggatcaggaaacattttgttttcttacaaaataacataaatgagcaataggtaaatattccccataaagtaattattgaaatggaggtacctgaagttgtagtggcaaaagttgaccattattaagattaagaagtaactagaaaaagaaaaataatatgaaatcaagattactacacactaaaatgagtaggaacaatgtttactgcaaatatagcacaagtcatagctggttgctcaatttcttgttagaagtgggacattttctcactaggcttacattaaattacagtgattagaagttagatttaaaacaaggttgggatttaacaacctctcctctgttgggtatgagattgcacaacgttagcacattccagtggtttagtcattttatgtttttaaacacctatatacacctgtgtgaggtgttattagaacaaaaagatataaacaatattgtatccgcctttgaagaattaacaatcaatcaagggaagcagaataatattttagaggtaacctgttatataatcaaacatggacattagaaatgtgcttggatatacataaaagctagtggtgaggaacacagtataaattaaatgacgacttctatctcttcccacttgatttccattaaaaaaaggaggagattgttttaattatttaaactaacctcattgctattgctggcagacatgagacgctgtgggataagctaaaagtaaaaatgaaaaaaaaatcagaaatagtaaaaagaagggattgttgaaggtttaacacagtgggactagtagtgccataaaatcacttactggggctgacaatgtggctcccaggaatccaagaagaattataattttcattttcgtatgatatatctagaaaataagttgtgatctttagctttataaagacattacttaaaattcatgacaaaataattagtattgttcaatcaaaggaatagctgggtgaattctatagtatttacttacattttgcaatttaaaatttaaaaagttatgtttgtaaatttctgatataactctttattttctctcagacaagctgtttataaaaaccaagattgtttgcttgtccttttagcttgaacaaaatactcatttggagacatatgatgtggttgaatgcattaaagaacaagatgatctcctcctagtgctgccctacaaggagaggagcaggcccatcagaccatgggaggtcatgactaaggctaaccaactagggacttattactgcagcaattttaatgtctatgttgaaaagtacttcaatagagatttgacaataccagtccaataccagataatttccacttagtagtctaataacagaataatatactagaactaagcaactgagtcaatgtttttgtaatttatggcaatagattataaaactgaactgtgatattgatttatggtgtaacctgtttaagtatatttctcttgtcttctagatgtgaaacttttttccctgcttcaaatcattgacctaatcaagcatttagggtgaacttgatagtctatcctgcagatttcactgattttggttcttcaaactataaaagcaaagatttgatatcttaccttactcctggacctaaaaagaaaaatctgaaccatgcgagatctgtgttcttttcctctctcagctctactgcttggcacttctcttaaattttaaaactcatctttagaaaaaaaggaccaatcattgttcaaaaaggaccagtgattcagtgggtttcagacaatggcttagctaataacctctttcctaatcatttaggtggtatatggattcccacacttttagtaatgttattaaattatcccctgagaaatgttttcctgtgatcatttctggcttctggtttggttatgagtaattctcctagaataattctcctagaataattctattctactcttttataattcttaaactggatactctaattgaataaaactggatactgtaactgaataaaagttaatatctttaataaagtcaaggataaatgggtgattatttttacttcaagggcgaaatacagaattgttaggaatcataggtctgaaaagcaaaacttcaaagcctacttagcagaattctttgcttcctcaatgctgggctaagtaaatgtgggctagtttcctttagatttgaccttgaaaacatcagttattctccctctacttactgaatgcagtccttaaaaaattgctaaatttccatgtgtctatgaaatgtatttgtatatgatcatgttgcttgaaataaataatttaataagtataaagcatgatatcctacattttaaaaaatagccgtgaatacatgtttttattgaaaaatgtttttgttatatattttaatattcaaaatacaactattactctctgcacattgttattatttaaatttccttcataatgggagttttgtgtttatttgtagtttttttgttgttaatatcgactcccctctaatagttcaggatcacaagtgttttgacaatgtattatcaattaatttttattatggaagagttctttttagctaacttaatcttgagcaactcatgatagtcttatgcaggaaaacaaaattattgccttttaatacatttgtcttttttggtagaatgagacagagcttgcatggctcattaatactaaaataattatactatttgttatttatctggtcaaaaaatccaagtacataaatcattagttagaataaaaagacatttttctttactaaagaagaaaacccaccagtaggactttatatctattagaaagtattaaattgaattacgtttagcctaaagctgcctccatacat

SEQ ID NO: 317180 - DNA, 4001 bp, Homo sapiens
agcaacaaatagtttatttataaaggtgcactcagtttttagaagagacttcttcccttccagtggcaaaaccaattcatcatacaagatacctcatagacctggccactaaaaagcaacctttccactttcccccaatggttgggacaaagaatctccccattacaataatcaacaggagaaaaaagagggccacaaagaaaactgaggcttctcgcaaagaatccgactccaagggaagtaagggttacaggaaagaaactagcattattcattattattattgaataatgactttttttttgtccaacgaccttcgtgaactgtgcaaaaatatggaacgcttcacgaatttgcgagtcattcttgcacaggggccatggtaatcttctccctatcattccaattttagtatatgtgctgccgaagcgagcactcaataataatactgaattattctatattatttatttttaaaagtctattatttttaaaagccacatgcattttaaattttgtttattcagtacagtagctattaacttgatgagcaaatgttaatggttaatgctaatgcaatgctagatagtatcttgttaccaaataagtatttaaatgtaactcaaatatttaaatgtaatttatttaaatgaacgtaagttaattctcactattctagattgggggaaggaggtaaattcaaaggtgctttctagaactcagctctctcagtttgaatcctcccccttcagtgccaactattctcacaaaacatctatgaaaataacaattatatggccactcccttaaaagtagaactacttttgctatcccaaatccgtagctttaattttataatttccaggttaagtacaccacttcccaaaatctaaattaattttataatttccaagttaagtacaccacttccccaaatctaaatgtacacagtagcacagttctaagtaaatcttggaactgtggcctgaaagggtagtggctctgaaaagactagccggattgccaactcaccagtacataaggcaacgcccctttgcaattttctatttgaaaaggacagaataagatgatagacaattcagaagcgtttaatagtaatgctatttatcttatttttttaattctcaacttctgcccactgaaatacagtatcgtctgcaaatctcatctccaatctcaaatatttatcaaacctgtgatttcagaaaattccattgatatttattgtaggtcatgcaaaaggcaacacagaaccctaggtttgagccaacaaaactaaagattgtcaagtctcttccaagattccaggacaaagataagtttaaaagtcccacaagctcttgaccaaccatggaagcggagttggccaaattagaccttcccaggacctttatcaaacaaccaaccatggaaacggagtttgccaaattaggctttcccaggacatttatcaaacaacgtatggcaagcaacaaaaagagcaacaatttggccttgaaaaatatatttgactcggatccctgggatgggagggctagaaggagaagaaaggcaatgggagtgagaacacgaattctcttaagacagggcgtgaaggcgaataaacttggacgttaacacttcggaccccagaactcccctccaccctcagaaaagatccaaagcagagctatgcttcccccggggctgagagtcagcggaacagacgcgcctcccggggcgggtcagttctccgctcctcagcctctcgggcccgacagcccgagttacctccggtgatgaggaagtaagacaccaccaccagagcatacacagtcatggccgacggcatgtgcaaccagggcggcttcttcagcttcaggttgggacattcgagcactaagaacgggacacggtacaaagtctccatgttggtggcagcaagggccgttctcggcctcaagccccacgcgcctcccggaaacaggcccgccctccctaacaagtgcgcgtgcgcgaggaaaggacccgcagatccgtaaagctcggaggtggttactatactcatagaagaaaataagaaactaaataaaacaaataaatgatatgaataaagtgttgtaaattatttaatctaattaaacttacattgtgataatgtactctacatttttctaatggatatataggtgatttgtgtaccttcaaggacctgcgggacttctaacgtggccaagccggagaagcggaggccaaggaatctaggtgagccccgcccactcgctgacgcaggggatttgaaagctgattggacagggggcgctcccggttcccagagcgggagatgaatgggaacttttggatataaatgccttttatattagaggttttttcaagggttaggaaaagccggaggctgctgagcttttacttcccgatgtagtcgtggtaataataagaattaataatagttgctaaagtaatatgttaccaattttttttaaacatccagcctggatcacaaatgtcaacaggacatctctacagggatgccttaatgctgatagcttggcgtgaccataatactattttgaataactcatcctctcaactttgctcttcccttggtcatctgtatgtcgctaaaaggtaaaatccctctggccaaaaatcttaaagtcgtctggatttctctccttactaaccttctgcatccaaaatattagtaggtctctttggctgtactaccaaaatatctccaattcatctgcccctcaccattccaccactgacaccctagtgtgaaccaccgccatctctggtctgggcaacatttacaatccaaatagatgaaaatatatgatggagaattagtcattagggatggactagaaggtctaaaagattttttgttttctgttttgcttttcttttttatataatcttttaagactctacaaatgttaacttccttttggagcaagagttaagagtcactgattacataagtccagagcatattgacacattatagagccaatgtttttatatttttttatttgcttgttactaagcccgtggttatttttacaggatgccatgtattggttctgcacttctaattagctaacaactcaattgttaagaaattgcttgaagacggtaatgaaaatactatcaaaacattgtagtatccaattctaagtacagttgaggcttgctgcccttactgttcattagtgagagtctctcccagagtcatattgcctatgtcttaacggagccacacgaatcttaggttatgtaaaggccaatgataacaccaataatgaatgcatttacaccaaaaccagcgtttatatgtaggaagtttctctgggcactgtaaagcagaatgtttctgaaattcccacagttttataagtaaggaacactttggaacaattaaaatattttgctttggtatgaagaaaaaaataaaaataaaacattttgctttggaaaaacatagggattaaaggtttttaaatttcctttatagcttaaaaaggaatctaacattaattaaccactgcttggcaggtactatgttaagtgatttacatttgtgcttatatactcttcatgacaattctgttaggtaaatactagtataactgctttacatatgacaaaagtggctcctgggaagggaaataaactcaaaaagtgtagtatagtctgtgactggatgagacctaaaaggcaattgctgtagaagtaaatagatttaagacgtttaaaatggtatacgtttatatacttatccttcttcctgtgtatactagggacacataatttctacctacattgtggaaaacatataaattattaatatataatttttaaatgaaaaattaatttcataaataataaaactgccaagtcagaacacactgcattcatctatatgttaaattattactatcactttccaaaaagtaagtttgctccaggaacca

SEQ ID NO: 317181 - DNA, 4001 bp, Homo sapiens
gcatctggccaggacctttgaaagaaatgtggaaaggaggcctagtgtgtgctgggcagccacctcatcagtcactggatcttatccagtttgagatccccattctacagatgctgaaaccagggttcagggtaaggaaggcaatcaggtaacttgcccaaggtcatgcatgcaaggaacacggaagccccactctaatggagatttaaattcaggtctaatatgagagtccaagtggcaatgtgtgatgtgcctggaccacgtggtgtgaaatgcacttggcctctcctgggaaggttactcagacagaagctttcttcacaagcatgctccccatggcctcctccctttcacctgcaccatgtctgtctcccattcaagactggcagccccagccaggcacagtggttcatgcctgtgatcccagcattttgggaggccaaggcaggaggatccctggaggccaggagtttgagaaaaggagacaacacaacgaggccctatctgtacaaaatataacaaaacttagctgggcaaggccatgtgtgtctatagttccagctattcaggaggctgaagtgggaggattgcttgagcccaggaggaagaggctgtagtgagctgtgattgtgccactgcactccagcctgggagatagagcaacattgtctcaaaaaaaaaaaaaaaaatgtggcagccccttgaggaagaaagagctcctatcttgacaatttcagccaatgcctgtgagtaccagcaggagcctctatccctctttgccccaccctgcatccacgcattcattatttcattcataccccctcattttctcaacacccacttcgtgccaggccctgaggtggctctaggaccgagagacagggatcacagagctccccagtggagtggagggtacagacatgttgacaagaacactggagcccagtgcgggctgggggcatgtggtcagacctgcaaagccgggaggagaagggggtcggagaagcttcgcggggagaatggggtgaggcctgagccctgtctcggaaagcagaggggcaggtgggaaagtggaaaagacattcctggaggagagaaccgaaggtgccgaatgtgcagaggcagaggtcctgcgatgggcgagaaagttcgcgagaatgaccccagcacaggatgagaacaaaggaggggatcaaaggaaacgggccctcgggggccgagtgctagaaggctctgagtgtcaggagagggagcgtggcctccatcatggggtcagtagggccactgcatggctttaagtcagggaaggacaagagaggtttctgtaactgtggctgtaatgatggaagcgtctggaggcggagaggaggctcctgcggcgacccaagcttcagagagagagagaggaaaggaagggcagacaggaaagctaggaaagatgcacagagagaccaaggcagaaaaggctgaagggaagacggcagcggtaggaagggcgcagagcagcctcaggatgcagccagcgggcgaggaggcggagacccgctcgcccggcgcctggactcaccgcgcagccagccggcacccgcgtgcgtgtccttgaggcggaagaggcggcggtgcgcggagctgcggcccacgtaccacagcatccacagcagctgcagcagcatgagcgccgtcaggaagcacagcaggtcgctcttgctcacgcccgcggcgtgcacggcccaggccagcagcagcagcagccccgccacgaacacgatcagcccatactggctgctcagcatctcggccagtttctgtgggacgctggcgcgcacaccgccccgccggggggccggggattccggggacctcggggccgaggacgagggaggcgagcaggccgctggccccgacgaccctgcgaccgaggcgcttgcagctgcccggggcgaggcgggcgaccccaggccctcgagcatcttcgagacacccgcgccaagtctggtcccgggggtggctgccgtcgggccccgcctgcgctcctggctcctgtccttgccccgacgcctctgccaaccagcacctcccttttcaactcccttccgattcctaccccacgcccctgccaacctgccccctctcctgtcacctcccgacgcccgccctcccctcttctgccccttcgtcctccgtcaaggtaccaccctgtccacttacccagcgccccaccctgctgacctgggattctacgagctcccttgcccgctgcccctcactgggcaacgcccggggcagccatctgccccctccgggacccacgcggacagctccccgctcctgatccctgggacactggccagccctgccgcgacactagcgcgtcctcccgcacctccgcccgcgcgcccggcccccgcccgccgtctgcagccctcacccctgagccgacgcccgcccacccagcccctgtccgggcgccccggaaacgctgggtgacaagaagtgcctgccggggtcccggggttgcgggactggggagagggggtctcccggagccagcccgaggggggtgtgcgcggggggcgtggctgctgccaagcggggcgtccggggctccacaggggcttgcgatgctccgggccttccccgagggtctccgttggggaacccagaggtccaggggatcctgcctgcgtccgtgtccgagcgtccgacggtctgtactcgtccctgcgtatttctgtattgtcttctctgtgcgggtcactctgtgtctggccgtctgttatcgggtgtgtctggttaggggtggaggagcgcccgtcactggctctctgaattgggggaggggccgccttctgtgggtttttctgtttgtccgtctggtgtgcctgtgtgtcggctgcgagatgcccaggcgcagaataagacctgagccactttctaagaaaagagaccatcccgcaccctcccccaaaggagcggcagccgttctggacccagaggagctggaatgagggacgccccggggtctgccctgttgctaccggcgcccaagcgtcttcactagccccttccaaagccccggtgcccgcctggcacccgcctgctcccggaaggggactgagtctgccagggagccccgctcgggtgccgctaagtggaggtctgggaagtttcagctgaagagcgttctacgggtctggcgtggctgacaggaggcgccggaccccagccccccagccgcaggttggagaggggagttgggagcgagcctggggcaagcccacatcccaccgtgcagcagcccggggctgggcccggaagacaccctctcgctcttggtttaaggttcttgccgtcttgaaattcttaatttttgaacaagagggcccatgtttttgttttgcgctaagcgcagcaaattgcaatagcaggtcctgactagtaaaggaggggtggggagtcctgggctagcaaggagtcaacctgggggaccttaccttgccaccatcattcttccaattcacgcattcatgcatttgatcaacacatatgtatgtgttgacctatgaatcatttgctgctctctgttctagcagctgggttttcagctatgaaaggctctgctcaggtggagctgatgttcaggtagagaaacagcaataaacaaacagctaatgagccctcactgggaagctggggatcatgacctgtgagacttagccctcaacttctaagagcttgggagtggggacagagtaagcagcacaacacccttgagcagggctacaaccaggggcctgggaggagtccaggtctgcaggaaggctgagaggttcagggaggaggcaacacctgcacagtcttctttctttctttctttctcttatttttatcttttaataaggacagggtctccctgtgtctcccaggctggaatgaagtggtgtgattatggctcactacagcctcgaattctggggctcaagtgctcctcccgcctcagc

SEQ ID NO: 317182 - DNA, 4001 bp, Homo sapiens
gtcaggcctccggcaggcccaaatccgtaagtgtaaaaaggaaatggcctatctaaatcagataatttggagagaaagaccaaaatcctaactcgagtctcctccccgtctttaaaaactgccacttagattatttactttgattccttcttagaaatgatgagtatttgtgattttataggagaaattgttggcaaaaaatataaattattggtacacattttaaaagggaagcctgacgctggtattacttcctttttcccacacacacacactttgcctttggcgatgatggctataactgtagcctactgaataactgaacttcccccaaagttcaaggtcttcagctaagctcatcagactaaaactgagtcacataactgggaagggtagtcccttatgcctaacctaaaccccattacaaaatacaataaaatgtgttacctgatgtaacaaagagttcttagtgtaaactagctcttgccccttttctacttaaaaacagagatcccactataataaaagaggcttctgtataatcaaggccaccgagtatctatggtatgcactacggaaatcaggcacacccttctgcttcaatataaactaggactcaagataactcaaatccaagtaagcgccaagcttcccttaccgccatttatttctacctccttgcttaccaaactcttgctaggtctaacagtacgttataaatacgggctgaattcacttccacctcttccctaggcttctggaggtgctgaggagtccaaggaagcaggacagacagagattcagaaaattcacaaatggggcagactatttacctactaacaataaggaccggaggcagtgggtggctgtgaacataccccacagcaacactgaaaatgagaaacggacagagcctggtttggggagcttttggaagaatttttcaatgacaatgtccgcaacataaagcaacggtttgtgtccgttaaatcaatttcttgttttaaagaaagattttacgctacctatggtaaataaatggcttgcctttcaatgtttaaaaatgagaacagactggcctccacatgttaagtaaaacatttactcacaaatagaaattttaaaagttatttagcattcaaaaaaggtgagggaaaagaaaacagaaacatcataaaaaccccacaggcgggtagggaggggtgtgcaatggggtgtggggagcaggtcctaggtcaaaggaaagcacatgtgaatcgtctgaaagacacaccagagcagaaacttttatccagctacttcggcagctatttttcaatataggatgggttttggtgactgcacacctacaacacacagtgttatataacatggaataagctcgctcaaaaaaaaaaattcagaaaaatcttcctgagcaactgtgttagaaaatggttttgaaaagctccagttacacgtaccctttctactaccaacatcaaaacaggcttttttaaaaaagtcagttctgtttagtatacctacacagcccagcagagcataataaagggtggaacctactcaagacaaatccttcaaaatattctatatttgtaaaaggctggttttctcaaacggcagtttgcccatttgattcaagtgacatgggcgagcttgcctaccctacattccaaagtccagcagcaaaccaaaatatgttccacaagtaaagtttgatccaccacttctagtaaacacttggtttactggagtggggtgagcgtggtgcttctcaaacgaagggaaggaaggtgaatgcggaacaaaagtaaaaaatatcatgtcgccaggtccccagcaataaatcaactgtacaagctccgagcaggcctcacaagttgtcctcaactcattacctcttcatcaggagagagacaccccgttaatttgcgggctttcgagtttcaatttgcacctttcagacgcaaagcagcgtcccactccggcgttacaatggggcgctgtgacgacagccagggcacgcgcagccccggccgtgggcggcccggacagcccgcagctgcctccccacccagacccgccgggccgtccccgcctcccctcgaagccctccccgcccccccgcaattacctgctccgccacggcccggaacaggcacgacccgtccttggcgaccagtttccgatacaagcccagtttccgcagataggcgtccatgggcgtcgcgtcctcgcggggccccgcgccgccctggtccccgccgtcggggacgccgacggcagcctccatgttgctggtcctgctgcaggccaggcgcggcgagggctagccccacatggccaggccgccggctgctcgacgccccggcctggggcaggcggcggctcgggctggggctcgggctccgcgagcggcggcaggcggcggcggcccgaggcagcggtccgcgctctccgggcgcatagggaagccctgcctaatgcatggctgtccgcacgcggccgcctcctcggagcgaacacgcgcccacgacaaacggggggagcgggattaaggaaaaccccgagagtgagtagtcacttcccgacggcctcgctgcctgactcaggacccaggccgggggtcgccgcccccacaagtttcctcctccgtaccggtgtgaagcgagaaaacccccgcccctggcgcgcacgctgggccggctcaggtgaagcggggcctgcgcccccgcgcactccccacgccgggagccgaggaaaccaaaaagaaagacgcggcctttcgtttccccacctcgctggagggcgccggaggggcagggagcgggtgggggcgcccgggagagaacagcacctcgcagcccagaatttgttttcgctttcggcccgacagcggagaggacggcgggagatgtagtcttggcagccgcaggaagtcggcttgcggcgggcggggacgcgctggccggcctacccgggggaggtgcccgggaggcgcgcggactacaagtccctacagcgcgggcgcgccgccgccaccgccaccgccccaagccggcttcgcgctgcactggcgccgcgtccgcgagcaggccgaggggctccgccggccgatgtggggcgacctgcgcgcgccacccgccaaccctgccgctgcgccgcgggaatcgcgcgcgccgggctggcgtggagttgccagggacacggcggcgcagtgtcggccctttgtgtatttctttccagagggcgcacctgtctgctcccttccccccggcctgctctcctggtgtttccatggaggtggctttaacggcttaagcagaaaatagagctaattggctgaggctccgggaactggcacggtgcgggacgacacactctgtccataaatcaaccgtggactgctgattgctattagtagtacagctcacgtactacggcaagatgaaggctttgccaaagacatttttgttcaccctgtcactgtagctgagcaccccatcacagagacatgtcactgtcggaagacgttagggtttttttttcccccttaaaaaattcatcttgtaaattgcttgataacatgctgactggactggccatggcttccaccagtgctcgaggcttcagctcaacttcccaccctccgacgttgaatggcagggaattgacaaagttaaattatgctttagaacccagaatttatccagcatgcttctgttgcaccaaaattttattttgctaagatacaacatctggtgtccttatttaaatacatggttaatcataggaactaattcagtcttttaggctatggtggaggagagggagaagaaaagggagcattactataggtttagacatgtagtcaaataccttggaatggggggcaaggcaggccaggtggtgagagtccaacgacaaaaattttttaaaaactacgttagacacttttcagtattttcagtgcaagcaatcagtcatgtattcactttcct

SEQ ID NO: 317183 - DNA, 4001 bp, Homo sapiens
atttcgaaagatatttataataaaagagccatatatattaaagagcccaccaataaagggctactgttctgtattagatgattataggtctaaggaaaaaaaaaacacagaaccatttaaagttactagagactgcagaattctgacacaagcctgcatcctctctgagagtctcctttctgagcagaaagcgtccacctatgccatggctgaacaatgtcagtaacaaggcataatactttctacaacatctctttccaattctggacaactgaaactgcttgaaggttcataaaaggaaagtgaaacttttccccatggaactttcaacctctgatcatacctcataaaattatatggactaaggccaggcacggtggctcacgcctgtaatcccagcactttgggaggccggggcaggcagagcatgaggtcaggagatcgagaccatcctagctaacatggtgaaaccccatctctactaaaaatacaaaaaattagcctggcgtgatggtgccaggcacctgtagacccagctacactggaggctgaggcaggagaatggcatgaacccgggaggcggagcttgcagtgagccaagatggcgccactgcactccagcctgggcgacagagcgagactctgtctcaaaaaaaaaaaattatatggactaaaaaaaatatatgcaaaacacttaatgcctggcatatagtaagcacctcaaccaatgttagcaatgtccattattatcaacacagttttaccctctggggccaatgattaataagaattaatttaaagaccattccacctccccacttcccttctctaccacacctctgcactctcttatctagcctctgcgttaccaggtttttttaataaaacaaggtttcaagcctatcatttgcaaagtattatatcaacattctctaccagtcaactgggggaaataacacccaaagttgtcagattacataattctaggtcttaaaaccagtaagtaataaatcctgtaagactttgaatgtaaaatgaaaacaggtcactgtggcatcttatttcacatactactgagaaaattatattaagctgttatacaacattttattaactattaatcactacttacataattataatgttctgacatgtgagttcacactgaaccctgaaaattaaaaacctatgaatgccttctgataaaattaagggttcagcattacttacactcagcgtattttttacactgcaagtctgaatttttttttttttttttttgagacagagtctcactctgtcacccaggctgtggtgcagcggcgcaactcggctcactgcaacctctgcctcctgggttcgagcaatcctcgtgcctcagactcaagagtagctgggactcaggcatgtgccaccatgccactacttttagtagacacagagttttgccatgttggccaagctggtcttgaactcttcacctcccaaagtactgggattacaggtgtgagccaccatgcccagactgaattttttttcttttaatttatagggagttacccatcacagaaaccactattaatcacaacacccccaattccctgaccatgtcagacaaagcccactcttagtatgcaagggccttgtccaggtcatctttccatcccccacagctcagcgtcttatccatcatagtagctttctaaatgtccaaataaatgcaaaacataaaatagcctagaaaacaacataactgaatataactagattaagttcaatagagaagtttttttaataagtgttattttcataacccgcattaagatccagcctgtgaaattctactagaacacttctaaaagccaaaatgtaaaaccaagtcaagacaccattacatgtttgaaattacaagttaccgcttcaaatttctctctgttctctcgaagatagtgaatacaggccattctgacttcaacatggcgagactgagagtgcaatacctaaaaagaaaaggcaacaaacacactattaagcatttagttaaaagttacaacctaatgtcttcttttacacccaaaataatctgacaaccaatagattatcagtctttctccatttccctttctataatttcgatatctttactcattcctacctcttcttctaactaagcacagcgaagacatgacatatacaaacaatactacttcttaagccaaatttgtaaagaatttattagcctttctcctttaggacatttttgtaaatttaggacactctcttcccttggccttccctccacaataactttactcttcacaaagaagagctaacaaaatccatgctacgccacgctcaacttcatcctatacatattgaaaaagacaaactggcaacttctgtaggaatgtattttgaggctttcagcctgtaagaggccgatttatttttcccattaattctgaatccacttagaggctctgtgtaaaaatttaagtccactatggtttcagaaaaattaaggcactcattctttccttggtgatcaagcttataagacaagaaagaacatccaagtaggcagcatagggggtgcaaaaatgttgtgtggtatcatcccaagaggtttggggtttgtttttatgccctaaattgtaaagtaccaacctacaaagtatgatccagatcctctcactctgcagtttacattttcttctattaaacaaccagttcaacaaaaagataacttactggcatgtggtcttttaccaaaattctaaagctgtgaattgaaacaactatttctttttttttttttgagacggagtcctgctctgtcacccaggctagagtgcagtggcgcaagcttggctctctgcaaccttcacctcccaggttcaagcgatcttcctgcctcagcctcctgagtagctgggattacagccaactaccacggcgcttggctaatttttgtatttttagtagagacagggtttcaccatcttggccaggctggtctcaaactcctgacctcgtgatccgcccacctcgacctcccaatgtgctgggattacaacaggcatgagccactgtgcccagcctgaaacaactatttcttatccaatgcttccttctagctagctcccaattcttttttcccccaccaggctggagtgcagtggtgcaatctcagctcaccgcaacctccgcctcacaagttcaagcgattctcctgcctcagcctcccgagtagccggattacaggagctgccatgtccggctaatttttctttctttcttttttttttttccggctcatttttctatttttagtagagacagggtttcaccatgttgggcagggtggtctcaaactcctgacctcaggtgatctgcccgcctgggcctctcaaagtgctgggattacagacatgagccaccacgcccggccctagctcccaattatttaacatgcttaaaggagattaaaattcttttctattactgggtatctcaaataaagatattcctgtaccgtaaagggttatggtttaaaaaaaaaaaactcagacacacttaaagtaacacatttcaaactaccatcaaggcctcttgagaatttatattaatagaaagtatctttaaaagttacagatcctggccgggcactgtggctcacgcctgtaatcccagcactttgggaggccgaggagggtgggtcccctgaggtcaggagtttgagactagcctggtcaacatggtgaaaaccccatctctactaaaaaatacaaaaaaaaaaaaaaaattagccaggtgtggtggtgcgtgcctgtagtcccagctacctgggaggctgaggcaggagaatggcttgaaaccaggaggcagaggttgcagtgagccgagatcgtgccagggcactccagcctgagtgacagagtaagactctgtctcaaaaaaaaaaagttacagatccaattgagtggttctccctttacgtt

SEQ ID NO: 317184 - DNA, 4001 bp, Homo sapiens
aaaaaatggctttgtataaaaaacgttttatcataaagtttactaaactaagcacccatcatgtggaatatgaaatttactgaggtcaattcaggcagagatcactatcattctcccacctgctgcagatactagctggaaaggtacgtttttctttcctagtgtctctgggccaaggcaatgctaagaggtttggagcccaagatgcggccattcatctcagtcattgctttagtagcatcctcaggagaggagaagcagatcaagccaaaccctttgctctgcccctcttcctgcattaccttaactctgctaattgatccaaatgaagaaaattcgtttcgtagtttttcatcatcgatggtgtcatcaaggttcttaatatagagttttaccccctggcacccacgaattcgttcccttttcagctgctcaaacatttgctttaactcagcctgtcgctcgactttcttttgagcccggcctacaaaaatcagctgcccatttatgtcccttccattcatttcttcaacagctttcttggcagcctcatggctatcaaaactcacaaagccaaagcctttggatttcccactggaatctgtcatcaccttaacactcagagttttgccatatttgctgaaaacgtccttcaatctctcatcatccatgtcacctccaaagttttttatgtaaacattggtgaattcactggctttgcttctgagttcagcttcacgatcttttcggtttttgaatctgccaacaaacaccttgcagcccttgagtagttttccattcatctcctcaatggccctgtctgcagcactctggttctgaaagtgcacaaatgcatagcccttggagccttgatcatcactcatcaccttggaggaaaggatctttccaaaagctgaaaaatgttcataaagggttttgttatcgatagatttgtccagattcttgatgaatacgttcccaattccagatctcctcaagtaggcatcgcgctgagaccacatgagacggatggatttgccttttatgatgtcaaagttcattgtgtccagcgccttctgggcatcagccagctgcaagaagttcacgtaggcatagcccagagagcggcgggtgacctggtccctgcaaatgcggatggacagcacaggccccacagtgctgaacttcctgaacagcaggtcctcggtgacatctgcatgtaagtcacccacatacagggaggccatgcggtacttggctgctacattcatctccttgtccttgccactgtgagtttgtcccctggagttctttgagcaatccctgtggggggatactaggtcacagctttggcccggttcaagtgtggaggcctcgggatcaccacacaaaggccaagcaatggagttcagacacgactcccccagctcaggcaacaccctcatccaaaagtccccacagccaccaatctggccctcctaggacgcggcaacagaactgtgaaatcgcaaagagagattattaggacaagacgttccttcccctcagatttgtgagaaaacttcaagtggcgggctggccctccatctgagcattctccacagacgccctggtcgctggtttctgaataaaaataggcctcgctcagagtggtttaaagttacagccgctcagggaagaactccacaagcggaggcgtcagaggccccagccgtggagtatgggctgcgaggttctgcccggcagagacccgaacctgccaggtaccgggttctgcaggcgccgccgccgccgaggcgctgccggcagcgacgcgggccaagggcgtcctgaagacctagggggcccctccgacctcccgacccgcgcggcgcccggagaaaggaggcgtgggggaaggggaggctgacagaccgacggactgacggacgcggcgaagcgggcggccaggcgggggctgggggctcaccggcggtcgtctgcgggcgggcgggaagcccggaactcgcgcgctgaacttcccgcgcactcgctgccaagtgggatgttttctttttaatattttttttaagaacgtttttcttccccccgcccctattacacgtttcccaccctcctcagatggctaagctgagaagcaggaggcggtgactggggtggagaaaggcagccgaggggagtggccccaataaacccacccgcccgcagggctttgcatgggtctgagtgaaggagcctttccaaatgtggatcagggcctgtcacttcctggcttcaaaccctccagtggcttcctttgacttttggataaggtccaacatccgcaccttgttctataaagttctgcaggattcctgaaatgttccagcctcaactgctgcttagttccccttacaaaactccaagacacactagcgtttttcagagccaactttataaaaatgtgttcttcggaaatgagttaaaatgctctttccaaatagatgttttttctaaacccctctgacaatttaggtttccctcttagaaactctaacactaccctgtacttgccggcttttgtctaattacaaaatattgcatatttcgtaacaatagaagccatgtgcactttattctcagggacttgcagacaagggatgtgcagtatttattgaacaaatcttagcctcaggttagttttcacatctagttaaatggaggcggtggcacttatcttagagagtattttacgtgtgaaatgagttaatagatttggaaatggataacacaatatcagatacataagtggtttccagtaacaatgatttcattttctttagcattaaataaaattctttagtatctaatgaatccttaaaatttgaatcataatgcatcttagagagtcaataagttactgtcacggtagcatgaccttgattctccaagagtgccagaacctatgaaattaacctgtggtctcagttgtacttgtttacagaaacaaaagccgggctggatgccagtagccacaaacaagccacgagataaaaactcagcttggcagtgctactcagacagacctgaatcctcacttccttatcatattaaaatctctgcccagtggggagagatgccctttgctaggcacatatagtaagtgcccagtgcaaaagaaagaacaagactgcacacattctagttttctctggaaagtcccacctctttccaggaattcgcatccttagtctccaccttcatgctctaagagaccttaaaaatcccccttctgcacacacctggggaaaaggtgaatgggaagctcaccttctctactctttgaacaacaaataaagtttctgctctgcttaacagaacctcccgtctttctactgtctcaatggcaacaggcaggtaaaggacccactggggtaaaacaacccctcttcagggcagaacattacctgcaaatctgaattgggtggatcagttaatgtaaggcaaatttagtactttttcactttactggacataggaaaaaactagtgctcttgttgaaaaagcagattctgattcagtagcttgaggtggacctgagattcaacttttcgaacaagttcctgagtgatgcaaattctgctggtctctgaaccacactgagtagcaagactaaatgaatcctcatttagagggatcttttctaatgtaagaactggaaaactaaaaatatgtgtttaacttgcagaagataataatactctagcaaaattcattcttagaaatgcattaaataaaactggagcatgattttcactataaaatccaaattgattgtaatctatctaaaatttcctatgtgggagatgagaagatgccactccaaaatatgagagattactgagctgaagataattaagaagaagcagatgcaggaaagctcactgccctccatctacttgcctaaaagcatgatagagttataatgaaaaatgttaccttgccctccccaaacccactcg

SEQ ID NO: 317185 - DNA, 4001 bp, Homo sapiens
ttaaaaaatctggcttaacatcttgggctacatcaatttgaagaccagctgaggtccaatttctcttgatcatcaattgttaacagctgcaacagataaaagcgatgcacagcaaagacgcgtacccacaaacataacaagggcacaggcagccatatcaaattatgatgcacatttttcaatactacctaccaattcagtggaagttttggatggaattttatggctaaatttctatcttccttcacgtcaaaaagttgttcctgtaacaaactaatggggaggtgttgcattatattttgaatgagttcaaaaagtcaccaaaactcatttgaaaaagttttaaacatggtagaaaatcgagcttctacagtttatgagtatacaggacaacttttatgtacaatatataattttcagcattaaacatacagtaatgcaaacacgtctacatcccctttcaaaatcctgtattagagaatttccttccaaaacaattgctttttcacttaaaatttttatcctttaccttaacgacaaattacagttggctctccgtatatgcgggttccacatctatagatttgacccaaccacggatacggagagcagactggaggactttggcatgggtggatttgggtatctgaaagagactggggggagggagggagtcctggagccaattctccacggacaccaagggacgacgggaaatgtagtcaattttttaaaataatatccacctggaagcatgccactgacaagcctggagcatgagttgtttgtgaaagcaagctttaaaaatcttatccttggtaaccctttcaagtggtttttcattaaataacatgtagaggatggtgtaaaggggcagtgatggggagaagcgaacctgtaagaactattttgtgttacaaatattatcaaggtcaccgctcattcttttacaaaacaagataaacattctaattatagatattagaatccataaatccacttaacttcgaacacctaaactatgtcacaatatcagaaagcaaacaaaccaccctatgaagcccacacattccccttaaagcttccttggttgctacaggtcatctatctacaagggactgccggtatctgtgtcaatggtaggaaagtgtactttctatcattgtttgggcagctgatatagcctatttctttccctgtatgtactttctcccgtactcagctttaagaccactgaactaaaacaattctcagtcagcagagccctgctttctaatccaggtctagaaagttccaaacgtgtaagtaagagccccactaaagaaaccatgttccatttgtaaagctctgtcaaattctaaaagacccagagcccaatagtcacttatcccagtcccttttttaccagaaagtaaattcaaagggccagtattagggtcgcacaatctgcttaggggtcttagaatctattttccaccttcccagccacccctcctacactcacttctagatacttaaagaccagtccagagccaggatgctatcaaagtcagcaaaagaggaagacacagaaaaaaaataaagaaaaaacagagattttttaaaggggccgagggaggagtttaccagtttcaattaaggttaacgaaggctactctcgactgaccctctaccccaggaaaggaggggtacactccaagcgctcacgatctcaagggtccttagcaacggggtccagcggccctagcaacagatcaggaagcaagccggcttggcagagagcgcagacaggacacctgtacccgcggttcacggctccggggacccgttcctaccgcgcctctctcccgccgcgatccgcacaccagctgccccccaccggggggggcttatgaccggcactcggtcggccaacaaccgcggctaccgccaccgagcgcctgcgtttggggaaatgaggctccgcgcggcccgcccctgaacctggtcgcgccgcgcaatgacgtcagacgcacgctgcgtcgtctaaaccaatggtaagaggtcgcggaggcgccccagaagagggttgcccaggcaaccaggcgccaggagttcagggggcagctcacgcactgcaggcgctgtctctggcgacaaaggggcacgtggtggaggatgtttttcgaataagaggtccggagagcagagggacgatgacgggttcccagtcgcctgcgccctagcctctcttcagtccatgtgcttaactcctaaacgcttttctcgcacacttaatactcattgttcctcagctatcttaccctcaatactcggagaactgaagactgtgaactcctccccccgagtcttcaggggtgagagccgaagccatctgcatgcccagctgtgggattttcttgtagtttcctgttctatctggctaaatcataagcctagctgtggaaattcgtttcctgtcgtattttatgaatctcatatgctattgcattcttcacagtatatccgcatttaaatagtaaaaagcacgattttgtgctctacattatttttaatagtaaaaatatttaatagtgaaaagcacgattttatgctccacatcataacaaaactgatgctgcaggaaaatgcatattcccttgtattgcattccaccagcaacaatttgggttgtcatagttaagtccaagccctttggacctgtccactgcactcctctttagcatcctctactgttgccaacccaaagccctaactttttgcttaggtaacactaaattggcattgtctgagcactcgaggctgtgtaatccttctgtgctcctgtagctccatccttgctacttgaccagcaccccagaagcatcttcattagattgtgagtttcctcaggataaggattttaactttgccctttttatttctccagcttcaagcataatgcagtgggtattcaactaatgtcttctgaatgaataaaatgaattaataaattctgtctatgtctaatttctctaatgttctgtgaaccttgcatacaaatctaagttttaaaatttattataatgtatttacctatctttctcactagactgaaattgtctttattgcttttctatccccaatgcctagcgcaatgcatgcttaactaacgtttttaaaaggaaaaagaaatttttaaaaaaaaaaatcttatatcctgtatcttcagctacttttactttataatctctcatctccagcttcctcaagacttattatattttccttactcctagcatctccagtgtcagactcagtagagctcctagttcgtgaccttttaacccctcctccctggactataagaatgatttgtattcagtatcgcagaggaatgacaagcatatgtgttctggagttaagctatctaaaactcaccaccccttatcagctatgagtccttgtggatgacgactcctacaagcctcaatttcctcttcattattgggttattgcgagacttaaatttaagaggacaattgaatacctgacacataggaagtactcaataagtattagctagtgcaattattcaggtgaaagcaaattaagactaacgtggaggacatcgtaagtggcaaaagtctcatgctatgtgttggtgtatgaaccatggacgatgacacggatttttcagatctttataataacaattagtataagcttctcctaatcacagttaaaacagcctcttctaaactttctgtcatcattttagaaaatgaacagaaaacatgctccttggcattgcaactctatcaggatattatgcaataagtggtgggtgctttcttgaatacactggtttgacaagcctgtgaggcatccagggggagctaactagcatgctgttggatctgctcatctagagggcaggaaagagaactgggcatagctatggatttttgagccatcagcatatgtagacgctgagttgggcgataggagtaataccttct

SEQ ID NO: 317186 - DNA, 4001 bp, Homo sapiens
actggatttaacatctctagagatgccatttttgcctttgttgccacttttgccttttagagaccataaaagtgacatttaagaaaaatcaacctgccaacggtacacaaatggaaagaagtggaagagcaaagattttagagatttgccattttagaggtacaggtaccatgattgcaagaaaaattctggtccttgccttgattctagggagttgatactcaatatcatctgaatcttttttgctgagtctacagcttttttttttttttttttttttttttgagacagagtctctctctgtcgccaggctggagtgcagtggcgcgatcccggctcactgcagcctctgactccccggttcaagtgattctcctgcctcaggttcccgagtagctaggattacaggcatacgccaccacgtccagcaaatttttgcatttttagtagagccggggtttcaccatgttggtcaggatgatctcgatctcctgacctcgtgatccgcccgcctgggactcccaaagtgctggggattacaggcgtgagccacagcgcccggcctgagtctacagctttttaaaatctgaattcagttactttctatgtggaaaagaatgtacccagcagccacaaaagcaatttgcctcactatacatatagcaactgggtgtgtggaaaaaaccagcatttgtttttttccagcataaatagcaagaacaatctttcctgatagtgcaacttttttgcctaaaggttttggagttcttcaaagccatcgtggcatcaaagactactggaacgaacacacacacacacacacacacacacacacacacacacacaccatcatggcatcaaagactacctaaaaacagcccccctccccagccatcatggaatcagactacttcaacacgcgcgcgcacacacatacacacccatgacatcaaagactacttaaacacgcacacgcacgtacacacaccccaagctatcgtggcatcaaagactacttcacgcgcgcgtgcacacacacacacacaccatggcatcaaagactacttacacacacgccccctagacaggtttttctttttcttttttgagacggagtctcgctttgtcgcccaggctggagtgcaatggcgcgatctcggctcactgcaacctccgcctccgggttcaagcgattctcctacctcagcctcctgagtagctggggattacaggcgcgcgccaccacgtccagctaattttttgtatttttagtaagagacggggtttcgccatgttggccaggctggtctcgtactactgacctcaggtgatccgcccgccttggcctcccaaagtgctgggattacaggcgtgagccaccaggcccggcctctagacaggtctttcaaaagtttcaattattaaccttcttagaaaggtcattaacctaacgggcaaagcaagactcaggttttgacgaatcaagactgatttgcttgtattttgcaatagctattgattataaataatacttccaggcacctttccaccccttggccatttctcgttctcctctactttgctccttctccccatccccgaggcagtaaagttcggggaggcccgggagcgcctgggccacgtgtgcgcccgcgcggctgcctagaggcgctgctgcagggaggcgggacagagtttcgcggctcgcacgtggccgcgagctcacggcctgggggtcagggagaccgtgaagggcccggatccctgttactcaccctcagctgtcgccattatcctaagtgggctgagggctgcgaccgcgccgggaagcgaggcagaactctagaaaagaggggtggtcagagagcttcgctgggcggggaaggaggcggggccgcgcgaccctgcgccactcttttcgagctccgctacagccgcctaacccggaggggtatgggcggagactgaaacgcggatatcggacgaaacaacgccccactggcttcccgccgcgcaggcgcagagacgcgaccccgcctccgggccgccccgcgctggcgcagtgcccggacaggcgaaaagtggcgcgcactggcggcccctccccactctgcggaagctcgcataccccggccccttctcggctgcgggagcgactcagaagttggagcgtaccaagtcttgacggcctgggggaagcatgcagggaagggcatatgaaggctaaatgctctgaaagagaaatgaggttaagtccgttactcccattacgctactgttgggtgctggaaaataacggagatttccacgtgcagcaaatacagctttccaggcagctcttaggggaaggctagctccaccctacagcatccgtgaccccgcccctcagccgcgggaccgcccctccgccctcgctcgttggtggactcggagggggaggagcagggctgagctggccacgccacctagggacagcgcgcgccgccgcagtagctggggccaccctcgggaaggaagagcctgtcgcgagcgcgagcttctgagctcgacgggccgagctggcagctggttggtgcttacaccttggccgcagcggcaggtccttccacgtgctttcggcggcgacatggagctggaggagttggggatccgagaggaatgtggcgtgttcgggtgcatcgcctcaggagagtggcccacgcagctggatgtaccgcatgtgatcactctgggactcgtggggctgcagcaccggtgagcaacagggtgggggtggcgggggcgtgcgtctccatctctcggagccgcttcccgcagtcggcgttctcatgagcgcccgagggcccgggaggaccgacctctccgacctaagccagtacctgcctgtggcgtcgaccgggttgcctaggcgtgcacgaggggcacctcgcttccatgaactttagcctgtcctgcccaccctcccagccacttatgccttttaggggctctctccctccccgccccccggtgtgtgcacccatccagaggctggccagcttgtaaaccgccggtttgcttggtctagctgggtcagggctcctccccgactgcaggcgggttctagtctcccggagcctgtggctgctcctgtaataggctagtgtggcgtggcggccagtccaggtccttcaacacctaaaggttttcgcgcggggcctccaaccaccacaagcttttgtttgcaagggcagagctattgagcagattatgggtttgaaagtagttatcgctatgggaacttgaggatgctagacttcagacccagggaaagatgactagttgatgttgagaatgactactggtagtagatctcacataaattaaatggaaataagccaaccatagggaacagtgcatctggaaaagattcattggtagacgtcttgcctaatgaatgaaaacgttggtaataacatgacaaaaattaactcccttcttcaaaagggggacaggggagtagtgtctctatgccaagatccatacacttgattttgaaaaattgggagatcctttcgagttaaaaaaaattactttgcttcggtgatctttccttttcttactacctgacttaactggaagttgatataaattattacactaggataagaaaaacaaacctgggtttgatattcttactgaaagtattacagtttccataaggcaatacagtggtaacaacttacactacagttaaggaacttggcaataacacgtaacagcaaaatgggtgcaacacgtataaacgcattccaaaagattagcttttcctccaccaaacttaaattagaagtattttttgctgttttcattgtcccaggtacttcaatttcagtttcacattttgtgtgttccttgtttactaaagagctgagaatgtgggaagcatcaaaaagaatatttttaacttgcgtagctccaatcttggataattgtgggttgaccataatagatttcttgtt

SEQ ID NO: 317187 - DNA, 4001 bp, Homo sapiens
tccccggttcaagtgattctcctgcctcaggttcccgagtagctaggattacaggcatacgccaccacgtccagcaaatttttgcatttttagtagagccggggtttcaccatgttggtcaggatgatctcgatctcctgacctcgtgatccgcccgcctgggactcccaaagtgctggggattacaggcgtgagccacagcgcccggcctgagtctacagctttttaaaatctgaattcagttactttctatgtggaaaagaatgtacccagcagccacaaaagcaatttgcctcactatacatatagcaactgggtgtgtggaaaaaaccagcatttgtttttttccagcataaatagcaagaacaatctttcctgatagtgcaacttttttgcctaaaggttttggagttcttcaaagccatcgtggcatcaaagactactggaacgaacacacacacacacacacacacacacacacacacacacacaccatcatggcatcaaagactacctaaaaacagcccccctccccagccatcatggaatcagactacttcaacacgcgcgcgcacacacatacacacccatgacatcaaagactacttaaacacgcacacgcacgtacacacaccccaagctatcgtggcatcaaagactacttcacgcgcgcgtgcacacacacacacacaccatggcatcaaagactacttacacacacgccccctagacaggtttttctttttcttttttgagacggagtctcgctttgtcgcccaggctggagtgcaatggcgcgatctcggctcactgcaacctccgcctccgggttcaagcgattctcctacctcagcctcctgagtagctggggattacaggcgcgcgccaccacgtccagctaattttttgtatttttagtaagagacggggtttcgccatgttggccaggctggtctcgtactactgacctcaggtgatccgcccgccttggcctcccaaagtgctgggattacaggcgtgagccaccaggcccggcctctagacaggtctttcaaaagtttcaattattaaccttcttagaaaggtcattaacctaacgggcaaagcaagactcaggttttgacgaatcaagactgatttgcttgtattttgcaatagctattgattataaataatacttccaggcacctttccaccccttggccatttctcgttctcctctactttgctccttctccccatccccgaggcagtaaagttcggggaggcccgggagcgcctgggccacgtgtgcgcccgcgcggctgcctagaggcgctgctgcagggaggcgggacagagtttcgcggctcgcacgtggccgcgagctcacggcctgggggtcagggagaccgtgaagggcccggatccctgttactcaccctcagctgtcgccattatcctaagtgggctgagggctgcgaccgcgccgggaagcgaggcagaactctagaaaagaggggtggtcagagagcttcgctgggcggggaaggaggcggggccgcgcgaccctgcgccactcttttcgagctccgctacagccgcctaacccggaggggtatgggcggagactgaaacgcggatatcggacgaaacaacgccccactggcttcccgccgcgcaggcgcagagacgcgaccccgcctccgggccgccccgcgctggcgcagtgcccggacaggcgaaaagtggcgcgcactggcggcccctccccactctgcggaagctcgcataccccggccccttctcggctgcgggagcgactcagaagttggagcgtaccaagtcttgacggcctgggggaagcatgcagggaagggcatatgaaggctaaatgctctgaaagagaaatgaggttaagtccgttactcccattacgctactgttgggtgctggaaaataacggagatttccacgtgcagcaaatacagctttccaggcagctcttaggggaaggctagctccaccctacagcatccgtgaccccgcccctcagccgcgggaccgcccctccgccctcgctcgttggtggactcggagggggaggagcagggctgagctggccacgccacctagggacagcgcgcgccgccgcagtagctggggccaccctcgggaaggaagagcctgtcgcgagcgcgagcttctgagctcgacgggccgagctggcagctggttggtgcttacaccttggccgcagcggcaggtccttccacgtgctttcggcggcgacatggagctggaggagttggggatccgagaggaatgtggcgtgttcgggtgcatcgcctcaggagagtggcccacgcagctggatgtaccgcatgtgatcactctgggactcgtggggctgcagcaccggtgagcaacagggtgggggtggcgggggcgtgcgtctccatctctcggagccgcttcccgcagtcggcgttctcatgagcgcccgagggcccgggaggaccgacctctccgacctaagccagtacctgcctgtggcgtcgaccgggttgcctaggcgtgcacgaggggcacctcgcttccatgaactttagcctgtcctgcccaccctcccagccacttatgccttttaggggctctctccctccccgccccccggtgtgtgcacccatccagaggctggccagcttgtaaaccgccggtttgcttggtctagctgggtcagggctcctccccgactgcaggcgggttctagtctcccggagcctgtggctgctcctgtaataggctagtgtggcgtggcggccagtccaggtccttcaacacctaaaggttttcgcgcggggcctccaaccaccacaagcttttgtttgcaagggcagagctattgagcagattatgggtttgaaagtagttatcgctatgggaacttgaggatgctagacttcagacccagggaaagatgactagttgatgttgagaatgactactggtagtagatctcacataaattaaatggaaataagccaaccatagggaacagtgcatctggaaaagattcattggtagacgtcttgcctaatgaatgaaaacgttggtaataacatgacaaaaattaactcccttcttcaaaagggggacaggggagtagtgtctctatgccaagatccatacacttgattttgaaaaattgggagatcctttcgagttaaaaaaaattactttgcttcggtgatctttccttttcttactacctgacttaactggaagttgatataaattattacactaggataagaaaaacaaacctgggtttgatattcttactgaaagtattacagtttccataaggcaatacagtggtaacaacttacactacagttaaggaacttggcaataacacgtaacagcaaaatgggtgcaacacgtataaacgcattccaaaagattagcttttcctccaccaaacttaaattagaagtattttttgctgttttcattgtcccaggtacttcaatttcagtttcacattttgtgtgttccttgtttactaaagagctgagaatgtgggaagcatcaaaaagaatatttttaacttgcgtagctccaatcttggataattgtgggttgaccataatagatttcttgttttttttaaaaaaagtttattgagaaaattagttacgtaatccaaggagaaagtaaactcttgattatgtggtagttgtgagcaacattagtttgtaacattcttagaaactatggccaggcgcggtggctcacgcctgtaatcccagcactttgggaggccgaggcgggcggatcacgaggttaagagatcgagaccatcctggccaacatggtgaaaccccatctctgctaaaaatacaattagctgggtgtggtgatgcgctcctgtagtcctagctactccggaggctgaggcaggagaatcgcttgaacccgggaggcttaggttccagagagcagagatcacgccactg

SEQ ID NO: 317188 - DNA, 4001 bp, Homo sapiens
attattttcctttctaattattaaattgtcaatgcaggcagatatatttatcctacagttttaaatatctctttaaacagcttatttaatctcaatttcaaggacataatctaatagctcatttaatgcagaaacagccaaataagatactttacagagtttttgaagttatcccatgtcctgttcatcttatcaactttattcaccatactgagtccattgcaaatatttagattttacttctgaattatccatttccattaccattatccaattcagggctttattcttctcacttaaattcaaaacctatttaccaaatttgcttctatattctctaatatgatttaacagttagaaattttagtcgaagatactttgttcaatctttgttttctttgctgtaatttcaccgggacacagtcattaactctagatggcctgaatttctaactggagctcagtaattgcaataccctttgacagcctccacacacatattgtttaagaagtggagctcttgtctgggccttgcagattccacttggtatctcttaaagaacttgtcatatttatttttaaacctgaataatgattgccctctacatttttaaaaaatgaggtaaggaggtcaaagtgattgtacttgtccagtgcaatccagatcctcattctattgtgaaatatgctataaggccagttttaatattcagctctagcaataacagagaaacccagaggaagagctgacacagaacccctgggatacagaccctaatccataccagattctaggatgccagaggactaatttatattctaggaatgtgtaatcatgtatttacagggcagttagtggccagataaacctcatcggccttttctgctgttagcaataacttgtcaaagagactttgattttaaaaatctgaaaaaaaaatctgaataattgaggtgagtattcaagttctttctgtgagaaaaaacattggaaggcacatttatcatgaaatgaggatttaatttctgcatatatgtgattgaatagatttgtaatagttttatattgccaagaaatggctttatatgtcaccacattattcatactagaaggcaattagtatttttagcaaatgttaataagtaatatgagcctgaaatcattttatgtcaacctcctatattggattcaagacaatttcatgtgcaacttaaaacaacatgataaaaattattctgtgatgtttaaacttgactggactcgagattgcactgtggtttcccttagtaagcgttatcttattaaaaatatgtatgtaaattttatgcatgaatataatttaaaatacctgctgttactatcccaactcatttaattatgtccagtgagttacttttagaatcttttgaaagtgtaattaacaatttataatgttactgaaatctaaggtctatcactttaagccatcatcacttatctagcttaaatatgggtgagggtctagaaagctgcgttttccttttctgtgaaacataacacatacacgatcttgacaaaagctggctccataaatacatttaatccttttggaattgatagcaccatcttagcatgcttaagcttataacagaaagtgtaattctctgacagcaaaggcagagatgaagtgggcaggcaaatcttacgtattatctgtttttggcaaaaccgtaacattctcattacgtttcctctccaagcaaaagaataattaaggtatcttgtaaatagtatcatatcttcagaaaaacttttgtatttttagtttttttttttttaagtccttaaaatgttgccctactagttagtatattaagatacaccttacagaccttttcaatgcttggtcagtttgaagactccagagaggtgatgaatttcagatgagcatttcttcttttctgggagaatggaggttgtggccttgcctattcattagagactgcctggtccgtggtcactttgaggcaactgtggcctcagactctcatctgtcctcttactccactcagctatatttggtaactgagctcatgtttcagcagactgccacgatcaggaattccagcagcgggctgggaagcacccccaggaccgagggctgggttcttagaaataaagccacttaacatagaaggaactatatttatggatctgataaacgtaggatttaaacacattcttctatactttggacttgtagctggaaatcaccacctggacctttaacatgttcttaatcaatttaaagtacagtatgtgactccaagtagaaaaagtgataatccaaatggaagctcttcttactctgatcttctgttctgtgcatttaaattttggtcatgtgctagattaccctaaaatagtaaattcagtaactgaaaatttagccacctgtcaaattgagtggaaagtcccattgttctcttatttcatattgctaattaaaaattgatatatgactatggtatgtattaaaggccttgtctataatagtattaaataagtatgaacacacagggactggatcttatccacattgcaacattgagttcttagctcaatgcctaggacatcatgagcatctcttaaatatttgtcaaagaaataaatgaatgttgaatgaataatattcaggaaaagtatcaaccctcttacagttgcaaaaaatgtttcacaatcatttaatattttgatctttcaaatgacaaatagatatagcaagagtttaatattttgatcttttaaataacaaacatagatagcaagaagagaaagcttttctgtttaaaggtcaggtagcagaatcaaatataaggggggcaaaaagagcaacacaaaagctcccagttaacttggaaatggggtgctgagtcttcctttgtctgggtaagaccatcacatttgattcagtttaatatctaaatattttttcttttctgatgttagaaaatttgtgaaggtctgctattgtattttctttataggccaaactggtcctttagaaatggtcctttctgtgagtggatacttctgtgggtcatttcatctattatattaattaagaagtgattttaaaatttatacttacggctgggcgtggtggcttatgcctgtaattgcagtactttgggaggccgaggtgggtggatcatgaggtcaggagattgagaccatcctggctaacacagtgaaaccccctctctactaaaaatacaaaaaattagctgggcgtggtggcgggtgcctgtagtcccagccacttgggaggctgaggcaggagaatggtgtgaacccgggaggcggagcttgcagtgagccgagatcccatcactgcactccagcctgggtgacagagcgagactccttcttaaaaaaaataaaaataaaaataaaaaaataaaatttatacttacaaggaaatataactctgattgattgtcttagtttgtgtcattataacaaaatgccacagactgggtaatttacaaagaacagaaattgatttctcatagttctggaggctgggaagtctaagatcaaggtgccagcaggtttgttgtctggtgaagttcctgtctctgcttccacagtgatgccttgagcactgtgtcctcacatggcagaaggtggaagggcaagagggggtcaaacttcctccatcaagccctaagggcatcaaatcccattcatgaggagtcctcctgaatcaccttctaaacgttacacctcctgatactgttgcataggggattaggaatcaacaaaaattttgaaggggacaaaaaccttcaaaccatagcattgcttaaacacatatttatatctgctttttcctaaaaccacaagataatagtaaaaactgaaaagggcagaaattgggagggaagacaatagaagatatcagaaatgaacaaaattgttggaaagagataaatataagtatgcatgtaactaaatt

SEQ ID NO: 317189 - DNA, 4001 bp, Homo sapiens
gggagattttcaatagcaaaaagaaaagaaaaaagactcagaaaaaccatacaacaaataaacaacaaatgtaaacactgtagtgatcaaagtaggtctctttcctaaaggaacaatgaaaaattatatagtagctatagacactcatgtctactagttatgatcttttcagaaacatgttattttatagcctcctaaggtatctggcaacaatcttttccatcagacacccaaggataactttccatttcagttgggggtgggtaagctcaaatgcatgctcataacatcttcatgtaacccctataacaaccgcggggggaaatgtaagagtcttaggttactgaaaataacctgtttgccattatacgggcaattataagctggaacttgcttttttaaaattgctgggttcagcagagatttcccatggatttatcggcaacagaaataaacaagcattccattgagctccacttggaagtgtgagaagggctgatagaaagtctttttcatcatgtggacaggaattcaacttaacctactaggatgttaaattacactccaatatcctgatgattttcttaatcatcagaaagctgaaatcatgctggtcccttggaggacagcccccttctcagggggtcttccccgctgcccctctcctaacattccatcacccctttccttgtcagtagcctacctgccagtgaagtgaaaggtgacttcagcattctgggggtgttcaggtgccagggtctctatgcttgtaatgcaaatagattaggggaactctctctgtaaaagtcatgctggttacttctggattaaataatttcaggaactcaccaaaattgaatatttataagcgtcagcaatgctttccataaaaactaatggagaatgtcagtttttcagtctttccatggtagaggagtcatcaggaatgcattcttccctattgtattctgcctgccacttgttccctaagaaccaccgccaactgaatgctaacaacagggaccccgtccaaagggagaggagaaccgggaaagtagcattggatttggttagacaaagaactgcaatcaagtgaaacccaagaaaacaaacaaacaagcaaacaattttgaggcaactgaaaagcaacaggtgtgaaaacgcccagatttctcatgggaaaaatcaccaaaaccttgtgagaaacaaagtgtttccagctagacctcattcagcaactgagcagctcttaggctgtcagaaattgattgctttgtgaaagtttccttctatttcaaccgaggatggagccgattacaaagtaattagagaaaatacaaactcattgggctcaaatcgcagcaggcaagttaaacacatgaaagagaagcttctctaaaagtatcattttttttaatggaaaaaaaaaagggtgaggtgggtaggagagattattcaacctcacgcctttctcccctcccccaccctaactccaacaacagaaaagtcccgcgaagcaggacccgcccccgccaacccccaaagaggagtccgaagaagggattaggaaaaccgtggcggaacacggtattctgagtccactacaactaaacaccccaaacagtactcttcgcacgagtacttgcatgccactgcctggaaaggctgcaaagctttatttcctccatgtctgcatagatttaatgctgccacttaccagttgggcgcaaaacgccgtctgcccccactcccaaacaagctcctcttgggggtctttcagatctcgcttattcccagcttgcaacttctgggctctgaatgcgatctcgtttgcagaatgcaacggagaaaattaactggcagccgcgctgccaaaaggccggccccttgcctgctgcgctcgagaggtcctgggccccgccggctcccgggaagcctcctggcggcgcagcggccacgactcaggctcggtgagaggccgccggtctccagcgcgcgaatgcgccgcgtctcgccgaggggcgcgtgtgcgcggagtgtgtcggagtgccgggctgctggggagggggagagggtgtgtcctggggaggaatgctgctaaactccagaaataactcccttcactccatgctcttatcgcacttaggacggcttttgcgttgcccaggggcggggggaattgtaagaaggtaacaggcaagttccaccggcgatttctaaagccactccccattcagctgtggtttgaggcattccctaaagacctctgttcatttaggaaacgttgcagctctcaaggggggaaatccaagaagcagctagtagtgaatttgtattactgataaaagaaatcaacgtccagcttgaggttccttctgtacccttccacacaaggtatctttcagttgtactctccatctgcgttacctcttgtgagttaaattgctcctctgatgccgccttactgcaaagccataaattaattaccccattacaagtaagcccctaggaaagggaatgccaagaataaatctggtctttgttcttttttatgttgaacaagtctgccattaatcaagtctttccaccaatgtctagggaacagacccaaggttgcgactcattgagggatgaacatgtgtacgtctggttgtcctgcagtctttctctgcggtattatgtcatagtgactcagttaccacacagacggatatcaggaagaaacaacaggagaaacaaaaccaaccgtttaataaagacctagctatttgccaactctaaagcccctggcagacagtgcttaatttttacacatttttaaagattatttcactacttccatcttccagtcccagaactgcttgtcattggccagtctgagaaacagaccacaaaccgtttgaaaatttaaggaagaaactcatgagggacccatgaagctattaattttaatggagcctatgaaatatcaaagatgtgacagatttttgaattagaaaccatatcaaaaaatgcgttccggaaatagaatcatcttgagaggtcaatagtagagatagtgcaaacagtattttttgaagtgaaaataaaatgttaaaagcgttcagtgtatatatctttagttcgtatttattatcccgaggaagtggtgagtcatgaaatattgaattttttcttccttattaaattttccgctctttgggaatcaatgtaaagttaataaggatgaggttgcttttcagactgaaaatattctggggttgacaggttcagtcccttcttgtatgtcattagatctttttatttatttttttcctctacacttcagttgtaaagttttattagggtcattgaataacaagagccgaatacttcgtttatctgaaaggcatcacaatgaagcagggtggccctgttgggtgagtcttgctaagacacatttcagatccttaccacctttctcatctccagcaagggttcttagaaagatctttcctctgtgaattaggaaggacattgtattaattaaaatgcctgggcgaaagaggaaggaaaaatttggagggtttcagtatatgatcaccatgagcgcagaaatctgaagaagcccctccaactactttcgctaaacctgtgaatgtttagaagtctgaaatttagtctaaacacccaacatatataaatgtcttagacagagaggacactccttttactggtcctgcttgcttgtggggatgaaactgaagggtagatgaaatttctgctgttcttccacacaaggaggctgccttttgggtggcagctgttagtggtgtcaaatgttactgaaaactctgccattagtttctgtgatgtgcctgcccatttgcttgtgctccaaatgagaactatcccaacgttacgcggtttgtggcgttttggggtcaggagaggtagtggtgacagtgatttttgagggtgatctaccccacccaggaagggatgggagggtgggggagctt

SEQ ID NO: 317190 - DNA, 4001 bp, Homo sapiens
gattgggggaaaaactgtttattatctagctcttgtctatctcgtatgtttatggttcaaggatgtgctatttattaactgcctccctcaagttataaatcttacactcacacaaaggcataggggtacattagcttcaaactatctcctatatccattgatctaaacagacatggggaaaatcaaattaactcaaacctcttatctaaatcaaagtctgccaagtctgaagggggaaaaaaattgttttggggggatgtgaaaaaaaaaatagcaagaaagatgctgtctttctagaagcaacccaaacccaaatccctggacaattctctggctatcttttccttaggtagtgggagttaaggagacagtcctgacaggagcctgcataacacaaatcaagaaattatcctcacagccaaggctggtgacaccattccttaacctggcggaggggagcttttcaaggcttatgaaccaggatcatattattccatgtctctgaagcttgggtcggtccctctgtccttttctcgtgctagtttctctgtgattacgcattaaaatgtagagccagtcatctctggctcctagagactcccaggttgatgaatgcacacccgtcctggaatttcgcctgaagaccagtaacgggactcggtgtgcccgggcctgttcggggcacgcagcgcaagacccggctccgcagggtgggaagatgcccgagcccagggagacccgaccgagacgccccctctcctgcccagcgcgcccccttccgtccccagcaagagagcaaaggtcccaagcctcaatccgggctcaagcgaccaaacccctttctagagtctggaccactcaccattcgggacagagctgcccccaaaagttaaaatgagacaaacgggcgggaagcccccagccccggggcggggccggcctagagccctgcgctccagctttgggagctcacccaggcccggggagggccagcctggctgctcacgggaccctcccttgttggcccggccgtggccgggaacccacgcgtggccggtgcgcgctgccagtgctgcagctgaggttcgggttcggcccgcgcccggcgtgaacaaagcggctgccaaggcctgggactgaggggactgagccgccggctccacgccgcccccaggcccagaagaaacaccgactgcgggccgggcacagcacccggccggggaaaggacgccccgagttacgcgcaaacttcctttgaatggcgcccaggtggggtgaaccatcccaaagaaaggaggatgggcttgggaagggagggctcggctcaggtcggggggacccctccgtccccaccctctccccgccagctgccagggaatgatgtcatcgcctctcccggccctcacccctgtctctgccagccccgctttctctgctctcccaccccaggtctgacccctcagggagcgtggccaagattaagagaggggcggggggccgtgggggtgcgaggtgttcagagaagagttaggagagcgggagggatcgtccgtggcagcagagcatcttctcccgtctgggccctgccaagatgatgcagacattcctatctggagctccgctttcagggatctgtgctcccgcgggccgggggagggagagggctcgggaaggaaccggccgggtggaaagtgcgctgacgagtctcttgtcctccccgcccccaccctgtcccgagccctgcactcccgactcgcggcccaccctgcacgctgcactccctttaattcacacatttcttccaccagcctcagggccgattccccgcgcctacctcggctctccgggccgcctcccgctgctgcccgattccgcgtccggagcgagcgggagctgcagcgggctccgcggaccgggcgcggggcaggtatcgggctttatacctcgcccgccgggtgactcaggaggctccgagccttcacccgccgcccttcaaaataagagtccggcggcgcggcgggcgggagagaggaggcgtggctcgcagctctgggacgcggcccccaggttagggaggcttccccgcacccactcgtaaccttgtcccgccctttgcatctttctggtcgcaggccccttcctggggcagccaagctacaaatcgggctttcctggaacgatcgagaagtgctaataacgggaaagaatttaagttttttaggcccatagatatgttgtcggcttgttaggatgattctcctccggtgtttgtgtttttttcctttacagactaaagagtgtccaataaacgcgactccagggcagcgttttaggggaaagcaataaaaactcacggtagaatggaagctgccctgaaggaatggaactgcgagactggggctgggactggggctgtggggagggaaagcacatacagtgtaaaaacgattgtgtgacattaaatcgaaaagcacaaatcatcatgcagtatatttcttttctaagaagaggaaggataatttttagatttccattaattagtttactgggttctgtgtaataaaaagctaaattcaggagcccttagggtgagaagagtaaagcatttgatctagcaacatctgaggaacccggtccctatcctatcctgtgatcctcttagctcataaactactggaggccctgagtcacttattttaacgctcatctacacaggaacttctgtagaagtgttttcaaagaggaactggactcattcgttccagaattaatattctatgcaaaatttgtgacagattgtgggcttagccctaaatccagatcaccaacttttctttcaccagatcagctaaggacacccctggctctgtgtataatcctccagtagctgggttggcacaccatgtcacaacaatttctgtcttctttctccttccagagtgtgctccttggccactgggaccaaatctttcacacacaataagctgttaacaaaatgaatgcatgaatgaatgaatgaatgaatggtaatatctaccatttactgaacttactgttgtgccaggctgtttcggtaacgtggtcactcagtaactgccaataaatgctaactagttttgaatagccagtagaccacttgtttaaagggtttagtactgtaactgtatcctgccgtcattactgatatctaacactagcattgctaggttcactgtcttcagccaggtagtctattcctctctcggaaatatctttattgacttttaaatgaataacgatgtctgtaaaatattaaaaaccaaatattgttctttaaacaataaaccaaaattgaatgtccctgtgattttactcccagagataaattgttagctgcctaaaatatagtcctccaggcttttggatgtgtatttaaacacacacttaaaatagcttagataattgtttccatacaattttgtaacttttttttttttgagacagggtctcactctgttgcccaggctgaagtgcagtggtgcagtcatggcttactgcagttttgacctcccaggctcaagtgatcctcccacctcagcctcctgagtaactagggctacaggcacgtgccatcatacccagctaatttaaaacatttttttttgttcaagacaacgtctcgctatgttgtccaggctggtctcaaactcctgatctcaagtgatcctcccacctcggcctcccaggcgtgaccaccgcactcagcctataacttttttttttttttttttttttgagacaaagtctcactctgtcacccaagctggagtgcagtggcgtgatctcggctcactgcaacctccacctcctgggttcaagcgattctcctgcctcagcctcccaagtagctgggataacaggcgcctgccaccacacccagctaatttttgtagtttttgtagagatggggtttcaccatgttggccaagctgctcttgaactcctgacctcaagtgatccgc

SEQ ID NO: 317191 - DNA, 4001 bp, Homo sapiens
atcccccatagaatcaagtcttctctgcagccaaacacaagagcatcacggagccccagcctccctattgaaccttacctccacttcccaacaaaaactctccagggcagtcaaacaagtttcgtcaatgtttctggagtaaaaaaaatagtaatttttattcccaacacttatccatgcagttcccctctgactcagaaatctgaaatcctccataaaccctcccaaaacgcccaggcgaaactaatctctcctctaaattgcaataaaacttctgtcttacgccactcactctggaccacaaagacatattcaccacttggcaaatgtcacaaccccaacacaaaccatgaactaccagaaggcaagcagtaagtcccacatttttcaccaccatgtctagcacaagtctctacatagaatacgcaccatgtggcaaatgttaataaataaatgagtacataaatggacaatgtaacagaaatcatctgtaaataccccaagtaagccaaccttatttccctaaccgtgaaacaccttaaggtaagagaagcgaaactgagtctgagtttcaaggcagtggtttcaccgcacattcaaattcatgatctgtcttctttgttcatcaaaacaatcccgtgaagtacatactattatacccttaagtcaactgaggttcgaaaaagtaaagtgactctcctcaagatcacacagctagtaaatggcaaagctgggatgagagaccaggccaggagtccagcgctctttccactgttctaattcatcttttaaatctccttcccctccttaccatctatagagttaaataaaaggagagaggaatcagtaaacaactcatgataacaataacaacagatgtggtaaattaatgacttccaaagaacatttgcctgaaattgcttgttttttttttctttgattcatctagggcaagtaacgttttgggagacattgcatttaaaccttattattccattggactgtgaaataacgtttccgtctaaacttaaaccagtgcctttccagactccaaagatgggcccttccctgctgcacacttacaaaggaagataaggctctttctcatcacagagaaattaaggaagtaagcaacgttatgaggacacagcactttacaaagtcaactggcagtcattactaaacgttataaaggactggtcccatacctgactgtcaccaggaatggagtcttccaaactcctacttgttaaacattccgatttaacacagagacacaaagaacctcagttcagggcagtctcaactcatgaatgaccacattgttgggtactctcctttcacactgaaactcagaaatggaaagacacggagatggacccaaacctgggccaaccgcactggcagagccaagaaaaaccaagaacgcgtcgaaggcgcccgcctccgccttctctgcacatcttcaggccactccaaggtatgcaggaagctcctgtttctgcagccgcaggtttcagcacccggaggtttcagcaagcgccagttcacgggtgaaggattttcctgggggtcttacctgagcggaggcgctggggagggggggcgttcttcccacgaacggtggctcggaccgcacgctgcgccaagctagggcgagatccccaccctgcgccgcgcccctctgcctcgcaaccacccacggccccagccgggaggcgccgcagccccggaacccacctccgcgctcctggaaggatggatgcggaggaggcgggagagaggcggcggctccggaacgagctgctcccacagcccctccgctcctcgccgtctcgccttcgtccccagcttacccagttctgcgcgttattgctcagtttgactttcttgcacaggctcccggggatctccatgaccgcggagcgcgctgagcagccggggttctctgcgccgggagggtagcaagaggagggcaggccagcgagcggggcggggctggagggcggggcctcctcgcgtcggagcgggcgcgcgctgacttaagcacgcgcccgtgctcgtggcctgggttgcgcggcgcatgcggcgcgcctcggaaatgggtccggggcagaggtctgtggggaagggcgaaacgccgggatagaaccggaggtagaagctgggggcggagcttcagcgctcgcgccggcgcgggcgcgcacggcgctcctccttccagatcccgatgaaggggcggggcctggaatgcagtcgtggaacctcaggtgcctctgcggcaccgagcctagctctgagctaacgcagatctctaagagcgagtaccagccgccgggagaaaggcaaggggagtgcgcggctcgccgcgcgcggcactccctcagcagaggctgattgggaggacgctgacgcggcctcttgcacctgtggctactcctccacagacctggctgccgacctcctgtctgccccttctgtgcccatgtcaccctggccaaatgttttaaatgttttacagctttgcaaagggaagaattgatttaccgaacagctcattctccacattaaaattctactcaagacacaattttttttctttttttgagacggagtcttgctctgtcgcccaggctggagtgcagtagtaggatctcggctcaccgcaacctctgcctcccgggttcaagcgattctcctgcctcagcctcccgagtagctgggactacaggcgtgtgccaccacgcccggctaatttttgtatttttagtagagacggggtttcactatgttggccaggctggtctcgaattcctgacctcatgatccgcccgcctcagcttcccaaagtgctgggattccaggcgtgagcgacagcgcctggcctcaagacacagtttttaaaaagatataataaaagcccgatttcttgacatcaataattaatatctcaacctggattagtgattacttataaggtgcctccctctccgctaggagaccccacttcgcatcagatttctgtgcagtgcttcttaccgacctacaccggaaaggggcttctgtattattaagagctactcaggaaatacctagaggactgaaatccaggaccggggaggccgcaggtaaccccgaatagaactcccgcctacggaggacattttcaaattcacctaattattccagggctagttcgtaggaggatgggctgggggcatgacagagtttcctccaggagttatcttccccacaccccccataactctgagttctcttttccgcagcttgcccctggcaccaaaagagttgcttgcagctctgcccccctgtgacacagccgccctccgcccctgaccccgcccatcaccaagacctgagactgctgcctgttagtgactagcaaattagcccccatcaccaagacctgaggctgctgctgctgcctgttagtgactagcaaatcagcccccatcaccaagacctgaggctgctgcctgttagtgactagcaaatcagccctccatctatttgccccactgctactgtcttaaattaggcctcccctatatccagcctgagttatcattaagcccgttcactggacatcctcccagctgtgcagccgctctccacatccccgccacacaccccattcttgcacctgctgtcagagcggtatttctgaaacagaaatctgatcttgttacttgactacttaaaatgtgaatggttcccttcagctttttttctagggaattttcaatctggggttcatacatagaactgaatttcaatataatttcaaattctgccaataacaggaatgagcttggaagaagatctcaagcttcatatgagaaaatagggccacatctgaagttagccattgctctgagttctggttcttattagagggaaatggtatttagatataacgatctggctctaggagtgctcactgctgtgagtttgaccttatttctagtaaaagacttttt

SEQ ID NO: 317192 - DNA, 4001 bp, Homo sapiens
tattgaagttaacaggagtccagcaccacatcttcgtattctgttcagttttaaaatcaaataatcatcttcattatcatcatctgttcagcttcacaaccactggtgatgacaacaatcaccatttattgacggcttattaggttccaggccatgtatagcatttcacacacagaatcttactgaatctttttttacctctggaagcagatactgtgattaccctcatttttatatgtgggtataatgaggctcagtgaggttacattttgctccaggtctcagagctgttaagtggcagatttggatactaaagtctttgactcaatagctcaagagctaatgctctatacttaattttccactccatgagatttggaccctaacatcagaacgcagaagaccactgctagttgagtagaaaatatttaaggcaattcactgcttgccctattcttgtggaactccagatccacagcagaactcagctgtgtaatttactcatgcacaggaggcactggggaggaaaacggtaattacgcttcaagttgtgaatcctaagggccatccattcaagccaagtagggatgggcagtgatgtcaccttgtgaccatgagtcacagaaacactttcatggcaggacaaaaggaaagaagggcaggaaaagacaatgctggaaaaatcaagaatcagacatgtggttgccgcttgagcaattcaacagcccacattctggcactagggtttgccactacagcgacctggagctaaccaacacctgtatcttaattctcctgaagcagaggtcctgtattttagtacaggtagtaagtttggacagttactccaagaactagaatagttatttttcagttttgtttttttaaaacacggattttcaagggactgtggttttaaaggtttaaaatgataaagaaatttctttcttagagatgcttctgtggtgctctagtggagactgggtgcccgttatgagctctctttaccacagtacttttcctacacagcattttttccacaatggttattatgtaattgtgtaattatctatttaatgtctgttacccaggctacaccttagtagcttcatgaaaacaagggccatgtttgcttttttttctgcatgggctccataagtatttgccaaatgaataaatctcgggtgtatatgttaacttgtttcctattatacaggcacttatctggcccaaagctactgaattcccacagtgttgctctaaaaagaaaggtatacaccgggcaaatatggctcagccccatttcaatatatatctcaatgagccgaacaaaccgaataaaggatgtaaaagccctttgtaaagagcaaagcgtcataggagagctgtaattatgatcactgttactatcatgattattccgtggaccaagtaccccggccaggtaaggggagataacgggggaggagaggcggcaaaaagggatgaaaaggatggggcggcgaggaaatgatgggcaagcagaaaggcggggaaagcagaagggggaccagacaaaaagggtgtaggtgagagaagggggcactccaggcggaggcagccagaccgtaccttttgatacacagcctggacggcaggtaggcccggtagccgtcggtgatgtacgggttgtccttgagggacccggggatctgctcgtaggtgtacaggcggatgccacggggcaccaggaccggccagtactggtagctgcccagctcgatgtaatgcgcgctcttcagcagcttctgatgcatcgttcccggccgccgccgctccccggctcgggagctcccccaggtcccgcctccccggggagggggcttcgccgctggcgcccccgccccggagcccgcggacgctgcgcgaggtcctaccgcgctgccgctgctgcccagggcccggctctgcgctcacaccggccactgccgccagcgccgcggcggacccggcagcgtcgcagcctcctctgacgtcagcgcgccgcggcggccccgcccctcagccctagctgggaggggcagggtgctggggcgcgcccgggtgtgctcgagcgtgcgctggcggcggcccgggctcccgggcgtctctcacgctgtgttttggcggcgcctggggtcttcgtttgcatatgagaagagccgaaagcacagagctacaggcgaatacaagtggattttttttctttttctgtttttttattagaagtaatagttgctgcattttgaaaaatcaagaggaaaagagttaacaggaagaaaagttcgaggtaattaccgtttagtttatgcttggaattacacacacttagtgtcagaagggactttgaggatttctaagctgaagtcagctcttagcacgataattggaaagagaggaaacctgatgcacgtggaacatacaccagcatcgagcacatcctgagccataaaggaaagcccccgtgcattcaaaactccgacccctttcagcgttatgttctctgatcacagtagaattaaactagagtaacaagaaaactaaaagtctccacgtctggaataggagcaatacaccaaatatttcaagggctgatgaagaaatcacaatggaaatgagaatatctacttaactgaataatatagaacatattaaaaaatcctgtggagtgcggctatagtagcgtttacaggaagtgttgcagctttgtttctggctatttactgtaatgcaagtgtttacttataatggcaacagggcaaaacatcagtttgagtaccgtatgtgtataatagaacgcttagtccattgtttggcattgtaagggcaagaaaaatatcttgtcctcacttatcacaaggttcacagctgacattcctatgaaaaaaattaagagaagccaggcgcaggtggctcatgcctgtaatcccaacattttggaaggccgaggcaggcggattgcttatgcccaggagttggagaccagcctgggtaacatagtgagacgctgtcgctacaaaaaaaaccaaccaaacaaacaaaaaacaaaaattagtcgggtgtggtgatgggcgcctgtagtcccaaactattctgggctgaagtgagagggttgcttgagcctgggaggtcgaggctgcagtgagccatgtttgtgccactgcactccagtctgggtgacaaagcgagactttgtctcaaaaaataaataataaaaattaacaagaaaagggataataaattcatttaacacagttttatgtgacagaggagtcttcagaaatgaagacacaaagacccaggaaaaaatgggctttttatgctaagtctgatgaaaggagtggatagttgtggagaaacatgattgaaagggggcatcatctaatgataataaactgaggggggatcctagctagcaaggccagttcattcaaattcttggcctcagagtatggggcaggaactctctagaatgagggttttatgacctagtttcaggtgaggtaagtcagaactcctttgtgaccacggaaaggcagggacagtcagaaagtaaccttactagattttttgttgttgttgttgttgggggaagacagagtctcactctgaagcccaggctggagtgcagtggcacaatctcgggtcacgcaatctccacctcccgggtacaagcaattctcctgcctcatcctcccgagtagctgggactacaggcacccaccaccatgcccggctaatttttgtacttttcgtagagatggggtttcaccatgttggacaggctgcccttgaactcctgacctcaaacaatatgcctgcctcagcctcccaaagtgctgagattacaggcgtgagccaccacgcccggccccttactaggttttatggcttcctttagggagagaaattctaggttgtaagacccacttgggaagaacaggaaaaggaagaaaggaggacggaaagaagttcagagagac

SEQ ID NO: 317193 - DNA, 4001 bp, Homo sapiens
ggtcaagggtgatattcctcccggaatagcggagctaaactgtaacgctgaataaaagaaaaaagaaaaaaaaaaaaaagaaaaaagagcttcttggggtgggggtggggaagctacaatacactgtttgttagggttaatcccggttttgacaactgccagagctgtttaaaaaaggaaatgattaaataaacaagacaagccactaaatcaaatttgcaaacgaacctctctactgactcactcaagggtttctgaacctcaagaaaagatttttgagtgaggagaagtaaaggtaccttccgtgtcattacgtaagcatctcctgctttgaggattacaggaattaccacccgcagccagccgggagctccgctgcctattgcacctgccggacctaggctctctcatctcagcccgaggctgggcagccaaagccgcctgcgagtattcgggaactgtccgcggacgcgtctccaaaccgtgccgagataccagcgagaaagaggttttctcagacggacgttcactaagtagagaaaatacgctatagtttcaagttgggaaacttttccttataactgcattacccactgtgagctgcctgaaaaccgctagcttcttttcaagggattgcgacgactcgtgtccacaactgtaggaacccgacgaactcagagggaggatatacagactaaagcacgagtagaatcggtttgcgctatgtgactttgggtcacatttaaactgaaaatgccagtggccgcgcagtcgggctacttttcccagcagcaccatatccacagccagttgtcccttttcgggagacgttttctggaaaaaataggtacctgaactctagattcaaagcgtctttctgaatctctccccggtccccgccaagccgagctcagtcatctggctcccctcttccccatccccgctgccagaggtcgtcgccgtctgtggtcccgaaacccgagagtggctcctacgaagcctttcagaggtggtgcagggggaggggagaggatgctagtttagccaagttaatagtttcttctatgggatacgtttttggggagttctggggcagaaggtagccttgctacccccagtgacgattgcgagcctgaccaaggccgggccgctgctgttagtgccacatcatcctaagcataactaggaagggacgccggagatcagagaccgccaagactcgagaaagcaaaccagccccgccaggcgcgcagccgctgctgaagccttcccagatgcgaacctcccacccccacttccccggctttttcatcccttccagggcccaacggcaacaagaagtctggtcccgtactttggcagagtgcgctccgaaaccctggtgaagaaagagaagccttgaggcgcagtccgtgttgcccactctgggttcgaacacgcagctaagacagccacctgttctacaaagctggagtttgtgcgggcgcgggctgcggcaggaaggaccccatcgtcccctccctcagtacggttcgggaccgccaaaggtgcacgtcaccccaaatctaagtgcgcacacacctgcgcactcacccggaggcgcgcggcgactcactgccggatctcctagcttcagccccgaccacgcgctagctactggggcccaccccgcgacctgcccttccgggaggatggcgccaattacctgcagttaagatgcaaagagcgaagagagtcttgtagaccatggtagcctggtatttggtgcccagcccggggcgggcggcaaggagtttgcggactgacagagcgcactgggcgctggtagcgactcctctgccgggtgggctgcggtgggagccgggaggcgcgaacagctccagtggagggcgcgaggcaaacgaggcgaacgcagcgcagctccgtcagctgcgtgccctccggtgctccgcgctcttctgctccatcccagccgcccgagcccggggccgcctccgcctccgccgccgccgccgcgcctgccgctgccaaacccctcccacccgggccccgcggcgatgactgggccaccccctggccttccttctctcagccctcaggtcccgagagccccggcccagagcggcctctgctggacagtcaagacacgagaccctgggttcagcaaatgtttgcagcgccttgcactgtgctgggaactagggatgcaaagaaatgtgagcacatctctgcccttaggaatctagctcagcttttcctacatgagcttacagcctttaaaaaggtgaccttatgccattttaggagttccctcggagaaccggcacatgttccaagaatgaggaccttcttcatttgtcaaaacacttctgcgtgtacatcattaaaccctcatccacattaaacccggctgagcttcctggggcccgaaccaggatgtctgccgctgcattcagcttcttactagaagaaaatactgtcggggggataactaagccagacaccctactaggcgttgtttcatgaatccttctaagaattattattattccattttacaggtgagaaaatgaaggcacagagaagacaatgttctcaaggtcgcataactggtaagaatagtttgtgcactaggcccataataaaggctgacgtttcctgagtgattgctatgtgctaggcactggacaacgtgctgttcaggaatcaaccaagtcatttagttctcacaacaatccttggagattatatcctcgttttcaggggagaaagtagaagcacagagaagtttaacttgcccgagttcacacaactcgcaagtaatgataagatgcctgcccaggcaccccgctcagcctctgtactctactccctctcaagagcccaaagcttctccaaagcctacagattagaactgacctttcattcagttccctccctgctcttgctacactttaggcttgcttaattctcacacttcgatcaaagcagatgccaggttctctcccaattctgttattaatgaacctattggtcccctagtcactagagctggggcactgcaggagttaacaagcctttgtaaagaaatgatttgcgtggaaggcagctttcttttttctgtaatatcttcttcatatgccatgggctctgttctcacttctttctcacataccagaagctgactctaggagtcctgagcaccttatctatggtcaattcctctgcctgactctatcacactaccacttgtagattttgctcacacttccacaaccagattaaatttggatcatatttttttctctttgttttggtaaatctagtaatttctgttggaatgagaaacaaaaaatactcagaccaagtgcccatcccctctccatcctccctggccagataaactgcaaattcaatttgttcagcatgttctctgaatgcttttgacttcaaggcccttccggtttctagggtaatctatgtgattaggaacaatttctgcatctgggttttggttgtcatggatgcagggaccacacacagatggagttatgcagcgacattctatcaggcattagcccctttaaatagggcaggttaagtaagtgactctatggcagaaatataggtttttgaagaccacttcacagaaaaaatttattcaattgaaattcagcaaaacttgaaggagtctttctggagtgcgaagcatgtgcaactctaaccttgatatctaagataatggtttggtactcaaagaatcatgacccctacacactaatcagtgaaaatttccaaaacttttctattgtacgcaggatagagttgaaataatttctttgattaaaatagttcattttaattgctgattaaaaattttaatttattaattaatttagtcagagcatatttaatcacttattttacgccagcccttatgctaggcaatggaaatacaatggttgtaatagccagggtagtgtaggttatgctgctgtaac

SEQ ID NO: 317194 - DNA, 4001 bp, Homo sapiens
tgcccattctcctctgagtcgcggtcagtcacgctgaaaagggccaccacagtgccgggcgccgcgccctcactcaccgcttccttcacggtgctgaagctgatctctggcgcgttgtcattagcatccagtactcgcactagcaccttgcagtgcgcaggcacggcgttggggcccaggtccttggcttgcacgtacacttggtacactgggctctcttcatagtccaactcgccgcttacctccagtctgccagtgcgcggcgagagtccgaaaagctcccgcgcccggggcgaaatgtggctgctgaaggagtacacgacctcaccgttctggccctcgtccgggtcggtggcgttgagctggatcacgagagtgcctgggggagagttctctggtagggacacagtgtagacgggttggtcgaaagcgggcacattgtcattggagtccagcactcggatggtgagtagggccgtgccggtgcgctgctgctgggggggcaggcctgctcccccgccacctccccctccttctcctactcctcccccacctcctccgtccaccgcggtcagcacgtagcggtgcaccgcttgctgctctcggtccagtggcttctccagcaccagctcagcgaatcggttgccatccccctgggtctgcacgtccagggagaagtagctgttgggggtgatctcgtagtcgcgcaaggagttggtgcccacgtctgggtcgaatgcgctctccaaggggaagcgagtgcctggcgtggcgctctcagagatttccaccgtcaggtctggctccgggaaagagggggggttgtcattaatgtccagcacctcgatctccacctggaacagctccagggggttctccagaaagacctccaggtgcaggacacaggaggggctctgtttgcagatttgttcgcggtctattttctcgttcacgtacagcacccctgtctccaggttgaggtctaagtaaggggtccttgagttgggcaccgtctgaaacccgcgagccgaaagttttgtaatgtccagacccagatcttcagcgatattccccacgaaagtgccatgttcctgctcctcctgtaccgtgtagtgaagctgggaaaagactccttccaccatccagagcaaggcaaacaataatagcacaatcatctccaaaaggaaaggaagtagcttcccgcagccagtcagccacccaatcacctcccccaccaccacgaaacaaaaaaaaatctgaaaaaatacaaataaaagtgcgctacgtgggggctcctgtggctttctgtctttaaaaatcttactccttttgcttcattttagagcttcccgcaatccagcctcatttttttttaaatcttagcacaggaagggtgacaggcgtcccctttcctcatctgtaatctttccactgactaattaataaaataacaataatacaatagtcagcgtcctttattccgacagtcttggcgctggcaaatcccaaagaggaaatttcgatatttcaagactgtcctcggtttgtcttcttgctgatgggaggagaacgaggaggaggaaaaagaggaggaggaggaggaagaagaagaagaggaagaggagaaggaaaaggagatgctgttggcaccgttaaacatgcctcttaatgtcaacggctggcaaatgcaaaagggcttaaaatcagcgatataattttgtgccggaaaagcacagaacggctctgcagcttaaaactttcattctcttcatttctccggatggatgttcttcttgacatttttttcctctttcgctctatttgtattttttgtctttcagagtcttggttccctctgtcctcatctccaccgttacttgcctctctgtaagtgtaatgagcagtttcttttctgctgttttcttcccaagcctctttccctctaacctgtctctttttccttccagtccttccttcctcctgcttcagcctctgagcctgtggtctgggctggcagtttctgagctccgagcgctcggcttctccgtttttgcgcagcgccctcattctgccaaccaatcgcccaggagcaccacccaccgagctgccgatgattggccaaactggccgccaaacagacacgtcacgcggcagccgggcggggcgggacagaactctcgcccgagcggccggggtgagtgtgagtgtgagagcgagaacagccccgcaggtcccgaggcgctggctggggacaatgccgcggaaagttcccagtccccagccgcaggtaatggggagggaatagagaggttcccctgtttgcatcagcaaatgcgaaaacataatagcaacagctgcgatatcctctcctaggagcgggatttccaatgatgctaacattctttttcctttaaggtattttccctaatacgcatcatggaaataaatcatcgagaagggaaaaagtagcgcagggcccactaattggcaagggttacctaattaagggaccctagcagagactggcagggcattttaaaagtgagtattatatggcatgtgtcaatctaaaggtgagggggtctgacggggccgtgaggaaaggcgcgaagcatacggagtagggggtggaggtgactcctaaaaagcggaggaattcacgctaaaggatgtggggatgacagcgcttacagacgggcagacgcgttcgacgtgcttctttcctcccaaaatacatattcacaaaatacttaccaagtagattaactcactcgaggacctagcttcgagccgtgagcgcgttcatcagtgactgaggagttgatttgagccgcttcctacaagcccgccatcctaacgccgggctctggggcatccggcacacagcaccgccaagcgctgcaaagcgcctctgatatccctgcgccttgtgcggccaagtgccacgcagcggctgggaacaccggctattttctattttttttttggcaattggagatcgatccctttacccaccatgctagattagaccactgatttctgccaatcctggggtcagcccgcgggatgaggacagtggggcggcggcgaacgcgggcggggtggtgggcagggcccgtgcacacgaggggcccgagtgtgcaccgctgcgggtatctgcgaacacgtttgcacatgcacggtacttgcatccatcctccctggcccagggcttagctctgtgtaagccccaacggagcctccccgagttccgaaggacgcgcttgaccagctgtgagtgccccttccggaggcgcaggggcaacgcggcacatccacatagctagttcttgtgaagttaaaacacagcgcgaactctttaatgctggagagtggatagaatgccagttctctaaggaaagatctataaatatatatttttaattaatgggccactagcaaggaattggttgtttattcacgaaagaagcccctattcaatctcctttttatgcaaagagataggaaggtcctttgctgctttctggtaatgaatgacccaagaatacaccaccacaacctgcgggaaaagtagagtcgttttccgacctggagatacgttgccatttcctcctggcaaggagttaaggagggctagtgtccatgggcgtgatagtagcctgagacgtgcttctgagagtcccgcgaatgcacgtctactgccctgatttccgcgccccaactccccgcaacgccgggtccccccggcccccgcacttggctctttcatgaagatgggtcctgcctttgagcgcttagaaggaaaggattccagcaaaaatggctaatccttttccagctgcagtaaattgaagactggccaaagccaagcgaaaaccgctgcagttaaaatgattttagcatcacgtctgcggctgagaatggagcggcagtgtataaagggacctgtggatcaatgaaaaggagattatagtgtatctgaatattaatacggtattgca

SEQ ID NO: 317195 - DNA, 4001 bp, Homo sapiens
gagggcatagatggctccattagatgggtcaatggttacatatgtagttatggaacttcctagaataaaactctccaagatggtgtatgtcacttgcccattttctccaagatcaggatctgtggctgtaacagtggtgatatatgcccctggtgagttattttctgaaattacaaattcatatcggcttctctggaagtggggtggattgtcattgatatcattgatttgaactgtaaaatgtttcactgtagagagactgggtgtccccctgtcctcagcgattacagtcaaactatactcagatctcttttctctatccagtgtggcattagttaagattaaataattgttttcatatgtcttctgaagtttaaagtgaccatgtccatgaagcttacaaactatttctccattcagcccagaatccttgtcctgaactctgaccaaagcaacaaatgtatcaataggatccccttcaaaaatataagatatttcttcttttccaggggacatgaggttgatgttaatttcaggtttattgtcattaacatccacaaccttaattataattttgcaatgggctgggattgaatttggacccaaatcttgagcctgaacatcaatctcataggatttggtgatttcataatccacttgcttgaaaagagtcaaatgtcctctttcagaatcaattttaaaagtctccataattttgggagacacatgactgctgaaggaatatacaattttcccattagcgccctcatctggatccgtggcattcagatctaagagcaaagtgccaaccggggagttttctaagagttgtattatataagattgctgctcaaaagcagggctgttgtcattggagtctgaaatgcttatttttagtatggatgagccagacctctgaggtactcccatgtctgaggcagtgagctgaagctcgtagcttgacttcagctcccgatctaactctctgaccactatgagttctgcatacttggctccatcagtcctggtccgaacctcgatattaaaaaaatcattggcagagagcgagtatgtgtggagggaattttccccaacatctggatcaaatgcactgtccaggggaatgcgagtcccaactgctgcactctcagatatctcaataggtatgagagatcttgaaaactggggagaattgtcattaatatccagcacttcaacttcaatatggaaaagctgcagatgctctgtgggtagagtgatcacatcaaactctatggaacagttcaagtttttctggcacagttgttcacggtcaattgtagcccctatgctgatttccccattatcctcgtttactacaagtagaggagaatttcccctctgcatggctcgaaatcgaacagtagaaggattaggaagcttcaataaaacatcagccacatcctctgatagtcttgcaattactgatccaaccctctgttcctcataaatcctgtatttcaaattcttgcccagtacatcgtggttgaaagatactatcagaagtgcaaaaacaaacctaaagtgcattttagcattcatttggtgcattggtcagtttatgagatttccctcacagagcaagttaaaacagcaaagcaattgcctcaacttcctttggcaacgtaaagctacatttggtacttgaaacttgaaagcgtctcttaataacacagcacagcaattaacagctcgcaaacttttgttttatacacaccgtgtcacgacttccagataccttcggcatggagtccagtccttgcgtttgtttggtcgttcgtcctctttccaggcaggagagtgtcacctccgcgttttctcccttgtgtagtcggaatccatctattgcagggtgccggtggagtctgcagtgtgtctttcctgagcgattctttctccctttagctgctcggctgcagactaaacacccgtgattgctgactccagtctaaaatctgtacaacttcacttcaactcagacaaagctcttgcccagcgtgtgttgaatcgcttccagccaatcagcgtgcttccaaatcaaaagctgatggagtcacccaaggagggagggcgagagtggagggtgggagagagaaagagacggagaaggaggaaggcgggggtgggtgcgcgagggagagaaggggagatgggctggtgggggctgggggaggagatgggagccagtccttccctgttccttccttcttcctccccactccccctccgcctttcaatctactgcattcactttctctgagcgtgccatgacaaaggggagacaaattacagaagaaaaactttaaatcaacttctggtcgcctttatttatatggcacgttaaattcttcttgttttcttaattgccctttcttctgccacagacatgtaatcatcttgcttttcatagtccttaagtgctagtttaacttaaaatacctctaagtgcgttttgttggtggaggaatttaatacaatttgaaaacttgcttctaattatgcttctcagaccacctccttccccactccctctgtaaatacttgggcctttctccttccaggagcacaagcagattttcttggggctctgtttttaaagaacggagcaagtaaagaggtttcattttctgttttctttcatctttattctttgaagataaaaaaagggctatcttgcactcttcatttctcttaattagcaagacttaagggaacacctcagaatttggaactaattaacaatatagttctaccttgtatgatttctttccttgagtttgggcaaaattgtttgtaatatttctttgtcctgtacttcaaaaaaatcctatttatcttgggtaaaagacactgcaagctttagcatgccaatttctaccaaaaggcactatctatacatggctagtctttgcagtgaatacaggggggacatggactcaatagtttacaagtcaaatttttataatatatgcattatttatgaaaacacttcagatatgtattttaaaaaccccaaaggttgtttacactgacaaatcaaatgcctgagctgaaaattgcattttgtatgcatcaaaatgctaggaaatatcatgggaggcttgtgctctatccaggtcacagaaactgatacggtattcttatttgaaaatatgattatttatgatgttctttctgctctgcaattccttttaagtttatcatcgtggctccatttttgctgctttttttcatacctttttccttattcctcagctgtcttcatccgcttgcatatttgctgtttcacagaatgtcattgtcacttttttccatttattttttctcactgtctattttgccccccagaaacatataaaaaaagtaattttctgatttttccactttgcttactctcagcagagctcagctaaagtcactaagaaggctctttccaaaaaagaaagcagaggagtctcagcgtgaattctccttctttttaggcattcaaaagcattttataagccattgtctttttttccccctcctgaaatcagtgctgtgtggcaaattgtgcagaatagaaatgcctataatgaatgtatttagtactgggtcacgctgatgaacattctgcccccatgaataatactgttttacaagtttgtagccctttcaaattgctgatccccaaaccctataggcaaactaggaaaactaccacaagcaagggggactttagaaacccatagccatctggcctagatctctaacaatctgagccaataattatatcaattcaggctttagcgaacccctttgcaaacaccaaaagagcaaagaaaggaattagtgactattcaaagttggggtgagaattcaaaggtaacctaattccattagttctaggaaaattttctttcagaatttgataagtctaccccccaaaaaacttcaagagcaatcgatttgattaccttgat

SEQ ID NO: 317196 - DNA, 4001 bp, Homo sapiens
gcgcagttgcaggatgggggtccccggggcgctgttctcagccaagtcggcctcgtacacgctcttctcgaagcgggggctgttgtcgttcacgtcggtgatgaggacccgtaggatggcctgcgaggagcgaggcgggtcgccgccgtcgcgcactcgcagggtcagctcgtaggagtcgcgctgctcgcggtccagcgcccccttcacgatcagctgcggctgcttctcgccgtccggggtgtccgccacctgcagctcgaacacgctgctgcggccgccggggttggtgccgccgccgccctctgatgcgtccagccgccgcttggagcctcccgagccgccgccgctcgcgccgttcccgccgcccccggggtagggggcgctgtcggccgccccggcgcgccggctctcgccgccgctgccgccgcctccgggctcctggagcagctcgtagcgctcgatgccgttgcggccgaagtcgcggtcggtggctgtgggcagcaggtaaagtgtgcccaccggccgattctcctccaccgtgagcgtgagcacgggcgacgggaaggtgggcgtgttgtcgttgatgtcaagcacgatgacctgaccctcaaacaggtccacccagctctgcgagggcccgatcaccgacacctcgaagtccaggaagcactcgttctcgtcgaagatcatctgacactggggcagcttctcgcggtcgatgcgccgctcgctcgtgctcagctcgccagtgaggttgtcgatcttcaggtactcggaaccggactccaggctgaaagtcacctcacccgatccggtcacgatgcccaggtctgaagccacgttgccgatgcggacgtcggcggggccctcctcggccagccggtaccggaggagctgcttggcggccgccaggctgagcgagagcggcaggaggaggcagcagcccaagcaccagccgcgcgcccatcccgcggtccgcatcctcagcatcttctcctgctgctgctgctactgctccttctaaccacagccccctcggcgcccccctcctccggggccggccgcctgccctcccccgagtcctctcccctctcccggaaaggaaggagcgagagggaggggagggagggggcaaaagcggcgtggagagttggccgggaatgggggtgggagggcagcgatagatgcttctttttttcctcctgcttcttccgaaagttattgtttcataattcatgcaatgggtgctaatcgcccgctcgcctgccgccgttcagtcgcagtactcacagttcacgggacactgcgcgccgcgggttcggcgctcccccaacccagagtcatcccctcagcgggcggagaatccccggctctagtccccgctctgtcggaaggggccagaaccgctccggcagacgggcagtggggctgggaagaggtggggaatgagcctgcagcctcccccgcctgccagcccgctggtctttgctgctactcgagttgagtccaattcacgttccaggcactcactccaaacccaggctctgctccggctccggccacccagacaaacgtgagtcgcttcctgcaccaggcgctggggccagcaacaagccagtctcaactccgactctgctcatgcagcgggggagccagtcaacagatcgagaatgaaaaatcccccggcacgtcgcttcgggcacggtgcaggggagactactcgcgtcacagagcggtcagtgtcagggtccccccggcgcgccaaagagaagcccgagccatcttcagagacgcccagagtcagtcccttctcaccccggagagcgcgggtttctcttttttcttaacaactctgcgcaaggtcattagtcacgaagcagccgcctgaaaccgcagcagcctttcgcccacgggggcgaaggctgagcagtgcgcaccgtgcggtgcccaagtttgggttcgcagccgcagagtccgtgccttttctcacctgcattcggcccgcatgtcggagcagtgggatctgcagcgctgtgcgcgattcagggaggagattgcagcctctctctccccgctctctctcgatccctcccctccctccctccctttctctctcctccctcctctctctcctccctcctctcctttcccctttccccctctcccactcgctctcttgcacgctctctctccttcccaatgcagggaactcaagctgaacttgatccctttgcagttcaaaggtgagcaaaccaggctcggagcacaggcgacgttagccggcgaaagcgcacggccgggcgtccccaacggcaattaacaaagatgcccaattctgtctggatttccgaagaaaagccaaaggctttcgggcgggggtggagggggaggtggagtcagagacagctgccaagtagcttaaaaaaaaaaatccagtttgccaaggggagaaaaagtgtcagtcggttgtggcctcggaagtgccctggcacggctggtgaattccgcagttgtctcgtcccttttcgcgtctgggagagtctggtgcgggcgctcccgccgcccctcgggctgcagcggctcggagacactgaaccgctagtgggaatctcccgttcgctacccgcgagcaggaaacccgcaagttgcccaaagtggtggttgctgctgggtgctcgctcgctcacggatcaggcttgtccctgacgctgctgctgcagcggcggcggcagtagcagccgagccgccgaaactacacactaggagagagcgagggaggagggcccgggataaggaggcgggagggagcgtcagccagccgccgcgctcgggaaagcccagcctcagctccaggggccgctcaaagtgtgcccaatcccagccagtcctctttaagccaaagcccagtccccctccctagcgagtaccgccgtcttctctgggggacttgttttccctccctcgggctggtaaatttcctcctcccttgactaatgcccagttcacgcgtgagagctttcggagctggtgtcaggataggtttctccttctccctccctctcagacgacgtcctcctccccccggaaagtgtctccggttcgcgatttaggatcttggttaggacatggttatcggggtcctggggaacctacgagcgcccagaaagccactctgttctgaaaaaccatgacgggctgcagtagtgaagagagaacatcaaactccagagagctggagaaagatccttttttgggagctcagactttggatggttgcggggggcaggggcggcggtgggtggagggtgaaggatgtctgtctttgtttaaatgcttgacattcctgtcgtcgtgcttgcttgcgggggtagaccgtgtgtgcgcgcctggggaataaacacatgttggaaacctcgatattattttctgagcagaaacctgcagcctttagtaactggcaaagtgtagcgtcacctatctggataaaagggaaataaactttaatggcaactttgtgtaccaaagtgtccccagctttcccatctctccttttgactttgtgtcccttgactgtccctatttcctgaagcaaggcttctccaattttcattcacgaccaccgcagccggcctcatcagatctcaggtctggttgtgtttttgaactgagccatttactcatttatttcagtggctgtaaacgaagaggcccggctaggattaagacgactgagacggactgtaggtatttggggagaatttttaccatctcgaaagagagaaagggccgctgctgggatttgcttagtcttcagctcgcctgacgtatccatacacatttaagggcctcccctcaaagaaaaatttaaagccgaaaaaataaaatctgtccagtgtgggtattctttacgagacctgggtgacgaggcagaatgatttaaacaagacaaacaccaataaagtcaacgagcagatgtagcgcgcggttgtttgggcggg

SEQ ID NO: 317197 - DNA, 4001 bp, Homo sapiens
tgcaggatgggggtccccggggcgctgttctcagccaagtcggcctcgtacacgctcttctcgaagcgggggctgttgtcgttcacgtcggtgatgaggacccgtaggatggcctgcgaggagcgaggcgggtcgccgccgtcgcgcactcgcagggtcagctcgtaggagtcgcgctgctcgcggtccagcgcccccttcacgatcagctgcggctgcttctcgccgtccggggtgtccgccacctgcagctcgaacacgctgctgcggccgccggggttggtgccgccgccgccctctgatgcgtccagccgccgcttggagcctcccgagccgccgccgctcgcgccgttcccgccgcccccggggtagggggcgctgtcggccgccccggcgcgccggctctcgccgccgctgccgccgcctccgggctcctggagcagctcgtagcgctcgatgccgttgcggccgaagtcgcggtcggtggctgtgggcagcaggtaaagtgtgcccaccggccgattctcctccaccgtgagcgtgagcacgggcgacgggaaggtgggcgtgttgtcgttgatgtcaagcacgatgacctgaccctcaaacaggtccacccagctctgcgagggcccgatcaccgacacctcgaagtccaggaagcactcgttctcgtcgaagatcatctgacactggggcagcttctcgcggtcgatgcgccgctcgctcgtgctcagctcgccagtgaggttgtcgatcttcaggtactcggaaccggactccaggctgaaagtcacctcacccgatccggtcacgatgcccaggtctgaagccacgttgccgatgcggacgtcggcggggccctcctcggccagccggtaccggaggagctgcttggcggccgccaggctgagcgagagcggcaggaggaggcagcagcccaagcaccagccgcgcgcccatcccgcggtccgcatcctcagcatcttctcctgctgctgctgctactgctccttctaaccacagccccctcggcgcccccctcctccggggccggccgcctgccctcccccgagtcctctcccctctcccggaaaggaaggagcgagagggaggggagggagggggcaaaagcggcgtggagagttggccgggaatgggggtgggagggcagcgatagatgcttctttttttcctcctgcttcttccgaaagttattgtttcataattcatgcaatgggtgctaatcgcccgctcgcctgccgccgttcagtcgcagtactcacagttcacgggacactgcgcgccgcgggttcggcgctcccccaacccagagtcatcccctcagcgggcggagaatccccggctctagtccccgctctgtcggaaggggccagaaccgctccggcagacgggcagtggggctgggaagaggtggggaatgagcctgcagcctcccccgcctgccagcccgctggtctttgctgctactcgagttgagtccaattcacgttccaggcactcactccaaacccaggctctgctccggctccggccacccagacaaacgtgagtcgcttcctgcaccaggcgctggggccagcaacaagccagtctcaactccgactctgctcatgcagcgggggagccagtcaacagatcgagaatgaaaaatcccccggcacgtcgcttcgggcacggtgcaggggagactactcgcgtcacagagcggtcagtgtcagggtccccccggcgcgccaaagagaagcccgagccatcttcagagacgcccagagtcagtcccttctcaccccggagagcgcgggtttctcttttttcttaacaactctgcgcaaggtcattagtcacgaagcagccgcctgaaaccgcagcagcctttcgcccacgggggcgaaggctgagcagtgcgcaccgtgcggtgcccaagtttgggttcgcagccgcagagtccgtgccttttctcacctgcattcggcccgcatgtcggagcagtgggatctgcagcgctgtgcgcgattcagggaggagattgcagcctctctctccccgctctctctcgatccctcccctccctccctccctttctctctcctccctcctctctctcctccctcctctcctttcccctttccccctctcccactcgctctcttgcacgctctctctccttcccaatgcagggaactcaagctgaacttgatccctttgcagttcaaaggtgagcaaaccaggctcggagcacaggcgacgttagccggcgaaagcgcacggccgggcgtccccaacggcaattaacaaagatgcccaattctgtctggatttccgaagaaaagccaaaggctttcgggcgggggtggagggggaggtggagtcagagacagctgccaagtagcttaaaaaaaaaaatccagtttgccaaggggagaaaaagtgtcagtcggttgtggcctcggaagtgccctggcacggctggtgaattccgcagttgtctcgtcccttttcgcgtctgggagagtctggtgcgggcgctcccgccgcccctcgggctgcagcggctcggagacactgaaccgctagtgggaatctcccgttcgctacccgcgagcaggaaacccgcaagttgcccaaagtggtggttgctgctgggtgctcgctcgctcacggatcaggcttgtccctgacgctgctgctgcagcggcggcggcagtagcagccgagccgccgaaactacacactaggagagagcgagggaggagggcccgggataaggaggcgggagggagcgtcagccagccgccgcgctcgggaaagcccagcctcagctccaggggccgctcaaagtgtgcccaatcccagccagtcctctttaagccaaagcccagtccccctccctagcgagtaccgccgtcttctctgggggacttgttttccctccctcgggctggtaaatttcctcctcccttgactaatgcccagttcacgcgtgagagctttcggagctggtgtcaggataggtttctccttctccctccctctcagacgacgtcctcctccccccggaaagtgtctccggttcgcgatttaggatcttggttaggacatggttatcggggtcctggggaacctacgagcgcccagaaagccactctgttctgaaaaaccatgacgggctgcagtagtgaagagagaacatcaaactccagagagctggagaaagatccttttttgggagctcagactttggatggttgcggggggcaggggcggcggtgggtggagggtgaaggatgtctgtctttgtttaaatgcttgacattcctgtcgtcgtgcttgcttgcgggggtagaccgtgtgtgcgcgcctggggaataaacacatgttggaaacctcgatattattttctgagcagaaacctgcagcctttagtaactggcaaagtgtagcgtcacctatctggataaaagggaaataaactttaatggcaactttgtgtaccaaagtgtccccagctttcccatctctccttttgactttgtgtcccttgactgtccctatttcctgaagcaaggcttctccaattttcattcacgaccaccgcagccggcctcatcagatctcaggtctggttgtgtttttgaactgagccatttactcatttatttcagtggctgtaaacgaagaggcccggctaggattaagacgactgagacggactgtaggtatttggggagaatttttaccatctcgaaagagagaaagggccgctgctgggatttgcttagtcttcagctcgcctgacgtatccatacacatttaagggcctcccctcaaagaaaaatttaaagccgaaaaaataaaatctgtccagtgtgggtattctttacgagacctgggtgacgaggcagaatgatttaaacaagacaaacaccaataaagtcaacgagcagatgtagcgcgcggttgtttgggcgggcgcagga

SEQ ID NO: 317198 - DNA, 4001 bp, Homo sapiens
cccagggtcccggcccccaggtgaaaacagagctgtctcagggtcccggcccccaggtgaaaacagagctgtctcagggtcccggcccccaggggaaaacagagctgtcccagggtcccgacccccaggggaaaacagggctgtcccagggtcccgacccccaggggaaaacagagctgtcccagagtcccgacccccaggggaaaacagagctgtcccagggtcccgacccccaggggaaaacagggctgtcccagggtcccggcccccgggtgaaaacaggctgtcccagggtcccggcccccaggggaaaacagggctgtctcagggtcccgggggagacggggcagtctcagggtcccagcagtgctcacaggactcacaagactgctccagggtcaggtcctcctgaattatggtcatggggtcctggccctcgtctgtgacccactttaaggcaggaccttcctgggggatctattctggggtcctggcattctttggattctgcctggtccctacgtctggccctcctccgtgattcttcccagggtcctagcccccccgggccctgccaggtggccaggtccgaccctccttggtgacccatcttggggtcccagcccttctcggtgacctgtcccagggtcagaccctcctggatgatgtgtcattgtgtcctagcactctgggggtcctgtgcaatcccagagcccaactctcttcaggtcctgcctggtctgaagacccagccctcccggggtcctgcctgggctggggtcgcgaccttcccagggtcctgcctgggctggggtccctaccctcccgcggtcctgcctgggctggggtctttgccctcacctgggtcctgcctggtctggggtcttcgccctccctgggtcctgcctgggctggggtcgcgaccttcccagggtcctgcctggtctggggtccctgccctcccgcggtcctgcctgggctggggtcttcgccctcacctgggtcctgcctggtctggggtcttcgccctccctgggtcctgcctgggctggggtcgcgaccttcccagggtcctgcctggtctggggtccctgccctcccgcggtcctgcctgggctggggtcttcgccctccctgggtcctgcctggtctggggtcttggccctcccggggtcctgcctggtctggggtccctgccctcccgcggtcctgcctgggctggggtcttcgccctccctgggtcctgcctggtctggggtcttggccctcccggggtcctgcctggtctggggtcttggccctccctgttctggggtctttgccctccctgggtcctgcctgggctggggtcttcgacctcccggagtcctgcctgggctggggtcttgccctccctgcgtcctgcctggactggggtcttgccctccctgcgtcctgcctgggctgctgtcccagccctccctgggtcctgcctgggctggggtcttcgacctcccggagtcctgcctgggctggggtcttgccctccctgcgtcctgcctaggctggagtcccagccctcccggggtcctgcctgggctgggctcttggccctcccggagtcctgcctgggctggggtcttcgacctcccggagtcctgactgggctggggtgccggccctcccgggcctgccaagggcttcccgggccaggccgacggggacgacggagcgcgggcccggggttcggagccttccgggccggacacgggccgaggccgcagcctgaggagcgggcgccgagggcccaggccaggcggggcggactcactgacctgcggtctcggggctgcgggcgagcaaggcgcacgcggggtccgcgccggaggggggagggggcgccgctccctctgggtcccccccaagaggaggagaaaaaagcccgtccggagtttaaaacaaagaggcggaaatgcccgagccgagccgagcgccgcgtcgggggcgccgcgctcggagcatgcgcggtgtgcgtctgggctcccaccccgcggcaaggggcgtgggcggggccaggcggtaaggggtggggataggggcggggaggggcgtgttcagagggcgcaggcgcgtcgggcctggactcggcggagggagccgcggggcgcgagggccaggggcgaggcatagggcggggccatgaggggcgtggtcaggagagcgacagggccgcgctgtgctgagggacccgacgggtcctggacgatcgtgagctggggcgctggagcagcagagtcctcaggcccgggtccctccgggggtgccgtccagtacgggtgctgctgtcctttgtgggagccgggactgagcgccctcccggcagggttaagggtcggtgttagggtcaggggtcgggttaggggtcagagtcagggttagggttgggtttaggtttagggtcagggttaggggttagagtcagggttaggactgggtttagggctagggtcagcattaggggttagggttagggttgggtttatggttagggtcaggattaggggtggggtcagggtcaggggttagggtctggtctagggttagggttgggtttagggttagggtcagggttagggttagggttgggttttagggttagggtcagggttagggttagagtcagggttaggactggatttagggttagggtcagcattaggggttagggttagggttggttttacggttagggtcaggattaggggtagggtcagagttaggggttaggtttagggttagggttgggtttagggttagggtcaggattaggggtggggtcagggtcaggggttcgggtctggtcatgtttaggcttgtatttaggttatgttcagcatcaggacggacagggcacccacgtgcggactctccgacctgggtgccctccgccagggtggagcagtacgggcggcatttgcgccttcgtgggactggcactgtcctgagagggcgggatccgaggaccgagggcgcgtgcgggggtgaggcggacgtgcaggcacgcggggtcctagggtctcccggtttgcgggttctgggctggcggcccaggacgggagggcaggttgggtcttgggtgggaagcgagaccactgtggttccgggcggcggggcaccgcgcagtgtggaggcttggtggcgagaggggaggccccgtaggcccaggggcactcgctgcgaggctgtgcggtgcaggcatggagcaggagtcgggagtcattagctcgtcccgtctggagaggtggtggctgagggagtgaccctgcgactgtccccgtgaagtctagagttggaccccgggagcagccaccaggcagggggccccgggcccaggtatggtgcagcacgtggggaagcggcttgagtccgctgctgagaggggcctgagaagggctgggggcctgctgagatctccagcactgggtggacacgttatccgggtgggaggaggacagacagcagacatgtgaatgtgtacagcattcccaggcatgctgctgtgaaggggagggactaaatgtggccactgctgcccccgggggaggggaggcagggagggctccgtggagccatggggtggcccagtgcaggggaggggcccactggagagggctgcctgggattggggtactggggtgctggccctccacaagagccctgactgcagttttcagttggtggaggcaggccccagatgtggaggggaggactggaggatcatcccagaaggagggcaggggcaaggtattggtgctggggtgcaaggggcagggggtggccagcaggccaggaacagtcctgggctgagtgtggtggcctcaggaagaggcagagtggtaagctgcagttcagaactcactccaggccccaggcccctcctcaaggaggtgcagaccctacccctaggcttcccactactctcctgggtgggtgccagcggtgcccggaccttgactctgagc

SEQ ID NO: 317199 - DNA, 4001 bp, Homo sapiens
aaaaaaaaagagtaaggtttgttgtgcggatttcaggtggtaccttttccaccttgagcccaacagtttgagatcaacctgggtttggcgaggccccatctctacaaaaaaaaaaattaactgtgtatggtggcatgcacctgtagtcccagctactagggatgctgaggtgggagaacacttgagcctgggaggttgatcatgtcactgcactccaggctgggtgacagagcaagatcctgtctccaaaaaaaaaaaaaaaaagacatgaactatgaattttttcccccccgagatggaatcttgctctgtcacccaggctggagtgcagtggtgcactctcagctcactgcatcctccgcctcctgggttcaagcgattctcctgtctcagcctcccaagtagctgggactacaggtatgtgccacaatgtccagctaatttttttttttttgtatttttagtagaaatggggttttgccatgtaggccaggctggtcttgaactcctgacctcaagggatctgcctgcctcagcctcccaaagtgctggggttacaggcatgagccactgccctcggccatgaaattttatctaacagaaacaggcaccacaatctatttgctcaaactatgaaggcatttaccatgccattaatagttatatctgtcttcttcttgttccctcattagtaagctcttagaacaggtccgtatctaaaacataagcactgaataactggctgttgaattaatcagtaaaccaacaaagattaatgtgatgttgccttcactgtcaattacatttcaatcctgaagagcagatgcaaatcaggacaaatctgcaatgtttttacacacatataaaatgtgcttgctacgaatccattattagcatgaaaggactggccataaaaaattatatgtaactgatgttcaaaatatcctaataaattatacagtacatacaaacacccaaaattaaatatgtaaaatgagaaaaatcccagtggttttaatctgcaggagcaggtggggaaaaggtgtttctgtaagttagaaagacaattttactgtaccaaaaaaaaaaaaggacggcacaggcttctgattaataaggaaccattagacagaggaggagccttctaagaaacattttggaagtctgagtttttgtttgtttgtttgtttgttctgaggcgcagtctcactctgccgccaggctggagtgcagtggtgcaatctcggctcactgaaacctctgcctctggttcaagcgattctcctgcttcagcctcccaggtagctggggctacaggcgcacgccaccacgcccaggtaatttttgtatttttagtagagatggggtttcaccatgttggccaagatggtctcaatctcttgacctgtgatccgcccgcctccgcctcccaaaagtctaacagagtttttgaggtgaggtgcaagaaactctagggacatatggtattaagacatatgtgactagtaggttttctgttcttattttttaaggtagtggaggaggacaaccaaattgaattacacttgggctaacgttgccgctctattaagtcaaaaatagtattcagcagtaagatttctatgattttggtgtgaaacacaatacgtaacaactcttttaacgttttctccagcgacagacacaagtcttaaaggctgaaaaaatggcgttctcctagaggatttttctcaaaactagacagagaagcacgcaaaatttagcactttccaagaacaaatgttagagcctacctcctgtgtccgccctccccatttgtgtcccttggcttcgggcccagctggagacccactgggtgttccagggtggctcggcaggtcccgaccctcacctgcatgatgcgctgctctgcccctcaagagcccgcgtcgtcctgcagctggcgaggcgccacggatggagacccgcagccttctccaggctggaagagcgcccgcttcaggcccggcggtttcgagtgaccgccagaagagggagaggcgaacaaggacttgttacgcatgggcgggcgtggcagcttggttgccaggcaatgcagaggcccaacacaggggatggttgtgggtactgacgcgccaggtcctggagcatctatcccaagcactgcctttcctgttccctttgtggtgctggtgctgacattcttgtcaacttttccctccatcaccaccattgaatcaaccgattgtttcagagactctggcacccttcaaaccctgagtcctgtcttcatggagaaataacaaactcctggggtggagaacccttcagaggaggcgttcttaacctggaatccatagactatatatttttttgtttagagacagagtcttgctctgtctcaccggctggagtgaagtggtgcaaacactgctcacagcagcctccacctccacggctcaagcagtcctcctgtctaagcatcccatgtagctgggatcacagatgcatgtgccatcatacccagataacttcttaaatttttttgtacagacaggggtctcacatgttgcctaggctggttttgaactcctgagctcaagtgatcctcccacctcagcctcccaaagtgctgggattacaggcatgagccactacacttagcccatacaatgtatttggatagattttagggaatatcttgccccccagcccccaagtgtactacacgtaattttgttgtatgtgtacatttttttctgaaattaagagccagagctttcattagatgcttaaatgggactgtaggctccccaactccatcttaaaaaatccactgccttaagtgacagaagctctggctttaggccaggcacggtggcacaagcctgcagtcccagctctttgggaggctgaggcaggtggatcacttgaggtcaggagttcaagaccagcctggccaacatggtgaaacctcatctctactaaaaatacaaaaactaacaggatgtggcaggtgcctgtaatcccagctactcaggaggctgaggcaggagaatcacttgaacccaggaggcagagtttgcagtgagtcaagatcacgccactgcactccagcctgggcgacagagtgagatctgtctaaataaaaaaaaaaaaaaaaaaaaaaaaaaaaaaaaaaaagctctggttttaggtaggatgcctagacaggtaggggttcctctgtgtttaaattaaggaaaggatgtttactgggagatgccaggaacttgaggaaaacacttggtgttttatacaagttgttttacacagttccagagatatactcacaggacttggaaagaaaaaaaatgtttttaatgacataactttaaacttgggttcaacatggggccagtccatctctagtgcctagctgatacttaatacaaatcttatactcctagtagcccatatattctgttgtgtttgtgtatgagacatgaatctgttaaatataaataattaagaacatatcacaatttttgtaatcatgtcttggtatttttctcatcttcttcttcttcctctttcttcttcttattcatcccaggagccctaaaaatgttacctatgtctctctggatttctgagaggccctgggaactgctgattaaattaatattcttttcttattttgacaatccaaagtccaggctagtggaagtactgtgcacagaactagctaatgctgccccatgcatttgtggttttagggcagcatgctctccttgctctcaagtccccatcttatcaaggcaatttatttttctaaaaataatgtatttttttctcttctgcttcttcttattaacctgagttcttcactcaggttaacaagaagtgaaattcaggaactttgttagtaaaaggtgtaacttaagctataataattggtcaacattagaaagacaaagatttgttagatactctgctctgaagaatgtctgtatagaccc

SEQ ID NO: 317200 - DNA, 4001 bp, Homo sapiens
taaattgaaaagattaatcccggagccttcccctctgtcaaaaaaccctgaaagtgactaaattgacaccaactctggatgttccttaggaaaaaaacaaaacaaaacaaaacaaaacaagattaaaaagggcccaatttaagacccttattaatacatctgcaagagagcaaagaataacaacaacaacaaaagttatacagtcaattttcaatgatacatcgtcccactggtgccaccggggcgccaccacccagcacccgagacccgccgcgcccccggaaaaagtgggaagggacgtagggggatgctgaaggaagtaccttgttttgtctccaaagggcaacatagcaaacgtgggaagttcgttttcgaactccgccgatcctggactccaggaggctccgtaggggcaacaacgcgcgcaggtgaggtgaggtgaggtcggcgactcagaaccagctccctcacggccccggcctccgcgccgccgcccgtcgcctcccgctcgccccgcgctgcgccgccccctggcggggagcgaccggcagagccgcggccgcgcgccggcgagtgggacccgggcgtcgaacccgggcgggctcctcgaccatcactgccgggcgtgtgtcaccctcccggccaagacggccagcacccgctgcccgacggccgctgcccagagcaggcggcagcggggcacggactctttctgcaaaggggcgcgtcctggagtccacgcaccccgactatgcatcaattcctcaggcttcggggcacccgcccgccaagcactctctgctccactcttcttgtccctctgctcccagtctcaattcctccccaactctcccgcgagcgtttcccacgagcgccccgactgcccgctgcgcagccgcctccaaaaggacaggctccctcctccccgccctccgcaagggccgccccggcgcttggctctggaccagaaagagctggcctctggggtctgcgctgccccttggggtccgctccaggcggcgcctcccctgcgccctttgtgtgcacgccgcaaacccctctgcagagctctacttttggcggcacagccttcggcggaaaagcgagtgaaaggaggcgcgcgggacaagcaggagactggaaggggggaaaaggcaaccgcactcactttggcaaggttccgtcatgttgcctttgggctgtcccgtggactcgtccctcaccccagcttccccgcccagccagggccagggcgaggggggacgggggaggagcggagccatcaagaccgacttggaaatggtgcttccggagctgcagggaaggggctcagaaactgtttgggttttgctgattggattttggggaaccagagggctagagaggggctaggggaaggcccgtgagcacggatgtatgaaaataatcatgttcccggggaataccaagagggtcgggggtgagggtgggaggtcggcaagtacatttttgtatttgaactttgtgagcaagttgtatcaaatccgacacttgagtttttcgactgtgctcgcttagagttgaggtttctacctcgtaacaggaccgaggacctacttcaaaagcaaagggcctgggaacaggggtgaacgaagggcacaattcaacaggggagagaaatcagccccgggtcttccgtgggtcctcttcttacctggtggcttttctaacaaagtatgagaaggtaaagtcccagtgatcgtccagccatgcttcgaccgagtcctgatccctctgctgctgcttctgctgctggggctgctgctgctgtcgctgctgcccgaagctggggccggcccgctccatggttggcaccgcgcgcctcggaggctctctggtactgcttttccaccccagctggggtccgtccctcagaagaacaggactcggcctcgagaccctcccccttcgtcctgctccagtcgggccggctttcgacaaagcggccggagcgccaggccagcctcctgccccgccccgccccgcgcggttctacgggcgcccaggtgtggtgggcggggccaggcgcagctgctgcgccccccccacccggggtccggcagtgttccgctctcgcaggctcttcagtcccctggttcccaggaggcggcggcggcggcggcagcggcagcgcccggcgagctctccggaagccaagtggcggcggctggaaggaggccgcgcggccgctggggtgcgctgtgtgccaagccgacttctggggagcgcgctaggtgactgggtgtgttctcagagtgccccagggagggaaggtcgcgatgtgggaagttttgcccgaaagtaagagatgatgagaccctgggcccttttcctggggcctgggagtgcaatgaccttcccgcctagcttttccctagccctacgcttgggtctgggaggagcgggaccgacctccttcagagcccagcccgctcagtgacttaaagcggtccagccacggaccactgcgggtggagagagctggggcgtgtgctagcaagagagatttgcaggtgtaggtgggtaacttgcaacaaagccatacccgtgcttaatgttaatgataacagcaataattataacttaagtgcctttaaccattgcctcaaacttcccttatgcataactggaaaaagatttacttggaaaagaaaaagcaaacaaataatttccaatgctttgtgcatgaagttagaaaacaagggcacctctgtacaattaggttaatccgagagcactggcgcaacccaggtgcagtcgagggcaaccagttatcccaattttaaattaatgcatcattttaattaaattggaattaacactccctcaaaagtatccattaaaaatggctcagcctttttgtccaatccctatcttgcttctttaaaaaaggaattggtgtcatcctttgctttgtctgcatccccatcttcctgtcatgcattggcagttttaatatggcattttgcaatgacctatattttttggtagaattaaatctggaattatgggttgcacaatgtgtgaatgacaccattagcagtgatataaaaaaaaatgagttagctgatatacttctgacaacttccttctaaatactcttggcaagaatttaaggcattattcactacatagaaacacatcattaaattgataatctgagaacttttaaaagtatcttctagtcccccaatgcaatggtttatctttccttcattgagtaattgaccttttgcgacttcagtttttctgaaactttactgctgtatgcaggtagccacaaccaaagaaaagcaatcaaagcagtagagtatgaactaatgggtgataaattatattggatttagaaatgagaattctctcctaatgtgttactatgatagtgattatagtgctcatggaatacagtcatgcgtcaccgaacaacaggatacattctgagaaatgtatccttaggcaatttcatccttctctgaacatcacagtgtactaacacaaaatagatggctcagcctactacacacttaggctattgctcctagaccacaaatctatacagcatattactgtactgaatactgtaggcaattgtaatgcaatgatatttgtgtgtctaaacatatctaaacatagaaaaggtacagtaaaaatatagtattatcttatgggactcatatatgtggtctgtcgttgactgaaaagtggcacattactgtggaaagtttctcctcagtacagttttttcttgtggaaatccatgcattcctcctaacaggagatcaatcgtaatttaaaactctgcttatctactaaagatgcagtgaatttggggcttgaattatttgcttttgttggatacttgattaaataaacacgtataatcatttcaatgtttgtattccctccaaaattcatgttgaaacttaatccctaattcaacagtattaagaggaggtgccttt

SEQ ID NO: 317201 - DNA, 4001 bp, Homo sapiens
tgccaggcccaacctatagcttttaataagatgcgtagctctctacttgaagacagtgatagtaaacaatgtaatataatggcataaatgctttcaaggtcaacccaaattcacaggtgtttgagaatttaggaatgccagaaccttgatgttcaataactaccattgagtgtagatcatttagtctgagaaaaggatggaaaatcatgcatgaatgtcgaatgacaacaataatgcagaaattgtttttatcagcaagcctgattactggtgcagatggacgatctgggtgaatataaatatattttaaatcttaaaacatgccgcatgcatctacagaactattttgtttcatgggtttcctgaatcacatacaatattcattttacacttacaaagtgtaaaaagaggggaaaagcaaagtaatgtgagctcctacttttaaaaaaaaaaatccttagctgtaaagttaaaacgtatgcaataagtttttaccacaaaatgtgaaccacactggggttagtggtttgcatttttataatcaacaaatgtccatcctcttattcacattttaagtctcctgttaatgccaccaaatataaaaccaaattggaatattgtttcatgaaagacctctggctacacacaaattcttaggttatattctttactctgacaactctcagcactttattataactcttaaaattgaggacctgcactattaaatattttacactttcattttccaacttacactcaacataacctcttaagaatatgtatacacacatacatatatatatcacagaaagtgttcagcctgttgccaacatcaactgtaatttaaaaactctaaccgaaaattttttaaaagtttttttagagcctcagatgatctaaattttacagtgagcatggtaaatttgagaaataggattttgatcctatgctgcttgggagaaaaagtaatgggaaaagaaatgtaactcagctctttccatttattttccattaaaatgttgctacactttcaaagtgttggtaggttctgaaaatgcagtgttcctatctatgactagtcaaaaacgaccaacaagccatccctagtttacatctttaaaagaaaaatagggaacgaagaaaggacatttatgctgatttattaaacaataactttttttctttaaactgtttataatctgcctaaagaacaggtccaatacatacttttaaaaatcggcctggttctctggccccctgatcattctatgcgctgtaattcaaggagagcagaaggctgggaatgcgcagagtgaaaggaaagtgggtgcagatggcctcagaggggcaggtgacccctgaaaactgttagtcgacagcaaccgatcattctagacctccatggccttagtgtctcacgctaaactcgcaaaaaagtgccctttcagggctatcctctgggcgctcaagatttaggattttgaaggaagaaggtgaaagcgggggaagacgattttaaaagaagggctgggttattaaattgaaaagattaatcccggagccttcccctctgtcaaaaaaccctgaaagtgactaaattgacaccaactctggatgttccttaggaaaaaaacaaaacaaaacaaaacaaaacaagattaaaaagggcccaatttaagacccttattaatacatctgcaagagagcaaagaataacaacaacaacaaaagttatacagtcaattttcaatgatacatcgtcccactggtgccaccggggcgccaccacccagcacccgagacccgccgcgcccccggaaaaagtgggaagggacgtagggggatgctgaaggaagtaccttgttttgtctccaaagggcaacatagcaaacgtgggaagttcgttttcgaactccgccgatcctggactccaggaggctccgtaggggcaacaacgcgcgcaggtgaggtgaggtgaggtcggcgactcagaaccagctccctcacggccccggcctccgcgccgccgcccgtcgcctcccgctcgccccgcgctgcgccgccccctggcggggagcgaccggcagagccgcggccgcgcgccggcgagtgggacccgggcgtcgaacccgggcgggctcctcgaccatcactgccgggcgtgtgtcaccctcccggccaagacggccagcacccgctgcccgacggccgctgcccagagcaggcggcagcggggcacggactctttctgcaaaggggcgcgtcctggagtccacgcaccccgactatgcatcaattcctcaggcttcggggcacccgcccgccaagcactctctgctccactcttcttgtccctctgctcccagtctcaattcctccccaactctcccgcgagcgtttcccacgagcgccccgactgcccgctgcgcagccgcctccaaaaggacaggctccctcctccccgccctccgcaagggccgccccggcgcttggctctggaccagaaagagctggcctctggggtctgcgctgccccttggggtccgctccaggcggcgcctcccctgcgccctttgtgtgcacgccgcaaacccctctgcagagctctacttttggcggcacagccttcggcggaaaagcgagtgaaaggaggcgcgcgggacaagcaggagactggaaggggggaaaaggcaaccgcactcactttggcaaggttccgtcatgttgcctttgggctgtcccgtggactcgtccctcaccccagcttccccgcccagccagggccagggcgaggggggacgggggaggagcggagccatcaagaccgacttggaaatggtgcttccggagctgcagggaaggggctcagaaactgtttgggttttgctgattggattttggggaaccagagggctagagaggggctaggggaaggcccgtgagcacggatgtatgaaaataatcatgttcccggggaataccaagagggtcgggggtgagggtgggaggtcggcaagtacatttttgtatttgaactttgtgagcaagttgtatcaaatccgacacttgagtttttcgactgtgctcgcttagagttgaggtttctacctcgtaacaggaccgaggacctacttcaaaagcaaagggcctgggaacaggggtgaacgaagggcacaattcaacaggggagagaaatcagccccgggtcttccgtgggtcctcttcttacctggtggcttttctaacaaagtatgagaaggtaaagtcccagtgatcgtccagccatgcttcgaccgagtcctgatccctctgctgctgcttctgctgctggggctgctgctgctgtcgctgctgcccgaagctggggccggcccgctccatggttggcaccgcgcgcctcggaggctctctggtactgcttttccaccccagctggggtccgtccctcagaagaacaggactcggcctcgagaccctcccccttcgtcctgctccagtcgggccggctttcgacaaagcggccggagcgccaggccagcctcctgccccgccccgccccgcgcggttctacgggcgcccaggtgtggtgggcggggccaggcgcagctgctgcgccccccccacccggggtccggcagtgttccgctctcgcaggctcttcagtcccctggttcccaggaggcggcggcggcggcggcagcggcagcgcccggcgagctctccggaagccaagtggcggcggctggaaggaggccgcgcggccgctggggtgcgctgtgtgccaagccgacttctggggagcgcgctaggtgactgggtgtgttctcagagtgccccagggagggaaggtcgcgatgtgggaagttttgcccgaaagtaagagatgatgagaccctgggcccttttcctggggcctgggagtgcaatgaccttcccgcctagcttttccctagccctacgcttgggtctgggaggagcgggaccgacctccttcagag

SEQ ID NO: 317202 - DNA, 4001 bp, Homo sapiens
tatatatatcacagaaagtgttcagcctgttgccaacatcaactgtaatttaaaaactctaaccgaaaattttttaaaagtttttttagagcctcagatgatctaaattttacagtgagcatggtaaatttgagaaataggattttgatcctatgctgcttgggagaaaaagtaatgggaaaagaaatgtaactcagctctttccatttattttccattaaaatgttgctacactttcaaagtgttggtaggttctgaaaatgcagtgttcctatctatgactagtcaaaaacgaccaacaagccatccctagtttacatctttaaaagaaaaatagggaacgaagaaaggacatttatgctgatttattaaacaataactttttttctttaaactgtttataatctgcctaaagaacaggtccaatacatacttttaaaaatcggcctggttctctggccccctgatcattctatgcgctgtaattcaaggagagcagaaggctgggaatgcgcagagtgaaaggaaagtgggtgcagatggcctcagaggggcaggtgacccctgaaaactgttagtcgacagcaaccgatcattctagacctccatggccttagtgtctcacgctaaactcgcaaaaaagtgccctttcagggctatcctctgggcgctcaagatttaggattttgaaggaagaaggtgaaagcgggggaagacgattttaaaagaagggctgggttattaaattgaaaagattaatcccggagccttcccctctgtcaaaaaaccctgaaagtgactaaattgacaccaactctggatgttccttaggaaaaaaacaaaacaaaacaaaacaaaacaagattaaaaagggcccaatttaagacccttattaatacatctgcaagagagcaaagaataacaacaacaacaaaagttatacagtcaattttcaatgatacatcgtcccactggtgccaccggggcgccaccacccagcacccgagacccgccgcgcccccggaaaaagtgggaagggacgtagggggatgctgaaggaagtaccttgttttgtctccaaagggcaacatagcaaacgtgggaagttcgttttcgaactccgccgatcctggactccaggaggctccgtaggggcaacaacgcgcgcaggtgaggtgaggtgaggtcggcgactcagaaccagctccctcacggccccggcctccgcgccgccgcccgtcgcctcccgctcgccccgcgctgcgccgccccctggcggggagcgaccggcagagccgcggccgcgcgccggcgagtgggacccgggcgtcgaacccgggcgggctcctcgaccatcactgccgggcgtgtgtcaccctcccggccaagacggccagcacccgctgcccgacggccgctgcccagagcaggcggcagcggggcacggactctttctgcaaaggggcgcgtcctggagtccacgcaccccgactatgcatcaattcctcaggcttcggggcacccgcccgccaagcactctctgctccactcttcttgtccctctgctcccagtctcaattcctccccaactctcccgcgagcgtttcccacgagcgccccgactgcccgctgcgcagccgcctccaaaaggacaggctccctcctccccgccctccgcaagggccgccccggcgcttggctctggaccagaaagagctggcctctggggtctgcgctgccccttggggtccgctccaggcggcgcctcccctgcgccctttgtgtgcacgccgcaaacccctctgcagagctctacttttggcggcacagccttcggcggaaaagcgagtgaaaggaggcgcgcgggacaagcaggagactggaaggggggaaaaggcaaccgcactcactttggcaaggttccgtcatgttgcctttgggctgtcccgtggactcgtccctcaccccagcttccccgcccagccagggccagggcgaggggggacgggggaggagcggagccatcaagaccgacttggaaatggtgcttccggagctgcagggaaggggctcagaaactgtttgggttttgctgattggattttggggaaccagagggctagagaggggctaggggaaggcccgtgagcacggatgtatgaaaataatcatgttcccggggaataccaagagggtcgggggtgagggtgggaggtcggcaagtacatttttgtatttgaactttgtgagcaagttgtatcaaatccgacacttgagtttttcgactgtgctcgcttagagttgaggtttctacctcgtaacaggaccgaggacctacttcaaaagcaaagggcctgggaacaggggtgaacgaagggcacaattcaacaggggagagaaatcagccccgggtcttccgtgggtcctcttcttacctggtggcttttctaacaaagtatgagaaggtaaagtcccagtgatcgtccagccatgcttcgaccgagtcctgatccctctgctgctgcttctgctgctggggctgctgctgctgtcgctgctgcccgaagctggggccggcccgctccatggttggcaccgcgcgcctcggaggctctctggtactgcttttccaccccagctggggtccgtccctcagaagaacaggactcggcctcgagaccctcccccttcgtcctgctccagtcgggccggctttcgacaaagcggccggagcgccaggccagcctcctgccccgccccgccccgcgcggttctacgggcgcccaggtgtggtgggcggggccaggcgcagctgctgcgccccccccacccggggtccggcagtgttccgctctcgcaggctcttcagtcccctggttcccaggaggcggcggcggcggcggcagcggcagcgcccggcgagctctccggaagccaagtggcggcggctggaaggaggccgcgcggccgctggggtgcgctgtgtgccaagccgacttctggggagcgcgctaggtgactgggtgtgttctcagagtgccccagggagggaaggtcgcgatgtgggaagttttgcccgaaagtaagagatgatgagaccctgggcccttttcctggggcctgggagtgcaatgaccttcccgcctagcttttccctagccctacgcttgggtctgggaggagcgggaccgacctccttcagagcccagcccgctcagtgacttaaagcggtccagccacggaccactgcgggtggagagagctggggcgtgtgctagcaagagagatttgcaggtgtaggtgggtaacttgcaacaaagccatacccgtgcttaatgttaatgataacagcaataattataacttaagtgcctttaaccattgcctcaaacttcccttatgcataactggaaaaagatttacttggaaaagaaaaagcaaacaaataatttccaatgctttgtgcatgaagttagaaaacaagggcacctctgtacaattaggttaatccgagagcactggcgcaacccaggtgcagtcgagggcaaccagttatcccaattttaaattaatgcatcattttaattaaattggaattaacactccctcaaaagtatccattaaaaatggctcagcctttttgtccaatccctatcttgcttctttaaaaaaggaattggtgtcatcctttgctttgtctgcatccccatcttcctgtcatgcattggcagttttaatatggcattttgcaatgacctatattttttggtagaattaaatctggaattatgggttgcacaatgtgtgaatgacaccattagcagtgatataaaaaaaaatgagttagctgatatacttctgacaacttccttctaaatactcttggcaagaatttaaggcattattcactacatagaaacacatcattaaattgataatctgagaacttttaaaagtatcttctagtcccccaatgcaatggtttatctttccttcattga

SEQ ID NO: 317203 - DNA, 4001 bp, Homo sapiens
acgattgatttgtgggtgccccacttcttaggagggaggtggagatgaaggtaacccggggattactgaatctaggtcactgccttgctgcttgcttactgccattgggataagaggattgccacttccggcctggtgcggtggctcacgcctgttatcccagcactttggaaatctgaggcaggttgatcacctgaggtcaggagttcgagaacagcctgaccaacatgacgaaactctgtctctattaaaaatacaaaaattagccgggtgtggtggcgggcacctctagtcctagctactcaggaggccaaggcaggagaatcgcttgaacgtgggagacggaggttgcagtgagctgacatcatgccactgtactccagcctggtgacagagcaagactctgtctcaaaaaaaaaaaaaacccacaaacgaaaacaaaccaggattgccactccccagctgcctgggaaggagggaccacacctgcccctgggctggcagcctggtgggtaattcccaaggctcatccagcaagagcggaggctgcctgggcctcttgcagcctccttagctgtggggacagaaaaggggagaggaagctgggacgggtgcaggacagggagaaggggcttcccccctccccttcttcctcagagcccccttgccgggcagctcctcagggcctttccaggtctctgctggccgctgccctcacccagtctggcaggcacctcacacccctcttgttctccagtcccgccaggaccgcctctgtcctcgggaagcgtctgccctagcccaggctttgcatgaacaggccctgcccttccctccttcagtgactccagtgagcctgtctcgattctgtctcttgtccctccccagtcccaccctggacccctgtgctcagtggctaccaggtttgttctcccctggcggctggcgtgggctcccatgggataaagctgcttctgccacagtggaagtttggggttcccctggctctccctccctgtgggcgtctgcaccaccttcgactgtgacctcttcttcccaaatcccaaggcagggcctccctcccagcccagagagccctgaagcccccatctggtcagtcttcctggaagccaggggtcctcacagggactacatggtccccaccatgggatgtggatgcagaatcaggggcaccccggtttgagcctgagtctgcttcagccgaggctcctagactcaggtctaaccaactcagtggccatgcgatgtcagcttgagccagaagccgagtcggagaggcaggcggccagggcacagtgccgggagggggctctaggtacttgctcctcagcacagaactagcctgtgccctgacaagaggcctccctggaggcctgaggatccgagctgacccttagacacctgggacaggtgcaagagatgcacacagccgcctccctgaggctccgcacagacccacctcggccacgtcctcgacgttcaccatctttttggtctgagccacgtggcccacgaccccgatgtccagtgggaagacgatctcggagtcggggggcaccaggcagtcctccaggacgctgtccggctgcacgctgaaaagcctggtggccagctcggccacgccgttgcgctggcggtacatgaagaggctgcagcggtcggcctgcaggagggtgcagaggcgccgcaggaccttgaagaccacgcgctccatgttgatgctctcctgcatatcctgcaccagctccagcagcgccgtgctctcctccacctggcagaggtcccggaggctgtcgcagtccggcgggcacccgtcctcgcaggccgcggccacattctcagggctcagtttcttcccaaagtactggcgggcaaaatcggggttctggtccagaaagctccgggcctgctcctcactgaggctcatggtggctgcctgtccctggagacgctgctgctccaggcacgcatggactcccaggaaaccctgtcatcagcaaagtctttcttagtgagattaggaaccccgggggcgggtcagctgactcactcctacaaatgggggcctgcgctccctctcctcagaccctgggacttcccaccttccaggaaaaccagaccctgtggaatgaaggctgggagtaactgttgggggatctcctgcctgttgcaggcgtcacgggtggctgggcacaggcatttggcttctagcggaccaggccctgagaactaatcccctgaggaggttatcccacacacagcatgacgctttctgctggtggagctgcctgagggtttgggttggtcccacaggtggccccaggccctcctgggagcccagacctgggctcgggtgtgctggggaggtggtggggcactggccctgcctccaggagatgcagttcacccctgtgcagggagagggggctgggtaatcacaccaggacccaaatgcccagaggccagcaaggggaccctggatgtggaggtgggaccacatccaccttcccccacactctgagggatgcagagttgctagtcagcctttacctgctgtcaggccccggctgggacaagcttcggggtgacgccgctctgaggccacatggctttcagtggaaaaaggacctgaatgttggggggctgcctggcaacaaagcccgacctctcctctccgctgtcacctcagcaagccttgcctgctcccataggcctctcggctcctgggccagctccctgcaggccagcaggggtgatgtggccagaagcaccttggctgggtctggcatgggcgccggcctggcgggcgggtggcagtgttcctgatttccctgaatataaaaacgctgattgtcgctttccaggcacctttgtgctgccagatcctgggcttaaggtttcttcccatcttttccagtttatctgtccatgttgtcaccatacttttaaccaggatgcaaggttttcatgtggttcttttactgcactcagctggtagacgtgtgtgcacgcgtgcatgagtgtgcacatacgtgtgtgcacggagtgtgagtgtgcgcacgtgtaggtgtgtgtgttcgtgtgagcacgtgtgcatgacagccaggtgccctcaggagcgcagagttctctcagcacgaggccaggccccggggaagcttctgcgagggccctgggctgcaccgctgcagctgcctgtctcggaggctgctctgaggcagcatctgcgccgtccacagtgggcccagctgggtgtgcgacgtgtgcccttgtgccatgatgttcctgcctccacttagtcacaaagtcacttcctttcaaggatctgctgagaggcttcccctttttcctaaaaatagtgaattctcactggggacgggggagtggggatgtgggtggggggaggggttgtggggccgctgcagtgcttgggtttggggccggggggagggtcgcctgctttgcattcagtcccagaacagcctccagagcctgccggttgcatttcccaactcccagggatgagctcacattgcgcctggatgtgaggatggcggccggaaaccagccttcaggtcctcggttgccccaccctgaggtctatgcacacgcagcccctccccacctcctttttcctctccgggctctttcccgtcccccagttcctcacaacccccttctggacacccccactttgccccttgctcccctccgtcagcgaggggcctgccaacctccctcccacaggggcctccgtgcccgcagaactgagacactcacctgcgtgtgaaatgagctaagcgcatcttgagtgggaccgcagagctggagaggccttgctgggggcatgagggccctggggtggggctgggggtggcagctgacctcaggctctgccttgccacctgcccaagggagcgtggagtggctgggctcagtgtggagagcaggtgggacagggaaggggtgctgggctgagg

SEQ ID NO: 317204 - DNA, 4001 bp, Homo sapiens
ggacagcttgcctggtcccctgtatgtccactctggatgtccacagtgactcgggctcctcagcagcccacgtcctcctcaccatctcccagaacagtgagtcggcttctgtctcacccccaactccactatgccccacggcacacagagcaccacaggtggggccaggccaggccggtgctgctgactgcaccgtgggaagccctgggaggacggccctgggggctgagccggggtctgaggggcggtccctcccccggggacgcttctggtaaaatcctgcacttacggaatgaccttgatctcctccttgccgtggaggacgtagtcgatcactttgtagaagacaatttcctgagaagcagaagacactggtcggggggctgcctggccaagctctgaggggctcacacacacacacacagctacatgcagctacacacagccacacgcatgcacacccccacacacgtaaccgtgcatgtgtacacacgtgaacagatgtctccgccgtgcgcaggtattctacgaatgcgggtgcactcacacccatgtccacacatgcacaggctcagggtgcacacacatgcagaccgtccccaatactcacgggacacgcatcacacgccgcggtttacatctgtcttcccagtctgtgttccgcacaatcccacacacaagctgggcccgtactctcacacacacacacacacacgcatcctacacgtgcacaggaggtcccacgtggggagatggggcagcaggagcccccacaatcagagccgacgtgggtcttcacgaccagcctggcggccctcattcagggaccagccctggacaccccatccctggagtgcagcagcaggggagcctggtggagaccacagacaggcacccggggtcccaccggccagttcccacctccctaaaccccacccctatccctccctctcctgccctggagttggagtcagggaaacagaggcgtgtggacaggccctgggcccctcccctaagactcacccggccatcaggcgtgcgtgggcccgagtacggctgggactctcccatcagcacagaccacacgtcaaaaaattcctgggcagagaagaggtgagggtggggcggtcactgcgggacctgggtcgggccaggcagggggtccctgagccacggaagcctcaccttctccttggtcatgtccaggaggcccacggagtaccgctcgcagttgaggtaggcccgcaccgtgtagaaggccttgtggaactgcctctcgatgtccgtcagctcctcaaacaccttgttggccgaccacagcagcacctggagggaggggcacacctgtgggcctgtggccactcccaccctcacgccggtctgaccacagcagcaggggtttaactcaagcctgacacaggtgcgctccctgatctgaccacctgcccagccgtggagcctggcacagaccctgattggtggctccgtggccaggtttcatctgagcttgtggggcccgggagctggctggcggtgaggcctcgaggctgcggtcgtgtccctgatcactcaggagtggacgagtggaaagtggaatctgtcgctttgagcttgacaggcaaacatccgaccagcccttcctccgcccggctgctccagaaccacctgcggcgagcagggctttgagaacatcgggccgtggtttccgcacgtcaggccgcctgtggcctccgccaagcgtctgagagtgaagcattgctgacgcactccacgaggtcctggccagaccccactcaggacatcccgctgcacaggcccctggttgctgggtcagcgctgccaccaggctcagactcaccccagggccctccttgggccacctttctctgcctccttggtcaaggcccagacccaggccccaccaggccctgcctcctcacactcgcggcggccgctgggtcttctaccgcatggtgccagctccctctcctccgctgcggtgtcctagcccagctctctccctgccaggccctctgaagttccaccccctggcactcagctcatggtgggaacaggaccaggctctcctgttgccaagggcagtgagatgttcgtagctttatttcccagtacattgattttactgattttagtttatcttcagttgaataattgtgtgtattgatggggtttatgttttatggggtttggcgtgatgttctgatgtaagtatttgttgcagaaagattcaattaagctaatcaacatatccatcacctcaccaacttgttttttttgtggtgagaacattacaagtctattttctagcaatttggtatacaatacagtcatccctcggcatcctcagggaaattggttccaggacgccgctctgataacaaaatccgaggatgttcaagtcccggatgtgaaatggcctagagtttgtacagaggttgcacacgcacccccaggacttcaaatcatctccgatgacttagcacccagtgcaaggcaaggccatgaaaacggctgttctactgtattgttttacattcttattcttatttttaatttaaaacttttcccacatcataaatcctcggaagcagaactgcacttaccgagcaccctgtgtactgtggttaacggcagtggtggccgccacacagcgcggctgaccttgaagcccacagctccagctaacgaacgctttgcaccctttcaccaacgtctctgctttctctatctctcttcctgccccggcctcctgcaaccccctttccactctctgtttccatgaattcagggttttcggatcccacatgtgagtgagatcctagcttttggccagtggcatcctccaggtccatgcacgtcagtgcccttccctggcagcatcctcagtgccggctctgctgttcccagagtccctccctccctccctgctgaggcccggcccccctgcagcccctgagcaccagcctctctcgtccaacacctttttctccctgaagcctttcctgagccatgtttctccagtgaccctgacccctgcctcgcaatctccgcccgggtctgcagcctaccctgactcctgcctcaccgatgggtgtggaccctcctcactggcctccacactctcctgccctgaccccagtcaccgtcgtggagccgccctggccgcagtcacagtcatggagctgctgctggtgccaccctcagcagaagctcccagccttcccagcccctatctgagtatgtcccaccccccgtgtccctgcactggtcaggagctttggccccatgcccgtgtgaagaagtcagctcagtcactggagttagtgggtccagaacaggacttgggaaaacagcaggtgcagatggcgaccgccctagcactctccacagccccggcacctgctgaatggagacggctccccatagccccggcgcctgctgaatggagacggctcttcatagctccagagcctgctgaatggagacggctccccatagccctggcgcctgctgaatggagacggctctccacagccccggcgcctgcggctcaggagactcgctgtagatgtgtggaatcgccaggtgcattctcctcgcgtgactggttcacccagagccgcaggtggaggcccggccccaccctctgcgccctctgcgtccctcccacactcagtctgtctcctgccgaactcagcgccttcgcacgggctctggcctctgcctccaggccctcatcccaggccctcctcctcccaaggcctggcctcaagtcctttccaggaggccccccctgaggacccaccaacccctggggcccccactccccattcagtctgaccccacgggtcagcccctgccccgcctgtgacggccccactgctgttgacatcgccgcctcagcccctgccccgcctgtgacggccccactgccgttgacatcgccgcctcagcccctgccccgcctgtgacggccccac

SEQ ID NO: 317205 - DNA, 4001 bp, Homo sapiens
atgtggcatcacattagcaagttgtaagaagcaccacactaatattagctgataaatgtgatactatgtcttgctgcgcaacagcaaatacaaataacgtttgcaaaagtcggcagaatccttattttatctacttttataccctaaaactttctgtgctttcttaaacatgaacacttcatagagtttaaattcaaagttgaagtcttgaaacaccccaatatgaaaaggaaaaaaaatcactctgacttaaaactatagcacatcctatcttaattttgtaggtatgccacttgtgttcattttgcatggttaatcaagtgacagaatccttgcattctgaatagatgatatacaaagcagtaaaaacatgtatattccttttcaaattacagtaagagccaccatttgtaaacagggcgttaaatattccaattttagacagcctaacatgaacattgtggtttcatgtgcagtataaaatttctatttacaaagtattctcaaaaatgacttcataatggtagatgaagagaaaaagagtttagaaattgaatgatgtaaatcatatgggttcagaggctaagcaaattacacaccctgaagctgccctggctttatgaaaggagcctttctccagctctgtgcaatcccagcccaagggaacttgcatctgagagttttctaaacatttcaggtacacttgaaagctgaaagtaattctcatttcctatgcaggattaagtcgtttccagcacacacaaaatagcagtcattcaccaacacatacaaaaacacaccaccagaaaggtaaggacttcagagtacaaaggcaagtttaaaaaacaaaaactagggagcaagagaaatacactttttaattcctctaaaaacgaccacacagcctcttgacctctatatttcctatctactcattgattaattgatgacttcgacctagagtgcttcaattaatgcggctgatatatttcctgaccgacccccctcgccctccccaaatctgagtaaagtcaaacatgccaaggctcattcattttggattcgtttttagaggcagttcttgaacttctaactttagcaatgagcgaacctgcaatgtgcatttgaaatgacgttcacaatcgctcccagaatgtcctcactcagcagtggcactcacgttgccctcttggagctttgtggcagctcccgaagttgcaaactacacttaacctttaacagtccatgccaatgaacgcagcgcacatttgcatgtaatgagagaccaaagataccttcacagtctggtatatatcacataccaacgcacaatgccaacgttaacacacacagcgagaaacaagcagggggagaatgggggaaagactcaccgttctgttccttgttgctggaaaactggaatttactactcaggttggattccgcctgagtcccctgtctctggccggccagggcagatgtcagcaggagaagcccgaagaggctcatttggctgactggggtgagagctcactcacggcgggcactttggaagcagcgactcccgagtctctttcaccaccgccaggggaaggctgcactggggtggaagcgccgagcctgctctggcagcagagaatcgcagggtagtttccacataatcccatccaaaactttttcctagagccctcttctgtgtctccagtttttgaaaaggatcaaagcaaaacctggacctgaaccagtttcccaaggtttaaacaaatcctgagctgtggcgaagtggtgggggtgggggtgaaggcgagggaggaatgagggggtggggacgcgggggagcggcgagaagtccccagcaagttgctgggagcacctgtcagttcgggggacaggacagaggcgaaaactcaagggttgcccgcagccagactggaagccaagtcggcggcgagcagtttctgatcaataacaaagctgccaatagatgcggctctccgggcgcccctctcccccgccccaccccccacccccgaagggggagggggaagaaacaaggcgagggcgccgcggcgggtcccacgggccggggcgccggagcggggccggggggctccgggccgacggcggcccgggcgcaggcggagagaggccgcggggctcccgctcctcagcccggagcgcagttggccccgggttcggagcgccgcagcacggattccggcacctggcttgagttttccgcgaccaaagttcaccttgttcgggctcgtcccccgctcctcaaagcctggggcaattcggccgctcggggtcaccgcggggctccggttgttccccgtcccctccccccacgcctcgggctccgcgctaacctcggggctacgcgcggcgtctccgcacggggtgaagagggaaggccggggcggccgggaggatccggcttgtcccctccccttctctaccttccccccgccgggcggcagacaggaggtgggggccgtgggccgagcccgggcggagcgcgcgcctggcgagcgggggcggctcagcggctctcccgcaggcggccgatggggcgggcgggggtcagcgcctctgggaggggcagccctgggacgcgtccgcgcgagcgggcttggccgcccactggctgtcaacaggtgctgcgcagacagggggtgctgcgggactcgctgtgggcaagaccccggtggcccaggagaggaacgcggccaaggcggcccctgctttcccttccacggaacacctctaaccccaaatacagagcacgatgggtggtgaagggtgctgcagaagtaagtgggaaagaacttcctgcagctctccttctcccgccccctgtcgcctgacttgtcattagtttccaggagggctccccactccctaaggtctttgctaggacccttggccagagtttcagaacagaaggaagaagggaaatgaattcaaaggctttcctccaatttccagctccgtaaagcaggacaaataaagcaaaagtaaaggcagccaaaataacatccatttaacaagtactatatttactgaatgcctactatgtcgggcactgtttagaggttggagccgtagcagtgaaaacagacaaaagtccctgccctcgtgaagcatacgtagtagttgggcagcattaagctaatagcaagctcttctgagaatggtgtctaagggactcagaatgatcctgcaaccttggactttcctacaatacagcctctaacaaaactaggctgccctgaacccctggtgatagaattgtttacatttacaccaaaaaggtcgagaaagaactgaaatctcttgtggcttgtgttcaggctgacttggagagagaggccgatgctttaagacctaaagttctcatgaggtagtctgaaatgaaacacacatgccaagcagggcttatggtggttccatgtctgctaaatatgtctgtgacaggatccaacgtgctttctttgtggagaagcagaaaatcattgtcaatgtgttaaaggcacaagcagagagtcagaaaagttgaattttaaaatgaagctatttttgagtaataatcaaaatgaaaacaaggaagtgccatggcaggcaaatcagcaatatcacccaacttcttgtggaaaaaaagtcaatgcaaacaattcgaccatcaagaacacttgggctggaacagaaaaccaaaatagcaatgtccctgaaactaaggagtggcatttgggcaagaacatattcttactggaccaaaccaggggctgatccttcttcagtggtgaggaaaatgccaagccctcttcttatatgcgaacaccaactggggccaaccaaccagacctttctgcttggaatatcctagtcttcttgtttttcccttttagaaacctttgaaaacttcacccatctgtctcattcttgaaaatttcacccgcctgtctcattcattcattcttatccctttaccacttcta

SEQ ID NO: 317206 - DNA, 4001 bp, Homo sapiens
tgcacaacgcacagcctgccaggccagcaagtccttcccgaccaagacgcgaggccaggccatcggcagctctcgcacacctggcccggcccaggctcctggctccctctggcaacgtactcgggttgggccacactcgtcgctccgacctggccgacaccctcccggaatagaacagctgatcccacatattcaatgccaaatggacgccgcccgctccctgggcgcagccgggcggagttaatttcgtgtgtaaatctggtttccatgggggtagacagcagaggaaggagaagtacgcacagacggctctgaagccggcagggagaggaatggaaaaaaggccaactagagaggaccgagcagcgctgggcgagctcagacggcaagtgccacgcacccccgcgcggagaagggtgccgggtagggggtgtccagggctcgggtgcccggagggagaatatggtttacctcccacctttctgtcttacctgcaaacaagtttccccagttccaagtcgtccctaacttcctcacaagaagttcggcaccttcctggagacctttcctctcttcctgcctgcggccagaactgagcgaaagcagagcccccgggcaatgcagaaatgattccaccgaggagggggcgcgggaagacaggcgggggcgggggccacggagcacaatgagggccccttggtgtgcggttcgaaattcctcaaatcccagttgctggaatgcgaggcgacgacgacttcttcactcagggccaaatgtgtttgtcattattccagaccgcccgcccgcgccgccgctgtcgcccccgcgctagggcgtgcaacccgagcacactgcccggcaggcacccgctctccctggcacctcactgacccaacaaaccgctccagagcgccccaaacccttgcccacgcccgcgcgcctctgcttgtcccgcagccgcctcaccgccgcgccaaatctggccccgactctctcccagagcagcgccgtccagtaatcacgcgcattcggccggctccctgtgctgtaggccaacaccgaggtccggtctccagccgagcccagcccgcctcctgcgccccgcaaccccttcgcgcgcccccctccacgctcccctccacgctcccctctccccacctccccctggtcccccagccgcgctccacaccatgggctgcagcgctgtcccgccaaaccgcaggcgaggaatgaaaacactcatttaaaacctgtcgccttccaggacccactgccaagaagagggcaaacacctctgcctccacccccagttccttggtgttcggcccagtattcacgaacaccacccccactcccaaaagaaacctcaaaaatgtaagcctaaacaatttctttgggaggccatagggttgttagaaaaacattgtttttaaaaataggtctggaaaatgtgtgtttaaaaaaaatacctagactttctaactctatggttatctcccacccgtccccaagtgaagtttattccgaaaaaaaaaaattactctctggacacacaactggaatccagctcctttttttttttcttgtcgcccaaagtttgaagttacttcgctttctccagtcccagagtctgatcagggacttcccttataaacaaaaaatcattttttcttttcccttaccttctcctccgatgttattccgcaatgaatgtcccacacatggagtaaagagcgtgcccacggcctccaatgatctcttgcagtctcctcctctgtttctctccctgtagctccaacagtaatgggctcaaaaaccgcgttttgtaattgattcaatgttatagtccatccttctaaaactaatcatttgctctaagtaaatagctgtcaggaaataagccccccctcaaccttggtctcttcaaaataaaagtttctctcaaactccctgcgctccgaatctcccagtgtccagattgcgccttcgctttttgctcttacgcaatcagggggtccagtcccaacccccagacttcgacaacaactggggggcggggagaagcagaccagatgggatggggggtggtggaagggggaggtgttggtgctctgccgggaaagaggttttgtgaaactacaaacagcccatcatttccagaatgagtttgcctccccattttggggttattttcttagactgctatagttttgtattctctttgaaaagaagaaaaggaacatacaaaattgcatttaatacccagagagaatataaatctagaatcaagaaatgtcccttctacaaactcggcccaacgagaaatagggccctcgggagaaatctccaagcggttgcgccgttttgaactaggggtcttttaggggaagggctatatagttgctagttatttaataggattgggcaaactgttgagtccaatatgacaatgatgggtttttgttttgtgtggtgtgtgtgtgtgtacaagactgggtggtctgaaatacggtacaaagaaaagagggtctgtgtaggtttggaacgttctccgatagaacgacctttactcccttgaagtcacttatctggtcgtgcctttgttttcggggttatctgggcgaggttgccctggcttctatctcgcatacaaaaaaagctcaagcttgggcgtttgaggaatcgtaccaccgcctccgcgtcgtgggggaggatgccttttgattctccctccgttccctcccgccgcgtgggtcgaaccctacgaattccttggaattgacagctgagccccaaaccctgcgcccaaggcgagaggccagtgtcgggaggaaacgatcctgccggcgagggaaagggggcgctgatgctccaggaaccagacctgggcagagtggggcttcccagcgacagcgggggaggggagcgcgttcaccttcatcgctctctgatttttgaattctcctgttggggttgggggtcatccttcatccttctccctcaaccccaccccaacacacgcactctgaaaatggccaaagtggccaggttgggactggcatgtccaacagccgtctcctccttcaccaggagggtggacacagtgcagtggacaggggagagtcacagagaagtactccaacgggcgcggtgctgtgcctaaccaggacaggatcttgggatgtcagcctcgaaaacagggcgcctggggctgcgctgggggtcccattgccgcagttcttctacgcgacccgctctcgtgcatcttcagcttgggtgactgcaccgctcgctattacttccacatgtcccttcaggaaatcattgaaggcaaatatatgaacagccccttgttcggaatgctaacaggataccgtaatgtttgtagaaaatgagcgggaacaaacgatccccccaaaaatcagagtgcggaataaaaggcaaaagcgggtgctgggccacatgctgttaagttgagaaccgggtttttaggctagttgccccagagggtaggaggcgagacagacagcctacccagaggggctgctttgcttcggcgacactgttagtccggtcaagccagggtcttccgtccgcagggccccagcgctctccgcccacaaatggtaacttcacagttcatttcagagccgtttaatggggcccgagaagcagtccgggcgggagtgtctccaggcagcgactcctcgggagtttaaagcagaaagcaatggatgagcaagcgagcacccagttgtccttctggtagtaattacctgcctaatttgaatgatgcctttgttatgatcattaacaaacatttgctaaaggtttccatgtgtgacattctggaaggtttaaaggcctgaggagctgactccagggatagtgccccggtggggggtggcgcaagaaagcaaatggttgggggaaaattttgcggagagactgtgcaaagaagagaggtcaacatctgcctcctctgcaaaagcaaaataaac

SEQ ID NO: 317207 - DNA, 4001 bp, Homo sapiens
gcaaaataagagtagctttaacttaaagattaaagcggaatgcagtttttcccctagattttaatttttgctatatttttccttaagggttaaaagactaaaaatattgtaacaagatacaataatatgaaaaaaaaaaatccttgttcttcctcccctgccctgttaaatatcatatattattggaaaaacggtcagtgttaacaaacttcagcaccacgtgtgtgggtgtgcgcatgcgcacactgttacactaaactgtattcgttattaggtaattcaagtaaatggttacatatccataggtgtcctgagtagcttgaaataatctccttacctcaggatggtgattctacatagaaacccatggcaggggaagcaggaaacaactttcttttaaagaagagaatgcattaaaatagtataaagctaaatcaaatggaactgttatgacaaacagtttgggaagttaaataatctccttttcctattttagacttgtataagttcaaaataatctttaagatattcacactaaattgttacctatatagtatcttttaatgcaaaaatatacagtataattgaatataatatcacttttattgaatgcatgtctttcaatctcttttaataatctcttttaataaatgcttacaaggcttttgttttatgagttttattcctccttgagttgagaacacagtttcttaaatttgaccatgaacattccattgagagactgatgataaattcacacgtagcctccctttaactgacggacttaaacttgatccatggatttgcaccacgaacttcaaaagatgaatcactgctgtagatgtgatggcctaattcttccaaatgtggctcaggatcagtggtagcaaactgggcagcatcatcaatttctttcctcacctcagccccaatttcctttaattcttccacagtggcgagcttgctgtttaccattctatcttggagaattattataggatccctcttacttcttacttcctgaatttcttctcgtgtacgataactgactccaggatcactcatactgtgtccatgataacggtaggtttgcagctccatcagtatgggcccctttccagatctacagtagttagctgcaaattttgttgcctcacgaacacacagaacatccattccatcgacctttagcccagggataaaattgcccctcttgtagtaatcagggctggctgctgctctctcagtagatgttcccattccatataggttattctcacagatgaaaacacaaggtaatttccataaagctgccatattgaaagcttcggctatctgcccctgattcgcagcgccatccccatataaagtcaaacagatctcatcgtttcctttatatttacaggccagagcaatgccagcgcccagggggccctgtgcaccgacgatgccattgcccccatagaagttcttggtatacatatgcatcgatcctccttttcctttagcacaacctcctcttcttcccgtcagctctgcgagaatggatcggacagaaagtccccgagtatagcacacaccatgagccctataggatgtaatgacgtgatccgaggggtttatgccggcctcaaggcccacgcaacaagcttcctgaccatcgcacaggtgacagaaaccgcgaatgaatttctgtttgtacagctgatctgccttcaattccatgcggcgaacagtcagcatcatcctgtagtatttaagcccctccgccctagtgagcactgtagtgacagggggaccctcttccaacagataaagatcacatttcttaatttcaaatgtagcgtcatttgaggagttacgggatgccaccagcactctgcgagctgatttctgggcaactcgcctcaacacgcgggagatgaaggcggccagcatattcttcacggagtgctgtagatggcagcggcgtcccgtaacgaccgccggaaggcctggcctcggctccgcgtctccttccggtgctccaatgcgcttggcaccatccgggcagtgcacacgggtgatagaggcaggtcctgcacagcactgggacatgggccacgcagcctgagctgactgatttgtacagtgcctgccagctgtaaaatgaagactaaaagtgatttccttttctggaggacttgggcaaactacagggcatcctaatcgccgtcattgctgaacctcaataatctgagtcccttttccctgttaaaccctggagcactgtatctcaagctttcccgacaagcgtatcaaatagaagaaaggaacaaactcagtccctaaggcacatgagagttctgagagttagtccaaaggtatttcttcctaccaatatttctttaatgtcttgtttttgatctttaaaataggtatgaatatttatcctgctccataatgtgccatatgtattttaaggtaacaacaaagctgtaaattatttgtagcttaattaactttaaaaacaaaacaagcacacgcacgttaacaaaaaccccttttaaagaaaagtcagtactctcaaataatatgccacatttatcctgatggcgtctagcacctgtgacacttgaagtggggagggaaaatgtatacaaacctcggcctgaggataacactttaaacccagtaataaactttgcttggtgtgggaaaattggaagcagggagagagggttgaggtgcagattgtggtaaaaagtttgtagtttgtgacattccacttttccttactctgtttaataattctgaatctctgtttttacctagttttatccctattttctgactacttcacttttgctcttccttttgtttatttcctcttttttttctttttggttttctataaaaatgtcttcagcaggtttccatagactttcaggtggtatttatttatttatttatttattttgctttcatatcaatcaaactggaccagccttagtccaggaaatctagaaacatgttcttatagtgcctttttatgtagtaaccattagaaagtgttacttcttataaagtgacccaccaaacaatacacagtttggactacaagagagcaacagagtttgcttatgccactggaaaccgttcaatcacaagagaagagaagccttagaccaagggatacaaagatcacatatcatttctctctttttgtgcttttaccaggaaggcgattttgtgccccaataagccaaccctaactagggatcctgttttatttagaatattaagccattcaccttaatgcatgctctgttttatatccattgcctatttgcaaatgataaattcttacccaaatgtccctattacatgttcaaagcagctgccttctctatatctagttgcaggtgttattttgggcacttcttttaatattcaggaagaaaagagaaaatagcttgttaaaaagttaagatacctcttaaaacttgatcgtctccccaccttctgaacccagccatcataataggcctcatcttttcactcaattgaaaattcaactgttggaattcatggtcttgctgtgttgtttgctccctctttgatagttagcctgtctctgctgttctctttcattcctccaggtattggagatctccagggagcattatctccataagaatgagaaaaatgacactgcaggatagaacagtagtgttaatgggtcagtgagtgacagctgagccttctctcagaggtatcagccaggccagtgctgccaggaacacaagagctgtacagtaaagtgtgccaatttaatcttgtcacacgtagcctggactgcaaagatagagctccccttaaaagcccagtgtgtcaagcctaaacccgactcatgccagaagagaacatacaaagatgctaattggaaaatatctgtactacgggttcccacagaagatgtcctttaaaaaaaaaaatttctcaacaggatctagttaaga

SEQ ID NO: 317208 - DNA, 4001 bp, Homo sapiens
catatttggtcataaactgttattgaaccaaatgtcaaaaatgagtgatacaaattagttatgagttaggaattccagatagaattggtttccctaataataactgccattatatcaaatatatttaccaatagctattgtagtccaactctggaatgtaagtactgctttaaaataaacatttataatgtcaacaactcaaaatttcaagcatatgattaattatattgacatacgattatactataatagcaaaatatttcttttataaacaccttaaaagttttcgtgacaaaattattttggttagaatttaatataaatatgatttattctgtgttaggattcaaaagcttattcaatttaaataaaaaccatactccagaaactaaaacatttcttagtagatataacggaaactgtttttgttggtaaatctataataggaattgcttggcccaggtcactgaagcattttctgcttactttacttaggaacgtttttgggggtatgttgaacagttttcatgtttcatataaaaacacgtcagatgtgtttatatgtttttgaaaaatgtaaaacaaggcttgaaacgttccattgtatgcgtctgtaggatacacattttgacatatttttaaaaggatgttggttcccaaatctcataggcatatataaataaaacagaatttaaaaggtattaccttgttcaaaatctgtatgagcagatcaatcagattataacacatacaattataaaatatggcatgagaagaatacaagaaaataaagtataatactctgcaactaaaagtataatattctggaagtttacgcctttaggtattaaatgttttatatgtgataactgaaataatacattaattttctatgaagaaaaacattgtgttagaaaaaaaccagctagaccaaataatgctttagaattaattctacaaatttactgacaggagagaaaccctgaggttttatttttaccttgttttctcattagacagtagagaacaccaagtaaagcttgactttgacattaaagcattattttccgttttaggctgagtggtttactttgcatcaggtaaactaaactgtctgccacgttttctttgtagctagagttagaagttggtaattcctaagccaagttctcagctttggaaaacgtgctcaaaatgcctggaaactgaggagtgagcattaggaagacttcccctgtctgggctgataggagcggctccagtttggccaacgcaggtcgtgccccgcgaacagcgcgctgctgaacttttcatccggacgagaaaaacgctcagatgcgcgccagctccagggaatgccggggggtgccagtccctcgcctctcccacccgggacccatcatttgttacggaagggcgatggggtgtgttttatttctgttatcacatataaaacatttaaaacctaaaggggaggaggcactcgagcctggcagcctcgccttccctgagcccagtggctctcctcggaaagtcgctgcggacccagaggatgggacacctttagagcggactttgtcaaatctctgagccgctccgcagccacttgacggagttgccgccgcccccggagctgggcgccgaagcccgggagccagcagcgccccgtccgcccgccctcgcgcgctttctggccgccctcggccccggggcatccactgcgtccccccggacgccgccggagtccccacctcgcagcaaaagcaagaatgccgacacctaccctggtgatgaccaaaggctggttgaagtctatgccccctgagagcctgaagccccagggcgcagggcccgggaggatcaccgtctggggcatgccgccttcctcccgcccaccgggctctaagtgtccccgcgcagggcagccactccgcgccgggcggcgtcctggccccgacccgggcgggggcgctttatccccgctgggggtgacgtcaccgccccgccgtcctccccgccccctcccaccccggagagctccaactttggaagcgagagccgcgccagccccgcgggagtgcgcagcccggccggctggggcagcctcccgggccgcggcgggcgcgggggcttcgggttacagcgtccgtcgctctcttgaagtcacacctgtctccctgtttatcttctgcttggagcgcagcagtgcactttgttggaagcgaaagcagccagaccacagcctccatgctttcaattaaaacgagcatcatcgatacaataagttatttagcagtttcgagtgcgttaatatttacttacgacctctgcggctttggccaaattacttaatgtccttttaaatttttattttatttatttatttttcttagagaccgggtctccactttgttgcccaggctagtcttgaactcctgggctcaaacaatcttcccacctcagcctcccaaagtgcaggagagtctggccggggtcctgtggtagtctcagtgtggactcaagtatttctggtgttacgcgttgggatgttgtgattcccaaagggagaggggagaatgagggaagagaaataagaaatgctttaaacactcaagaataagggtcttggacttaatgccccatatgatagggtcgtattggtccaggaggacagagctgcagcagacttttaagagggcagtctgtttggaagcagttttaagactgatggaggaaagagaaaggagatgcagaaagcagtaagcagtaagcagtaagcaaagcgaaccagcctgggcaaatgtaaatcacaaaggtaggatgggcattactttgtccgctgtggtggattacataaaagtcccaggggataagcactttctagctccacacatttcccagtgccccatctatgctggaccatcgaggagctgaacattgtgtgtcctgctgactgcctgtttgggctgtggctgtatcactgcagagcacatttcttcagtcagctgctggctctgtctgcgtggtgcagacatacacgtgcacacacacagaggtccattcagaaaaaaaaaatcagacaagtcatttggtgttgtgtaattatagtaattgtttttaccttacttcacgagctggcttatataaacagctgattttttctttgcctttttgctggtcattttggcatcatttagatgtagccaatatctatacaatatccacataatatctgatgagttctttctttttgttttttttttttttttttggagacagagtcttaatctgtcacccaggcttgatgagttcctaaggctttgcagagagtgtggaaagcagggacatgagatgggcagttttcctacatcctgctcttcacggagaccagcaggaaagtgctcagaagtgactgttaaggtagaggtgagactagctgggagggagaattctaaggaagaagcactggctgcatcctaaatggtcctagaaaatcctgctttgggtttgggtactgttctaagaagaggttctttttgcatgactttgatttttttttaagtttacttatttatttattgagatggagtctcactctgtcgcccaggctggagtgcagtggcacaatctcggctcactgcaagctccgcctcccgggttcaggccattctcctgcctcagcctccagagtagctgggactacaggcgcccgccaccacgcccggctaattttttgtatttttagtagagacggggtttcaccgtgttagccaggatggtctcgatctcctgacctcgtgatccacccgcctcggcctcccaaagtgctgggattacaggcgtgagccaccgcgcccggcctcatttgtttttttctttggaaacggggacagtgttaataagaatgaagtaatcaactctccttggggtgtgtgtccaggttctagaggaaggggtgtcagaggtggaccttgaagggtaagagaatgttgcaagtggct

SEQ ID NO: 317209 - DNA, 4001 bp, Homo sapiens
acttcagtaatgaagtaataggcacagagcactaaaaaagatccaaaggccaagccggaagtcaaactgtatatataggtgaaaaactactagtgggaagctaataacgagccacacataattcaattgctttcccgctataaaaggaggagattttcagaaaactaatagaaggactgtcctgatattgacacgatacaaatcagaatcgtgtaaagccaactgatatttcacaggcagcctgccctcctttattaatctttaacttgtgtctggggaataatatgaaagttgggctcaacttcctctggccccattcttccctacaagaaaatgtatttcatttagattatcaacccatgtacttgcaacttccctttacttggggattcccttcctaacttctctcatttgttattaaaattcctagcactggcaaggtcacagccacactacaaaaccagtgtcatttcatttctagtcactgtccgttcatttctagatgcttcttctgctagcttcatttggaattcatctgccttaaaacagtctctgccccaagcaatggcaatatttttattggcctttccaagactcctccatctggttattagtgcccaagcccttcctcaaataccaagcaggcaggaaatagcagcatactctttcaaacacgtcgaaaaggttggaatttctgtagagttatggattttcttttagggaaagtctaaacaatgtctttgctctagtactagggaaggaagcttggtatttcccacacttgtatctcagcttcattagtgggtgagaggggagaaaggagaactcaagatgaactacacagagtgacaaaaaaaaaggcctgaaattaaagagaaatatcttgagattctctttccccgcaatggagagagaatgtaggtagagctgaagaactaaagccacaggcacaggatgaaagcagccgacaggacagttttccaggagggattcgcgcctagccttgttggccaaataaggctaccgaacgggccgtttccgtggcaggcgggttcagacgtcctccccgtcaggaaggcggacttgggataggatctggcgatcacaccctaaatctgccctgcccagcgccgccacgaattttccttccaagctctgccctgtccacacgcccttcctttttccacttattgtaaaacgcaccgaaggcacagtcttacaaaagccccaacaagtactcaagtgttaacaaatctcgtgttcatgacaaatgtgtttcttaaacgagctttatttctggacgcgcagaagttttccccaaacaggttacacaaaactgtaaatatctgggggagaaataaatgcttctcagtagcctgggagcaaagaaaaactaacgcgccttttcctttgagtcccgcttcctaccctccaagagactggcgcaggactgggcactcagacaccacaccacggtggtgccgggcgacgccggcagccgggtgggtgggagcggcagtgcccgtccctgccggccctcgccacctccgggcgccctcccgcgtccccgtctccgctacgctggtcccggtcggcccgggctgcggggaccccagggctcgccctctggcctcatgcggactccagcgctgcccttttccgggcgctccttttcccaagctgctctcccacctccgccgctccgcgcccagaaagcacctgaggagccatccctgcccgaggagcgccccctcctcgtccccaaccgggcttcccttctcgcgttcggcgcacagcggccggttctttcccttctcccaccggagatccgagaggcgcatcgccggccggccgccactcacctcgggtccggcgcggcgcggggctgcctccgcctcagacaagggctgacaagtgactcgcggtgagggcgccgtccccaccgcccgcgggaacttccgcctcctggctctccctcgccccacccccgacccaggacacgcccctccgctcccggccacgcctctgggccagtcccagccgcgccgcgcaggggcggggaaggtggcggcggcgccgggcgctcgggcttgctggggctggctgaagcagctgcggaaagacaactgcgctaccgagtttcggtgggagtagtcttagcggattttgagcgctacctggcaaaggtctaaccctccgctcgtccgttttgtagtgggtgcatttttctctccagaaatttaaattggcaagcagttgctctgcctaaaaatagaagggtactttggataaatctctatctatgcaagttcagcggttactgcctgcgtttttttttttgaaagagctttacatgctctgaaaagtgcagacccagaagtttacctgtcaggaaggtgaaaaccagtaaccctaacagaagttaaccctgtccatcacaccagaagacagtgatacataaaagcggccaaaagtgattcaaccactgtatcttcagtttatttttctaaatccaaatcaatagtccactttccagccttctatagggttgcttgatacgcccgaggaatttattcataagaaaacgtgaataatgttcactgaacatacggaaagtaactagactgttacactgtgaattggcttataaaacgtgaaaaggacaattcttaaccaaggagcatataaagcaaggatgaacttcatgaggtccgtgagctccccggcccccagaagtgcaagcaaaattccaaaggcgaagatccaaagctgctctttccctaacggtagccactggccacatgtggctatcgaacagttgaaatgtggctactgtaactgagaccatgaattttttgttttacgtaattttaaataatttaacatttaaaactgaagcaggataacatttctttactttttttttctttgagacggattcttgctctgtctcccaggctgggatcagtggtgcaatctcggctcactgcaacctccacctcccgggttcaagcgattcccctgcctcagcctcctgagtagctgggattacaggcgtgcgccaccacgcccggctaattttttgtatttttagtagagatggggtttcaccatgttggccagcctgatctcgaactcctgacctcaggtgaccaacccgcctcggccccgcaaagtgctgggattacgggcatgagccaccgcgccaggtcgttaacatttcttttaagcactacatttaaggactaaagttgaaaatataatgcccaaattgaaatgcgttggaagtgtaaaatgcacactggatttcgacgacttggtatgaaaaaataatgtaaaatgcctcaataatttttatattgattatatgctgaaatcatcatattttatgttttgttaaatgatacatgattatggccgggcgcgacggctcacgcctataatcccagcactttgggaggctgaagcgggtgggtcacctgaggtcagtagttcaagatcagcctggccaacatggcgaaaccccgtctctactaaaaatacaaaaattagccgggtgtggtggcgcatgcctgttatcccagctacttgggaggctgaggcaggagaatcacttgaacccgggaggtagaggttgcagtgagccgagaccatgccactgccctccagcctgggcgacagagcaagactccgcaccaaaaaaaaaagagtaataataataatatttgattaaaattaatttcactttttaaaaaaaatgtggccactagataatttaaaattacttacgtgagcagggtgcagtggctgacacctataatcctagcacttgggaggctgaggtgagaagatggcttgagggcaggagtttgaggttaacctaggcaacatagcaagacccatctctaaaaaaatccaaaaaattagctgggcgtcgtgtagtgtgcctgtagtcccaggtcccagctatttgtattgctgagcccagaagttcgaggctg

SEQ ID NO: 317210 - DNA, 4001 bp, Homo sapiens
tttaagcctgaattatgaaaagtctgtaccttctgtcaaagtttaaccaccatatatacatatttaagcttctggatatagaaaattatgcaaatttttaaaaaggactttgcgctttaatcaatccccttcagaagctgaaaatagtaaacttcttaggcaaattactgcctacacctaagtttgcaagccactctgaacagtattctcattaaatacctccagaaaaaactctaaaaacacaaattcttatgcttgaaaaccagtaagtttttgaaaaatcacactccttttaaatttcccacaatggttatatccctacaaaactcactcaaagatgttatctgagatacaacagtacctttcagagggggtaagagatctaaaaaacttggaactttaaaggccagactgagcagggtagcagtatcacaggagaaagcgccttctaccaaagacatcaaaatccgtccagacacttaccttcaggcgtttgatcatctcgtccgtggtgatcttgtcggtgatctcttttacccccggagggtaagcgatcttcccgtcggcactcacgacgccacagagggcagtggcaggcttgggctgcgcggtgaagtccatcctgggggacaacttttggttcacagtcctctaccggcctctatcggtcagaaaaccaaagttcagcgggaaaggggcgactttgtaacctcttttttcatttcaaatctctctaatctggaaaaggccctgtctccccagaggccggggacccggcagcggcctcgccacccgctctttcccagggatcgaaccccgccggccccgccaacccggccctgccagccccaggctcacggggctcctccgcaccagccgccgtggccgccgaacagcgccaggagtttcccattccgcctttcacaatgaaatccacccccgagcaccagggtccgaagtttggcggccccgggaggccggcaaggaccccaaggcccccgctcggcggtggggaagcacccagtcccgcccggccagtcccctccgggaaaccagacccgaggcctatagggctcggcttaggccgcaaaactagggacccagcggacccacgcgcagcggcggctgccgggaacaaaacgcccttgcccagccgagcctcggacccggggtagtccccgccgcgctgccacccctcccctgttccgctccctcacccccgcgggaggggaaaacaagccgccctccaccctcagccccacgccaggaagcggctgacgcgcctccgcacttcacattttgttccttcaacttcggctgagggaccccagctgcttctctggcccccggccgcttggcgcctccggcaccgccgaggccttcccggcaccctcgggcggccccaccgggcctcggacccgcggcccccccctccagtctccccttccgtcccctccctccagcagcctagggcgggagccgagccgccgccgcctttacctcctcctcatgcgggcggaaggtgcatcgagcgcccgggcctctgtcaggtggttgcgccgccgcccctagtcgggctgcacacaaagcggctccgcgggtcccgccgccgccgccgccgccgcccgcccgcccgggagcggcgctggggctggcggtgccgaggaggagcagccgccgcggggggagacgcggggcgagtgagcgctgggcggggagacagtgccgctctccgtctggccgaggaagagcagcctcgaaggctcctccgggagtgtgtgcgcttgtgtccgtccgggacccccgcggcccgcccgcacgcacctcgcgccggcccggaccgccgactcggacccggacgcccctcgcagaggcgcgcgcccggccgtccgtgccccgggagccggggcctcgcgcacacaccggccggtcacgcgagcggcgcgagagcacgcgagagcagcgcgcgctcctcgctccctccccttcctccgccggccgtgcatccgcctccctcgggcccgaggcggccgcgcgcagggcggacagcgccgccacccggttggcgccaatacctgccgcgcggggcgcctcccggaggacccgaccggagagggcgagaggaggaggagcccgggtggcgggaagcgagcccaggttcccgcggccttgcgagggcacgcagggcaaacagtgctttatctttcgcagcggcgatgagctggtgacttttgggggtcatcctgagggacatagacgaaactggttgggaggtagttaattgctcggtgaaaatgaactgatttcctcctcagggagagatctgcaaagtcaaggaaagttgtgcaatggggcgcagcgtgagcggctcactctcgggtcttctgacagccacccgagttgcccaccctccttagatttctgaagttaatattttgaaagctgcaaaacatgaaaatagcattgggtcgagtcgttctcaaggtatggtctttgggccaccaggcctcacaatcactttgggtactggctgaaaacgtaggtttccaactccaaagattaaaaaacataaaaatatatgtttttttaacgtaaaaatatatatgaacataaaacatataaaaatataacatataaaataaaacactaaaaaatataaaaatatacataaacataaaaatctctgagagtggaacccagaaataagcatttattaattgggtgggtgattcttgtaaataaggaagagctcattttttaaaaatgttttaaacctaccaagcattaacgttttctgtcatccaaaggaaaaccactatcaggtaaaaacagtgcacgcagcagtgtttgagcaatttaatgtatgtaattgaaacaaattaacgcaagaacatacacttacctatttaaaaaaaatcaagagcatacacaaaatttccgaagagaaagttgaaaaaaggatacgataatatgaaatcacattcagctcttgaaactgaccactaccatagtttaaaatgatattcgattgtttattcaaattattcttgatgggtacccattggtctatttttttcccacatcctttaacgtcaacttaaaaatagtaaaggtactgcatttcagctcactgacttgtttttgacgtattacacaagagcagtcattgcgaatctgacactccacagttgctgatttgctagaactctgcccaaaagtcaatgctttgttcttgggcatttacagtaccaggcagaatccatttaaaagtgtcctcatccaaactattaagtggaccaaaagctgctctctttttaggctctccctgtcacttttgatatttatttttttcttttgagacggaatcttactctgtcacccaggctggagtgcagtggcgtgatatcggctcactgcaagctctgcctcccgggttcacgccattctcctgcctcagtcttccgagtagctgggactacaggcgcccgccaccacgcccggctaattttttttttttgtatttttagtagagacggggtttcaccatgttagccaggatggtctcgatctcctgagctagtgatccgcccgcctcggcctcccagagtgctgggattacaggcatgagccaccgcgcccggccaaatttgatatttctttgtgtgttacatttaattaaacaacaatgattttatctttcatcctcctcagtagcttgcccattattaaatggagttttgtatatgtacatatattttattttatttattttttatattattttattattttttgagatgaagtctcactttgtcgcccagactgcagtgcagtggcatgatctcggctcactacagcatccgcctcccaggttcaagcgacttttgtgcctcaggcccccaagtagttgggactacaggtgtgtgccaccataccgggctaatttttttttgagacagagtctccctctgtcgcccaggctggagtgtggtggtgtgatc

SEQ ID NO: 317211 - DNA, 4001 bp, Homo sapiens
aatgactgcagctttctcattccacagctagattctgccttctgacccattgtggtagggtgaataatgccccccacccttgagatccccatgccctactctctgcaacctatgaatatgtcatttagtatggcaaaaaagtctccacagatgttttaatgtccagagatggaaatggtttctggattatccaagcaggtccaacgtattcacaaggctccttatgagaggtaggtagagttagaggcagaaaggtcagaggagagaggggagatgtgacaatggaagcagaggttggagtgatgcagtttgaaaatcaatggagggcccataagctaaagaacgtagatgcctctataagctgaggaaggaaaggaaatagattctcttttagagccttcagaagaaacacagctatgatcatactttgagttcagcatgttcaacccacttgggacttgtgaccccccaaattgcaagataatacatttgtattgtttaagccactgagtttgtgttgatttgttacagaagccataggtaactaatataccaacactgcaacaacttcctttctccccagagtagagcagtgccttcctgagggatgaataaaaacatcatctagtacgtctccttgtttccagaatttgtgggcataaaaacagtcttatttatttacttaattttttaaaagccatctgtgttactgatatttattggcaaaggtaataataatggtcaaggtaaatatgtagctataaagtactgcaatcatgtaaatgcatgaatatgtatcagccaacatgtaacaccaagcataaccagtattcacaccttccttcaaaatactttttgcttaaaataccggaatttttttcttccatgaaattgttatgtgtcaacacaatttttgcactattattaagaagtattttgactatactacaacttgatttattttgtttatttaaaatcataaggataacacaaatatcagaagttctttcacagttagattgaaactggaaaaaagaagtatgctatatagcaaatgcacacacgtaggcagctagtagctaactctccaaaagtttcttaattattttcttgtacagcggggcttgcaggtccaagcaaattttccttccattcttcagcgtggctctggcagggaaaagagaagagatgtgactttcagtccttgggtttgcaaatggcattagaagggggagggttgggcagaggaggcacggagcgggagcactgacagatgcagtgcaaggactcacatcagttgggcagtggggcagtggggtccggccttgatcacctccaggctggtgatgtgcctgggacggacctgggaggtggtcttcacacacaggcactgcaggtccccatcttcttcagcttcagctgagggggaaatggagagggtaagagaggaggaggggagggagtggtgactccatgagtagccagaggtactttagggactttttccactaccttcagccttcttttccttaccataaatcacacctcccccagacagaagttgttctaaccaggtgggaggtgcaggtgcagcgcctggcactgtggccagacactcagcaggctctccgttaagtgtggctgtgatcatgatcctagaggattcctccccagccccagggcttcccggactccccctcgccgctgccagccctcacagcctggcttctgctctcaccgctggcgaaggcgaccacaagtggcaggagcagcaaccccaggaacagcagcccggggcgtgaggcgcagaacccggctgcggagctcatgctgcggcagagcttccagcaggatctcagtgctcagtgcgatgggaaactcgggctgggtctctgtggccaatgactcctgagcctcgccggcacgttttattcccggctgtccttccagtccggaagcctgaagtggacaccgaggaactgcggtgcggaaactaagatagtactgggaagacttgggttctggccagccaagattaccaaaaaaaaaaaaaaaaaaaaaaaaaaaaaaaaaaaaaaaaaaaaagaaaagaaaagaaagaaagaaagaaagaaagaaaaggctctgggcagctgccttggctgggacctccaacctcaacttacatacaagcacgtttgtagagttagaaacagaacttgagtcagaaaaggaatgttttttgtgttgtattaacagtagagttctctgctgtcatcatgcaacttacacagtaggtgctttcaggaccctgacagttcctgtttcctttccaacctcccagctgcaactaccaattattactactgagtttggtggctttgtgtgtgaagcatgtgttattcgcaattattttctgctactaataagtttaatttggtctctaggcgatgactcttttgaatttcacctgaatgtggaaaacttccctagtctctggatggtatttaccaggctccaccaacaatcacccagtatgctgtaggacgcaaggtctattttcccattactcgtactcttggaaaaattgcagaagtaatatttgaatgcattctttttgtaaaagcttagtgcctggctgtttcttcattgtttccatcctgaataacagtccagaagagaggacaagaagagtttgccaggccatgtctcccagtgcctgctgtgtcttcagccagtgctagtgacagggtgagatgagctgcactgttggtggggagcagtgatgctctctgcaggaggattcaaggcatctgggagttgaatgtgagaatgatgggaggtgacggtggaggggatgcaatagaatcccacataggaaaggggaagagatccatatggacagtcttcccttctctgagaaagaatgactttggctcttgattagggcaaggtacacccttaacccaaagccagaggttctctatcacacttattaacagtggtaaagggtgtcaggagcccactgcatggaaagctgatattctaatatgtggtaggactggacttctatagaaatatgcaatttaattgttgagctgagtaatttcttcctcctactctcccactacctgccttttcacctgactaagacttatttatacttccggagtcagcttaagtgtcagttcctcagagggcccttccctgacaactatatgtaattgtgttctcttgcctttctatcttgcagaactctgtctttcctgtttctcacaggtaacacacacacacacacacacacacacatatatatatattacacagagatacgtatgtgtgtgtgtgtatgtgtgtatttcatagtgttaaaaatggttttgtttcctaaactggaaaacactatgaaatcagagattataacatttatcactgtttcagtgtactggtagagactcaattcaaagtgccacattagcgaagatgatgtgttgaaaatgatgatgatgaagttttaacatatccatgtatttgctccttcaagcaattgaagtatacctctatattaacatgtgtaatatatagttgcaattatttgcctacttatctgcctctcccaccacatagtgatcttttcaagtgcaattctctgtgacttacatacagtagtgcagcacataacatttaggtcaacaatagactgcatatatgacaatggtcccataagattataatggagctgataaattcctgttgcctagtgatgtgattcgcattgcctcatggttgtaaagtcataggaagcagtgtattactgacatgtttgtggggatgctggtgtaaacaaacccattcactgccagttctataaaagtatagcacataaaattatgtatagtacacaatacttgataagaataacaaacaactatgttactggtttatgtatttactatactatactttttattattattttagaatatactctttctactagttatagaaaaaacattaaccgt

SEQ ID NO: 317212 - DNA, 4001 bp, Homo sapiens
acattgtcacattaggttaaaattgcactagctcatgaacaagggtctgtagctttctcctgcctcaagtaggtcttgccttctggtccatggtggtaggctgaataatgccccccacccctgagatccttgtgttctactctctggacactatgaatgtgttgcttaacatggcaaaaaaaaaaaaaaaatatatatatatatatatatatatatatatatatatatatatatatatatctttgcagatgtattagagaacttgagttggaaagcgtttctgaattatccaagtgagcccaatgtattcacacgcctccttatgagaggtaagccggatataaaaggtagaagagtcagcagagacagaggagaagtagaggttggtgtgatgcaggttgaagactggagaaagggctatgaggcaaggaatgctggtgaaaaaggagaggaagtagattctcttctagagccttcagaaggaatacagctctgaggacagcttgagtttaacctttaagacttactttggacttgagacccctagaattacaagacgataaatttgtgttggttaagccactgagtttgtggtaatttcttacagaagcaacaggaaactaatatgcccacattataacaccttcatttctccccagtgtagagcaatgtcttcctaaaggatgaatgaaaatattacctcacacttctcttagttcccagaatcttaatatcaccaatgttaaggaatttgtggggataaaagcagagtgttgcttatttacttcattgaaaaaaaaaaaagctgtcgagtaatgcttaagagctactaatatttattggcaagctaattgtaacattcaaggtaaatatgtagctataaagtactgcaatcacataaatgaacaaatatgtatcagctaacatataacactgaacaaaatcagtctttattaaaccaagccttccttcataatgctttttgcttaaaattctggaaattttaaaatatgaaattgtgatgtgtcagcattatttttgcagtattattaagaaatagattgactataccacaacttgatttatttcgttaatataatataagaaggataatacaaacatcagaagattctttcacagttagattgaaagtgcacacttaggcagctagtagctaactctccaaatgttccttaatgattttcttgtacagcagggcttgcagatccaagcaaattttcctcccattcttcagcgtggctctggcagggaaaagagaagagacgtgactttcagtccttgggtttgcaaatggcattagaagggggagggatgggcagaggaggcacggagcgggagcactaactgatgcagtgcgaggactcacatgagttgggcagtggggcagtggggtccggccttgatcacctccaggctggtgatgtgcctgggacggacctgggaggtggtcttcacacacaggcactgcaggtccccatcttcttcagcttcagctgagggggaaagggagggagtaagagaggaggaggggtgggagttgtgactccctgagtagccagagatactttagggaccttttccactaccttcagctttcttttccttagccgtaaatcagacctctctcagacagaggttgtgctgatcaggtggcgaggtgcacgtgcagtgcctggcactgtacccgcagactcagcacgcgcgcaataagagcagctgcgatcatgatcctagaggattcctccccagccccagggcttcccggactccccctcgccgctgctggccctcccagcctggtttctgctctcacctctggcgaaggcgaccacaactggcaggagcagcaacgccaagaacagcatctcctggcgggtggcgcgggtgaggcgggacctggctgcggagctcatgttgcagctgaggttccagcaggatcccagtgcgcagggaaagtcgggctggggttctgcaggcagtgactcctggcctcaccaggcttcttttatcccccgtcactgtcccactgtccttccagtccggaagcctggggtggacagcgaggaactgtggtgcaggagctaagacactgctatgaagactcagactctggccagccaagattacaaaacaaaaggctgggggcagctgccttggctaggaggtggtacaaagatgcatacctccaacctcagtttatatacacttacatttgtggagttagaaacactacttgcatcttagaagagaaatattttctgtgttgtatcatagtagagttctctgtagtcaccaagcaacttacacagcaggtggcttcaggacccagacagttcttgtttccttctcaactcaagaactgcccatatgctcctaacttcagtcttgattaccattgagtttgatggctgtgtgtttgaagagtgtgctatttgcaattgttttctaatactaataagtttaatttggtctctaggtgatgactcttctgaatttcacctgaatgtggaaaacttccctagtctctggatgagatttaccaggctccaccaacaatcacccagtatactgtaggatgcaagatctatttcccgttactcttagaaaaattgcagaagtaatatttgaatgcattatttttataaaaacttagctcctggatgtttcttcattgtttcaatcctgaataatagtccagaagagaggacaaggagagtttgccaggccatgtcttccagagcctgctgtgtcctcagtcactgccagtgacagggtgagatgggctgcactgttggcagggagcagtgatgctctctgtgggaggattcagggcatctgggagttgggtgtgagaatgatgggaggtgacagtgaaggggatgcaacagaatcccacacgggaaaggggaagagatccatatcgaccgttttctcttctctaaaaaagaatgactttggctcttgatcagggcaaggtacaccctcaacccaaagcccaaggttccctgtcactctgactaacagtggtgaagggtgtcagggacccactggatggaactagctgatattctaatgctcagcaaacctgcatttttgtaggaatatgcaattctttctcctactctccctacacctgcctattcagctggctaagacctattcatatttctggtgtcagcttaaatatcacttcctcaggtgtgccttccctgacagctatatataattgtgttcccttgttgttctatcttgcagaactctgttcttcgtatttctcacagaatacacaaacatacacacacatatattgtagatatatatatatatatgtgtgtgtatgtgtatctgtgtatttaaaagtgtttaaaattgttttgtttcttaaatggaaaacactgtgacattagatatcataacgtttatcactatttcaatgtactggtagggactcagtgcaaagtagctacagtagtgaagataatgtgttgaaaatgatgatgatgaggctttgacgtgttcctatgtctattcaattggagcaattagagcatataattggaacatacatctatattgacacgtgtcacatatggtcaaaattatttgtccacttgtctgcctctcccacaagatagtgatctcttcaatagcaattctctgtgacttatgtgcagtcacccaccacataacaacgttttgggcagtaatagactgtataagtgatgatgatcccataagactatagtggagctaaaaaattcctattgccttgtgataccatagctgttgtaaaatcatagcaagccaatgtattattcatgtgtttgtggtaatgctggtgtaaacaaacttactgtgcttccagttgcataaaagtatatgacatacaagtatgtacagtacataaaaatggataattataataaacaacactgtttctggtttgtgtatttactatattatactctttaatcattatt

SEQ ID NO: 317213 - DNA, 4001 bp, Homo sapiens
gcctgagagaaacaaaggagacagacaggtaagaatgacaagtcaagagtacagcaggatcagaatcagccctggcagtgagcaaaactgacagcagagaaaagagcagggatgaaggcacggtggaaagacagagggcacctgccagggcgccttgccagtcgccgggggtagtctgactagagggctgcaatgcttttagctggtgggaggttcactggagaatgaatgggcttcttctcaggtgccagtctcaaagcaaagaagaaattaacagaggatagaacatgagaagtgattaaaaaaaaaaaaggacatctcatctctacccagagaaatacaatttttctatacacagatgcaacactgtgtagaaattagattgttttcttcttcttcttagagaaagtgcattatgaactctgacttcaaaagaattctgtactctgcaagctacaagttatcagaaatggaaacatttttcttcccttgtgaatcacaaggttatcttcccaggaaaagaaaaacgcccccaaggagttgccaatagcatcctggaaatgggatttgctgacattttatttgtaggggccagagaatggtaaataaagacaaagacctgacccctactgaccttgtaatcttctttgttcattcaagtatttcagtgacctactatgtgtcatgcactatgcctatgccaggcactacaaaccaaggtagtgagaatagagaggcctggccacataatttatggaggtccagtgcacaatgaaagtgggtgacctcttgttttaccagtaagactttcaagacaggacagcaggacattaaaacaacagtgggcccttcaaggagcgcgagtcctgtgagactgcaggggtctctcgcccctgaagtcggccctggagacagacattaaacaaacctacaaacaagtgtttttggagttttttgtttttaccatttgtagtaagagctataaaggaaaataacagactgtttagagtgaatattagggataaataatttaacgcttcggagccaaggaaggactgactctctacgtaagccacatttaagttcaggcacaaaatatgagtcacaacgggagaaacaagttcagcaggagagcagcgagggacattccgagaaaacctaacagcaagcagaacaggtcgaaagggcgagacgcaagtttatagagaggagagggagtgatgtccagagctgggttcctgattctaagaaacggaatgaagagagagaaaaccgtgctgtgtcccaggtgtgcctccctggcagtcaaagttctaagggggactcctgaagccaggcgggcccacccgggaggacaacccacgtttgtaaccaagccctcgggatgggaggaccggaccagaacgctgctctgcaaaggtctcagcggccaaaggaatacgcgggacggagcgattctgggtccatggggatgcacagccgactaccgacgacgagccagcggtctgagtgacagtaaggcgtgcgcccctcaactagacagcgtccagggtctggccgcgcttacaccaccctggctcgctcctctactccgaacttgcagtccggccggccggatggctggtttcgtccggggacaagccttcccggcctaactctgaacgtgccgcatgccggccaggtcgaaggaagcctagcagcggccgtacgctcctgggtcttcccgggggagaagcgggatgcactgggcgggaaggcagctcaggcagagcaagcagcgccgcgcctggagagggcagagcacccggccccgctccaggcgctccccgcctgctggtgcccctcaccttgtcccagcgcagccactgggcggtctcctggtccagccgggcgtcctcgcctagaccgctgccttctggagccgccatcgctgagcttgtgctaccgctgcagagggaagcaggcggtgagatctgccttccggcccggccccaagacgtggaggcggaggcgggggcggggagagccgcggcggagccagtcggtccgggggaaagtgacgcgcgccgcggcgggcacgcctccttgccgtttgcgggtgcgctgcagggggtgggagtgagcgaggaggaattgcggggctagggtgggttgctggaacctggcacgtgtgagaagggtttgccatcgtctctgatgcatccaggctacagccagccgtgagttcctgctgcgcgccaggcacatgtcagatgctgggataccaggaagtgcacccagataggggcctgaagactatgtagaaactcagagggtcaagaacagccagaaaaaaatcttgaaaaagaaaagcaaagtaggaagaccagtggaacataagatagagaccagaaacaaaaatacacgtgtatggacaatttatttcagaggcggggctgcagagcacaggaaggaactatttttggttaatggtgctcggtcaaagggatatccacgtagggaaaagaaaaaagggaacttggccccctacctcccatcacacacagctctgaactccagatcaattgtatctctaagtgcgaaaggtagtgtagcaggaggagccgcagacaaaactcctcagacaccggattaaagaaggaagaggtttttattcggccgggagcgtcggcagactcgcgtcttaagagccgagctccctgaaaaagaaattcctagccattttaagggcttacaacgctaaggggtctgtctacgtgaaagggtcatgatagatcaagtaagcgtgaggaacgtgactgggggctacatacatcagctaacagaacaagaagttttacagtgctttctcatacgatgtctggaatttacggataacgccagtagttttggtcaggggttaatattattattattattttaaccaccagggccaggtggtggcgccaaggtcgtctagctatttatcttacttctgtttttttccaactttttgctttctctcttttctcctgtcttataaactagggaaaaggggaggtgggggagaagctgggaaggacagcagaaatggtggtctctttccatagtagcgtgaaacttagggaaactaacataggagcacatcttcctgacgctggtatcaccaagccataaagaagatgcatacccataagcataaaaaagcacgggcaagaatatttctagcagcattatttgtaaaagcctcaaactggaaacaacccagatgaccatcgacaatacaatggataaatacttggtagtatatccataccaattcatataaataaatcatggcacattgatagagcaatgcaggtgaactactgttatacacaacatcatgaatgaatctcacaaacactgagtgacagagttcaaacacccacccccataccccgtcaccccaaaatactgcatcattcatctgtagtcccagctatttcgtggtgggggagctggagggagtcctgaggagggaggatcgcttgagcctgggaggtcgaggctgcagtgagccctgattgtgccactgttctccagcctgggagacagagggagaccctgaaaaaaaaaaaaaaaaaaacactgaaatatataaaattataggtaaaggaaacaaatcagtgattttcaagagctgggggttgggggaggggttgactacctagggcacaagggaatttgagggagttgtggaactgttccgtatcttgattgagtttggggtttacttttatcaaaacttatagaactgtacgatataaagggtaaaattcactgtatgtaagttatatctcttttttttaagttttaagattaaaaactaaaaaggaggcaaaactaacctatggatgtcagcagagtggtagctttgggaaggagggaaagtgccttctggggttccgggactgttctgtttcttgacctggacgatggtcaacaggtgtgttgactttgtaatattcactaagctgcaa

SEQ ID NO: 317214 - DNA, 4001 bp, Homo sapiens
acgtggccttacggagtaatacagcgagggaaaaaaggagatcagtggcaaaaaaaaaaaaaaagggggcaaggaaaagaaaacggtgaattacagagcccaaaactttagtttaggtcccaacttcagaaatctcccttccctggtgccccatccatcccaggaatcaggagactcaaaaaaggttaagggccagcgttgacctgtgacaactaaaacgattttgaaaaatccagccaaagaaacaaaaaaaaaaggctgcgaggagaaatgggatggaagaaagatgaatgctgagagctggtctctggggcgccaccggggaccctggtttcgggggaagaactggaggtgcccgtagctgcggggggacggtgtgtgtgtaggggcgggatgggccgtcccaggtgcggcggccgaggcgcgggggtcccggagacgagaaggctgggcaaactaacccggtgcccagaggcctccctgtccgaagggggttgtgcttcagctgcagggggtccttcccctccccttccaactcctcacccgggccgtagaacttgctgcctttggtcacgtcgaagactttcccattgaccgcgagcaggatgcgcgggttgcgggagccgtcgtactggcgcagctgctccaagctgaagtcccgcttcttcatgcgaggcagagaggtggcggggctctcctcgcccgccccggccccggcccccagaccccgccgcccccagcgcacccacagccggtaggcccccagcagcaccagagccaccagcgccacgttcagcagcatttccccgccccccgtcagaagcgccaacgccgccgccgcccagcctcccccttccgctgccgctcccgcgtcgcctggactctcgctgccgccgtcgttgctgctctcgctgccactccccagggtgcctagcttcacgtccccatcaccagccgccatcactgcccgccagcgccttcctcctcctccccgccccctgccctccccaaccccacggccggccccgcccatctgggggcctctcagccaataacgtgagaagagggggcggggtcaggccggctcctgattgggtgttgacggggtaacgttgtctcggatctcccgccccctcccttctttcgctggccgcgcacgcgtgcaacgccccgcccacctcgccccacacttccctgctctcactccaagcctccgctaggttaagtagacgagccgggcgggtctgaagaaaagatgctacgacggccgcgcggacgctcatgggcggggcgagaccacagcgcgtgcgcgggctcctgagcgccacgcgctcgcctttcgttcgtaacccctgcgggaggcacgccccgcccagtctccaggctctgcgcgtgcgccctggaatcgcttcccttcctaggcctgcgttcgcgtccgcaaactcccgcctccttgcgctccccccgcccgggagcttcacgtgcgccttggcggccgcgggggcaggtccgggctggacgcctggcggaggacgcgggcaggtggcttgtgggaggctggggcatagttgagctgcaaggcgcaaaccgatgaggggcgtctgcttttcaccagggcgccgtcgcttttgtcgggaaaccggcagcgtaggcgcgcagaccgggaagcggcaagaagatttggccacgagctggggtcttcctggaacggagagaaagcacggaacccgcaccgggcttctctggcatcggcagtctacgtgctcctcgcgctggcaccgagcagccactccccgctgggtttggcaaaggctgctcttgtagaattttaaaggatttagagtctcattattccttgaatcataacttctgcggccgtagggaagtggacaggttgaggtggtctttctattcgtcattcactcttatttgcaggttctgtttcatgtacttggacgtcttttagcctctcacaccttgaaattctagtgtgaaaaagtgacctctgaagtctcacgcactcaactcgtttgacgaactcgtttgacgtgttctctcttgccctttgttgtctgttgtcttgagtctcatagaataggtttgaacctttcactgtcggttttgtaggagtcactgaggatattgacgaggcaagtgacagggtcgacactcttgtagagaggctgtatagcaaccaggtgtctgaaggattagaggctggggaaagagtgggaaagcagttagtaggctagggtatttgtgcgtgaggtgaggagactcagagctaggggagacattagagcaggggttggcaaacattttttgtaaagggcccgatcatattttaagtctctgccttaactactcagctctaccttgtaacgagaaagcagccatagacaatacttgaatgagtgtagctgtcttcagtaaaactatggacattgaatttttaatataatttcaggtatgaaatattcttttgatttttaagaaaatcattgaaatatgtaaatttttttttttttagttctggagaggtgcaaaaacaacttataagccatattgctgagccctgcattagaggtacctgagggagagcgacacaattggtagtaaatgaccatatactctatccttcaatatggaacacttttggaagtaaagtagggcattaataattatagccagagaccaggagttatatcagttttatcccaggcaaacctaaaggaatagtcaccttaaggttaagggttaggagaagtcaaaattgctttaggacttggtaacagaaaatgggaggtgccagtgatggaaataggaagataaagaagaaactggttttgaggagaagatagctgtagcagtcccaagagctgtatacagttgagacaacattgataggaaggaagaaagcaccccagaagcaggccactccttatatcttattgaccagaactgggctattagctgtccctaaagcagtaacagacaaggagcatgggacatccatgattgcctagtgtttatctggcttttttaattcttattcaggactgtgttgagcattgctggacatttaccatctctggttccttccagctaaatgtcagtaccacacctcaggcattgtgacaccgtaaatcaaccgtttttccctcccaccccccagaggtgtggtactggttgagaaccagtagcttagaccctcaggatttaccttggggctgaattagtgtgtgtaggtttcttttccagttggtttggagggaagagaggaattggacagtattaaagttctgctgtcaaggaagtgggctggggaatgttgggtagctaaccaacattggctgccacgtgaagtaaaaaagttttcctttatatccttgataaaatagtgtctcgacttcttcacacttgaagccttcccaaaaccccagcttttttgattctcattgtaagccccttgaactggactagttggaagttcttattttccaccctaagtaacaagctcttgtcccaataggatactcttgctttgagtactgcaataactttccaattggtgacttgccgtcagtcttttcctatttcattcctacacgaagagactagaactgtgttctgatttcctttgctcagacaccaatctccaggggtgctctgtaatttgaagaggacaactcagaaagcactcaagggcctccataagtccctgagtggcttccctgccttcccgttccccagcaaacaatcccttggataccctctattaaatgatacgtttccccttacaatacctagtcccttgccccatatatgctatgtgtattgcacagtctaggacttgactcatgctgtttcctcacggagcatgcccttcttatttctaaccatacaaattccatgacctatccattctttcaattctacttccacctgaggcctctatcagcccacattaacctaccttctttgaatttctgtgtgttcct

SEQ ID NO: 317215 - DNA, 4001 bp, Homo sapiens
gcacttgagttaggaggcatttttttggggggcgggaggggagaaggaaaaacttataatacgggagcaaagtctgcacaccttccaccacaggcacttcctgtccccgaaattgcatcgctcatccacgtcccaaggccccccatgtctctgctcgggtgggaaacacttcgcaactgtaaataaaatgccaagagcgtgcgctctaagcctctctcgaacgcacagccacaccaaatccagtatttctgatcggccatggggccctaggtccttctcactcgaggctccaggacttcgaatttcaccagccgcccctcaccccacacctccccggaccagtgcggcggagcggggtcggtttccaggcgcgcgtacctggactcgcgcctctgtgaggtcgatcttcagggccagctcctcccgagtgtagatgtcggggtagtgagtctccgcgaagaccctttccagctctttgagctgggcactggtgaaagtggtgcggatgcgccgctgcttgcgcttctcgttgaggccgccgtggtccgtgaagagtttgtaaggaactagagtatgacagaggagacagaaagtgagcaaatcagccggcagctcgccggccgtggagctagaatgtgaggactccaaggtcaggtcatacggcagccgctacctacacccgcgcgagagagttgccgagagaagctgcgggaagaaaccgaggaaatttgttatctgcggaaacctgggctcaaacttcgggcttggcggagtcctttctggcacaagcgcctttgggtggattgaaacagcgcgatgtgacggacttgagatagtgctttcagcaggaaaaaaccagagaggaaaaaaatccaaaaacatcagtcggaatatcagggagccaggaaagaagttaccaaacagtcccactttgggaacttttcaattctcagaaagttgacccggctcaaaagttgggggaaagagctgcaaaaaaataataataaattaaagaaataatcataaaaatgaccagccaaagaggtgtgagccgctgtcggttcttaaaaaaagagacactgccagtaatgagctttactctttgttatttaattattttctaagctttacgtctcatcgcaaagtaaataaattatgcctatcattttggcagcttaagataattttgttggcggttcgggtgtgactaggatagtgtaaccctgtaagtgaattacccctccctgcaatcgcttctaacgtgataaattctttcatttgtgtaagcaaatttcgtttggtaaatactaaacacatttccattttcaaatgcaatcaaggcttcctatatacgggcggaaaggcggcttcctccgctgagaaagctgaaggtccttacctgcggcgtacggactgctctggtggtccctgagggtgcccaggctgcaggatcccggcgtgagggaagggcagccggacgtggccccaaaagtggtccttatcgggttatactggaagccactggcctggctgcaggaactgaagtcagcataggctgaagccaggctcgaggtgtccatcccagccatacaggactcgtaggcagaggaattgaggtaagaatattccattttatacattgaaaaggttctggatggctcagccaagtggaaaaatgaaataaaagatggatatggagaaggtggctggagtggggagatgtgcacagctcaacgcctgcctccaaactggcctccttactaccagcagagcctagttttatgaaaaagcctcctatgagatgccttgtctgaggtctctagagcatatagtcctcataataaacttggctctttccacttggacaatagcaaagcggttggtcttattgctggcgctttttacatgacaataactcatccgtctattgggctggcactggggaactgagctgtccaacctccctatcattgattcctgcatctctaattagaatttaataccacaccattacgcaccgagcccctgatcctcccttctaaccagctccctgccctttaattcaatcacactacttggaaataatgaaagttgggtgacgattctccctgatccaatttccccgagcttttaagcctttttaactgatcatataccttaggcataaattgagatagtgtgtgtgttttcccccttcttcgtcctcttctttttttccccctcggttagggagaagaaaccttgatgtcatagaaaacctgttttgtaagagtgttacacgctcaatttaacaacaagcctaccccccgaagtgcatgaaatgttataaaggactgggacattggcaagactcaggcgccctgtaacatagagtaagtgggccaagggggtttatgtgaacgataagcggatttctttaaaaatacacctggtagagggggttaaaaaaaagagagacagagagaaagcatcttataaattgcatttcttcttgcagctaaatgtgctttcaagagactcagggtatacagccacttaaaaataataataaaaaaatctgaggaaagctttcgaatgtgaaacatctggattctcgaccgttgtgttctttgctctcagttctgtctgtttgcattagcgcaagccttggttggtttgagtttctgtgaggttgttcgttttaattacaccataactggcaagcgagcatgaagtgtacccaaatgtatctcctctttcatctctttcgggcgctctccctctttctcgcctctttttttttttcaggtgcccacaatcctccacagacccggggattgtgtctgtttgccttttaggtttgcggactgtagtgagggaaattcttgccatgtaaatgcccaggcaagggctccaggtcgggcacctttcttgtccgattcctcaggcttttgggtgctggcagcgaggcacagacaaaggagcgagcagtgatttgtggacttcagtggccccatgatttaagcggagggtaattttcatttggtttgttaggccctagcagaataagggaaactatttcattaaatccttcctctcggtggacaagagggggaaagcttagctgaatcgccgtgtggtgtaaacaaaccctggatattttatatgaattaaatgtgtagataattagttttattgcattcattaccccctttatgtgctctgtaacaagtcagtaattaaagtaacaaactcataaagtctttataggggcatttaggcgttcagtgtttgccaaactaagtggtttaattcgatgctagtgccggggagtggatgggctcccgctctcccctgccaccgtgttttattgcgcactaaactgccgcggacgcagtaatggattaaacggggacagcggtcccccagccttgtgcttctttgcagggtgagtttcaggctcgtttcaggtggttgcaaatcctcggggcgtgaggaagcgctaaagtcgggagtgcagggagccggacctaccgaggatcctggtgatagttttatggggagggctgatagttttattgcagttgtatgttgtacaatgcgtatttgataaagaagggcccttggtgaccagtgtgcacttttttgtgcacgggggtgaaatgaaaataaatgtatacaaggttttactgcggcgggaaacaaattgcaacgctctaaatggtttttctttatggtcaccagacaagaggagaaaagggatgcaaacatctgtcttcagtcccctaaacctaaaggccagcaaagacggatgcgaatccaagtgctattacagcggagatttgtctttatttatcccgctctcatgaatatgaatttgcatttgggccgggaggtggctgtatccctttggactccacacatggaatttcccccacgctcatccccctccccaaccacttaagggaggtgggggataggttgtcaagcacaaggctgagatcgtccaagtttcttcgttc

SEQ ID NO: 317216 - DNA, 4001 bp, Homo sapiens
cctcactttgaatttttgttgttgttgttgtttattttttatagagatggggatctcgctatgttgcccaggtgggtctcgaacttccagcctcaagctattctcctgcctagacctcccaaaatgctgggatgggattacaggcctgccatctcgttgacctctcgctttgatttttttctagccttaatactgtttgtttataaaacacctcactttcacagaacaagtgcattttgaaggctttaggctcttttaaaaacccaggtacacaaggtagcttacacaaggtaagggacagaaaaaggcaagctagctattttacagactaaattctaagtaacatatacccaaattgccaatgtagctaggcaaatgcagacccgtttgtgatctggtttcagcttcacgttgtttggttaaacgtcaatgcatccatcaggtaacattataacgggagcagacgttggttaaagcttaaacaatcagacaaactgctccccttgggattctctgatttatttactctagaatatgcctgaatgtagcctctagctagaacttgagtgaccgattctatccaaaattctttaaactgtaaaggacacattagtgtaccactaacagtacatttaaaatctaacaattccaaaaaaaactaagcagtgttaaagaaacttccattttctgtggtttttaagttgtcatgtgtgaagcgataaaccaaccgggtgcacaacatctcatttaatccatcctcacaaccagcagggaggtgtaccatcgcctttttacaaacaagtctgtctcacctctagctgagagtcttacaagtctcttgctatttccatcacatttgtctaactccattcaacacgccagaaaaactcactttattaataaatatccaggcctgcacagcatacctaaatttaaccttcaacatcatttcaactgccctgtttcgcctgaggttatcagtccgcttaatagcgaaaagaggtttttcgttttggttttcttatgtattagaagtaaatcaagaaagagaaactaaactgtaagagggcaggaacagactttcaactgcttttgccccctgtggctaacttcataataacaacatttaatagaaaaaggttttgaaacgtgccccagtggcaactggatattctggctgtccatctctctcctgtcatccactttgcaaattcaccactccgggaactttcctgagagttcaaggttcttaattcaaaagtcaagtccaaacttgagcaaggacttacgtcattttacagcgttaacctctccccagtgtcggtttctagaagttttgactcactttgcggggaggtctaaagaatcggtttaatgacaaccactggccttaggagagggagctcccggagaaagagcgagcaagctaggtgcccgcggtgcggctgcggctggcgccggtccgagctcgggagctgctgcccagcgagcggggaaagcccgtccacctcggccagcgcgcgcgggagacaggaccgagccgggcgacaggggcagccgcccggaggggcgcggggagtggggcagggccgggtcgcacctgaaaccgcggggcggctccggtccagctcggcggacgaactccgggagacccccacgtccccgggcgggaggggcagctcctcgtcgccggcctcgccctcctccccggcagcgtccagcagcctcacggcgctgcctggggcgcctctccgcgggtgggcccaggcgatccgcggtagcagcggctcccgctccccatcctcctcctcctccgggctcccgccgtccgcggacgccaaccggtcgggctcggagggatcctccatggactccctctgctccctccgcgctgagaccagatcagagcagccaggtgccagagactgggctctgcatggcgcggaacgggagcgaccgggtagaacggacgccacctcaccagcgcacgggcacgcttggcgcccgcccagcggttgtcccgcctcgccgccggccgcgccccacctcgcgcctccgccaggcaccacccccgcgcctgcgcagaagggtcgtggcggcggcggcggcggcagcggggcacgtgggagtgaacagggggcggggcttttgaggggtcaggtggggtggggccgccacctgcttccgtgagcgcggggagaagctgggcacagctcgctttactcccagtggagggcgggaaggtgagtaattttcaaagaggtgccctcctgcaaccaaaagcggcttctccctgacagaattctctctcagagtttaccataatctgtaactatagatttaattgtatgacatttctttcctccagtagacgtccaggagggcagggaccttgtctttgttcagatattcttgatagtggcagtttgtatgttttctttttctgactaatctagctagaagtttatcaatttttaaatcttttcaaaatgtcatgttttggttccattgattttctgttttctggtccattgccttattttgctctttattgctcacttgagttttgatttcctcttctttttctagttgcttagagtagaagatgattgattctggatctttctgcttttccaatgctagtattttaaggctataaattgccctctaagcactgctttagctgaattctcctttttttttttcttggtggttgttatttttgagacagggtctcactttgttatccaggctggagtgcagtgacacaatcatagctcactgcagtctcaacctcctaagctcaagggatcttctcagctttaaactgtagaagacacagtagctggaactgcaggtgtgcacgaccacatcctgttaatttttaaatttaaattttttgtagagatgggatctcactgttgcccagattggtcttgagctcctggtctcaagcagtcgtcctgcttcagcatcccaaaattctgggattacaagcataagccaccttgcctggcctgctactgtgcttttgttttccttcagctgaaaatagtttttaatttcctttatgatttcctctttgaccctgtaaaggaaaataaaaatctcagaaccaccccccacccccaacttgttatgtcaaagggagagttaagcctggagactgaagtcactcaacactacaatgcttttcccaaatggatagctgttacttcccatagttgtattaaaactttatatgttagccagaccctcctcaaaatgcaaaaaaaagccttatgcatctcagtctcaggatgactgtcctcaacaaattaatcatagtaaattctttactggcccttaaacctttcaagatgtatatccttccataaaacaaggacgtgtcaattgtataactttaagtctgcaacctaaatcaaactggtacaactaaagtctgttaaatttcacatggataaattcagttacaagcttatcttcccagatgcagaacaaggataagatcaatcattccttcacctgagatatctgtataattaacttcctttactccattttctttgaatattcaccttatcttatgcatagcatagagttactgggcactacctaaagtctagcaaaaatgtaaccatttgcttcaccacctacaaccctcttccctgatgccttctccgctttaaagaaagaatagctgtaattacaggtgcctgccaccatgcacggctaatttttgtattttttagtagagatagggtttcaccacattggccaggctggtctcgaactcctgacctcagatgatccacccgcctcggcctcccaaagtgctgggattacaggtgtgaggtactgcacctggcctgtaaatgccttttaattggagtttggggtccatttacatttaatgtaataatgatgtggttggatttagatctattattttgcaatttgggttttatttgctttaaccttttcggttcctctgttcctcc

SEQ ID NO: 317217 - DNA, 4001 bp, Homo sapiens
aaagttttgagccaatcaataaaggcttacttttttctttacccacggttcttgggaaatgcactatgtacttcaaagctgctgtcagtaggctggacacctgaaggatatggtggaaacagtggtaattgttgaggccggaacatactgatttgatcattatgtatactggtggataattttggagaagtcacatttaacttatctgagtttgctttcctatctataaagtctagagactgaactagattaactctaaaggctccttctaagattgtaaatgacccagtgacgattaaagaagaaagcaggtcaccaagaatggcatatcttggggtaggttagcctggatgatcttgctctaaatcttttatatttgccatgaagcatgagctttggctacttgacatggggcacaaatgatgggtctcagttccatcccgtgtgaggctccttcaacattctattgccccagccaactgacagcacaaaatttccactttcttaaaattgcaactccaagcgaaagactacagagaccccctctaaatcttcaaaacagccaaaccatgattcataaaacattaaggcaaacttaccttgattcgaggcatagtaactgtaggtggctttgcttcagccacaaaactgtgagatgctcctttttccacaaggtaagttgtgtagggcataaatttcacaccctttgacccaaacacaaaatcatctctcaaggcatctatcagaacaataacaactttactgaagagaggtggtggcagcgtggtccagttagaactggctcctaagtgtttgaaagaaaaaaaaggaaattgaactctaaactttccttagcatcaagcaccttcacaatctagcttctacctacttctccagcacataccctgcgatatctacataacccaacccaaaaggaggcgacttgtacttggtaggtagtgctggggggaaaggacgggggttaacaggagtaatcttagggacccacagtagcaagcagtgaattatcctcagtatggtgaagagtactggggtaggagaatccctacgtaagggtcctggaatgggacatttagggagcttgacctaaaacgcagagctgcagctacgggatggctgggcgtttacatactgcgtttacatggtcagcggctggcgatgtgtgcaagtggtccagaaccagggcgcctttacttgctgtatatggctgggtaggtgaagcctaggaagaggcctaacgcagagaggccttagcccctaggcagggaaaacatcttggaggaatataagagaccaaaacgcgaggggatcggcaggggtcttatctgttgtgtgctagggggcaaaaagggcgcctataacggggagtgacccaaaggctgctcaggaaaggggcgggagctctggacgagtagaagtggagaggctggatcccaggtatggacacagcttactttgtggtgatcaggaaggaaggtcgaagtggggccagtagaggtggttgccacaaagttgtaagaatacagaaaagagacgctggagcggttaaaaaaaatttctgaggtggggaccataatggaagagaccaccggggagcgccgagaagaaatccgagcagcgaggctcagaaaaaaggtcttctaggggatgtggggtcaggggagcggagacgccggggaggggtccgtaccagccgagggttcgggcgctgggggctccgctccgtgttccgctctggcagaggaacgaacgggagccgggaagaatccccgaaggaagaccgcgatccctagcacctcgatcgctacgcaacaggtagcgaaagtcccggagcccagccgcatcgtggacacgctaggctggatgcggaaccgaccccacctggagcctcgccctgctgcagccgcgcttccggctccaggtagccgcctctaagcaataacgccaggccttatcgtcgcagcgacagtggcgtcacgtccgccggcgcgccacagcagcgcgtcacttccgccagcccgccacagcggggcgtcacctcggacatacgaacagcgggcggtgttcccggctccgtggggccgtcttcccggcgagtccgcgacggtcgccgcccacggcgaggtacgaggttttaaaaagtttttaatttggaaggcagggtgcagtggctcacgcctttaatcccagtactttgggaggccgaggcgggcggatcacgaggtcaggagatcgagactatcctggccaacatggtgaaaccccgtctcaactaaaaatacaaaaaattagcggggcgtgatggcgggtgcctgtcgtcccagctactcgggaggccgaggcaggagaatcgcttgaacctgggaggcggaggttgcagtgagccgagatcgcgccactgcacttctgcctggcaacagagcgagactgcgtctcaaaaaaaaaaaaaaaaagaaaattcaacccaatacctcagacaactggtaaatatcttaatgattaacttcgttttaaagatgccacatgagtgagatcatgaggtatttgtctttctgtgtcttattttgcttacatgatatcctcaggtttatccgtgttgtggcaaatgatagggtttcattcttttattagagctgaatagtactccattgtgtatatataccacattttcttttttctgaaaggaaaatcttggggccccaaaattactaaactaagggaaaagacaagctcggaactgctcaggacaaacctgcctcccattctattcaaagtcattcctctgctcactgagataaatgcatattgatagcctcctttggagaggcttatcagaaacccagaaactgcaaccatttgtctgtcacctacctgtgacctggaagccccctccctgttccaagttgcccccgcctttctggacagaaccaatgtccttctttttttttttttttttttttttttctttttcttttcagatgaaatctcactctgtcgcccaggctggaatgcagtggcgtgatctcagatcactgcaacctctgcctcccgggttcaagcaattctcctgcctcagcctcctgagtagctgggattacaggtgcgtgccaccacgcacggctaatttttgtatttttagttgagacggggtttcaccatgttggtcaggctgttcttgaactcctgacctcgtgatccgcccgcctcggcctcccagagtgctgggatttacaggcatgagccaccgcgcccggcctgttttttttttgttggtttgtttttgagacggagtctcgctctgtcgcccagcctggagtgcagtggcaccatctccgctcactgcaagctccgcctcccgggttcacgccattttcctaccgcagcctcccgtgtagctgggactacaggcgcccgccgccacgcccgtcaaattttttttttttttttgtattttttagtagtgacgggtttcaccatgttagccaggatggtctcaatctcctgacctcgtgatccgcccgcctctgtctcccaaagagctgggattacaggcgtgagacaccgcgccctgtccggcctgttattatacatatgattgatatctcgtgactccctaaaatgaatacaaccaagctgtgccccgaccaccttggacccacgtcgtcaggatctccggaggctgtgtcatgggcgtccttaactttgggaaataagcctcctgaaatgattaagacttgtcatttttctcgattgacattgataagcactgagagatcctcagtgaaggtaacccggcctgcagcagttcgcctattgatcctcggtattggcttggcaccttattgcccaaactggtaggatgattgctgaaatctgggaccttgttcctccagggatccctgatcttccaacgtttttcggtggggggtctgaggtttatttgctgttaaaaaactccttttttgggagttcccactcgc

SEQ ID NO: 317218 - DNA, 4001 bp, Homo sapiens
cttattacctgccactgtgttttaaaaggtatatggtattaagaaaagttggctgttgcgtttttttaatttttttaaattatgaactagcgctgctccacttcttcttgcttcttactttgacgtgtcatcctagctgcctgtggtatcatattagggatcccatcaatgattggataagctattcccaactcttcattaatcaattcgtttgttgatgcttcatatctgaggtggaaaaaaaaagaacaaaatgagttgtgggaaaataaaatgcttgaagagcctgattttcaacaaataccaccatttatccaatttttggtacggagttaatcccagaatagtcttctttaattctaaaagcaacaatagccaattcaaccttttatcttagaaaaattctcttacaatctataattattcccattttagtagtttctctcatattctctttttcaccttattcacaagttattccttaattttttttcatactagtcagaaaagatccccctctcttatccaaatattccttcattactttggtcaacccccaaaccatccctgttaatttactactggaataaacactagagaaaaatcaacttcttcattttagaataaatgctaagtagagaaacttaactaatccattagaaggaaatcactggaaaaggtgagagggcagaaatgaagaaactttcgaaagcactaagtctgcagtgagctagttataaacgtaaatcaaatgataatttcaaggttcgagaaaattgaataatatgtttattacgggaaaaagaaatacgaaaaattgctagcaatctaccattcaaagataaccactgataacattttggtgtttatgcgatttgtaatactagcgttagtgttgtcaatattcaattttggtagcttggaaactgtagagctgtcttcccaaaaactagttaaagaggcttctacgaaacctgctaggccacaactaagagccactgggcagcaaacacagctgaattgcttaagattgtcaggcaccagttgtacaagacactttcacaagaatctggagggtacaacaatacttttcattatcttggcttaaaaaccggaaggcttcggacttgtcctgaatcgcagtggttcataaacctggtggtacattagaaatcatttagggaccgtttaagaacacagataagctgggcgtgggggcggcgcctgtctctcgactcctgaggaggctgaggcgggagttctaggccagtctgggcaacgtagggggcaccctgtctcttaaaaggaaaaaaaaaaaggaaaagaaaatacaaatgttcaggtcccatcccgcgagcattccaagtctgcccgtcttgggggctgtcggggaatcggcatttttaaaacggtccccgggtgattgcaatgcgcagccggtcgcgaaccctaaaacgcttcgagccattcccgcaggctggcgttgcgttctgggagatgtgggacgcagctcccctggcctccggtctcccccgtcctgcccgctgtgcgcccggcgaggacagagtccagaatgtggcagcggagagtacctgaccgacctacaaggccccagtggctgcaagaggccgcggtccaccgctccctttccgcccaccgggaggctgcaaaggaagggccaaggccagcgagttacctgagcggcttcttggagagcgggcacaccaggaactccagcagcgccggatcgaagtcgcggggcggctcctcagtcttcttgccccggtcggccaaaggccgcgaccccgacgcgtgcaggcacctacgggcgaccgcggacggcggcgcgcgcgttccccgcagcgctgaggcgagcctgcagcgtgctccactcagcatggtctggcagccggagaccaggcctcaccgcagcctcgccacccgtggccgagctcccggcttcccgttcgtccaggccagccgggcaggccccgccccctggtcctccaggaaacgctgccgaggagtaggcggggcgggcgctttggttccgagggtgcttctgctccgactgcttttcccacgggcgtcatctatagtccggaggacagccccagggcagaggcctctggtgagtgccccgccgccttaccagactacaaactaaaccagtgtttaagtcaaggtgtctgggttttcaccggggcctgtccaaggatgctaggaagccagtggccaggcctcagagttgtagggagttaggcttggacctacgtggttacctccaagtgaagtttcaaacacactgttatgtattgtaccgaatgtattgtcatggatgtattgaaagcgctcatttgtttcatgtacatctttactataccattagtttctgtaaccttgtttggcttttttctctctcattaaaaaaagtgagaacctggaaggaagggcctaggcctctgaccctccaaaatatataaattcttcctgcctgagacccagtcattgtgaagtatttgcgtaataaagcacagctaatttacttctataaatgagcttggaggccgcaaggggcctaaatagctgtgtaacaggcagatgtgatctgcctgttaaagatccattcaatgagtgggtgatccattcagtgaatttgtatcccaggtttgcttcccactctccaagaaagtgaccatgttagatctctttcttacagtgtagtagatgggaacttgggctctggggcctgacagcttggttccctgtccacaattagtagctggatgactttggcaaatgacttaactgctcattttccttatctgtataagactaataattgtacctaccttgtaggtagggcataaatgtgattgtgcattcgaagaacatttagaaaagtgcctggcacaaattaatgctccattaatgttgtctatttttatttttagttcatctagtttttccatgtccgaagactcaaagattctcattagtcatccattttttccctccgttctgctgaatatcaacctgaactttttttttgcatcactgggcattatcatttcacactttgagttcctggagctggaagtacagaatccaaaaatatgtttatattttcaaatttctcttccactccaatgtaaaaataaactgacaaatgtttatatgttcatcctaattttttgtttgttttttgggccatcctgttttttttaaaaaaaacagtttattttttgatgttctttgttcactaatgctcagaagattttctaaggttaatgtagtttataggataccaaaaaggaaacacttctactggatagatatttaagagataatgaaagtctctggttgcctcaccttccttccctcacaaagcaatctttcacagtcataactttccgttattagagttactaacggactagagaatagggcagttatcgggacataccctcaagggaaactactgtaaagttcctatgtcaccttcacactatttccgactagggcagtagcaggaattaatttttcagttgaagtcagttgatactttgggctcaagggaaggggtgagctgtaggaaagataagtttctgcttaaggagaaacagcgcttgacttctgcaagcgctgagtgggcccaacccttggcgcttgttgggtaggggaaggcacccatgcttaagcctcagctagcttggctgacagatctctatcaactgggttttctaaccagttataaataaattagtttcagtttgcctccacatagagggtttgaggcagttcagtttactttatttaggggaagaatagagagtaacagcaaagtattgaaaacatcctcaaatttataacaccagaaatcaacaaccaatatttaaggaacatatgaatgtatgactatcaccatgtgtgtattaagttgcaacatatcaaagcaatatgtccctaaatagcccttagtaatgaagaaatacaattca

SEQ ID NO: 317219 - DNA, 4001 bp, Homo sapiens
ctacttggcctgtacctccacaacatcctccccccatccctcccagactccgtgctggctcctacccggactcgggcttccgtaaggttggtccacacagcgatttcttcgcgtgtggacatgtccgggtagcggttcctctggaaagtggcctccagctcctggagctgctggctggtaaagtgagtccgctgccgcctttgccgcttcttcttagacgggtcctcggcgcccacgtcctcattcttcccctgctggcttttatctttctctgaaaacgaaacacacacactttcccgtcagcatgcccacctgcaacgcggacgccaactggaccggcggcagaagccgtggaagagctgggctgcctggcgccggaggagggtgcgcgcggcggctccgggccgcgaggagcgctgcgcctgtggggtgtgcaggcgcaagtgtgggtgtccgcgccccatttcctcccctcccccagcgccgcacgttttatttacatgtttatctcactgcagcggcacattcacttttatagcctgtgctttcaagtatatttatacacctctgcgcagacacaccaaatctcctgggacgcgcacacgcgcgtggtttacagacccccctccccctcgcagaaagctcagatttccatgcggtttgggaaggctaggaaaagatgtggggattcggttgggcaccgaagttcgccggccctttcccaaaaaaaaaaaaaaaatgcctcttcgcgaagggcatttctgagtggtttcaggcaatttcctaacgagtggagctcctcgggagctgaaagccgagaggaaaacagggacagaggtcggcggcctctgaaggtcctcgaatcaagatgctgggatttttgtgacccaggaaacagaagggaggccagggtacgaatagagagggcggcagaattgctcgcgcccttagcgccccaggagccgggccggtcgagggagaactaaagggatgcggggtagtcaaaattccggctcccggaagttctgcggggagccaggcgaacgaccactcccaccacgcctccccccggaggggctgacttccttggggcgagagggagcgggtggcgcagagcagctgagcgggaatgtctgcagggcggcgcggcgccttacctgcggcctccgggctggaggtgtcggagatggtgtgcacctccagcctgtgcttggaggagtccagcgaccggggctgaccgggagccagaaccgaagccatggctaacggctggggatggtgacaggaagatgaggagacggccgacagcttggtccccgctgctcggtgctccaagtgaagcgggcctttcatgcagttcatggacgagggagcgcgacgctctactagtccttggctactgccccgccgagcccccgtagccgccgctgcccgctccgggtcgcgctctaggcgcggagtttccccgctgcggggagagccaggggacgcaacccccgccgagttctcaagccaagctgcccccgtctcctccggaaggctcaagcgaaaaagtccggagacggaaagtcagcgggcaaacgaagacatgggatgtgggcagaagggcaccactcagagcgtctttagggagcaggcttccaagctccaaagcgaaacaagagtgggcaaagacccccttcttctctccctccctcccccaagaacccctccaataaggaaagctaacgccgaccgcgctctgcccgccccccccccacgcggcagccctgacagagaagtgtcaagagtgacagggacaggtaggtgatattagatcccctgcggcggcagcagccgctgcagccacgacgcggccctctgagcgcaccctccgcaacgcgcacacgcacacccctcgggcggtcgaacaggagccgggccttgccgcagctcagctccaggcacccaggcgagcgacggaccagatctgcggctccgcgcttccctgttggcctaacatcttaaaaccagaggcgggcttcctggtgccgagacgtcactccgccgcggccctccccagccctctccgcctccgcctcctcccagacccttctccgggtgcgactgacgtggctccgcaccaatcaggacgccccgagccgcggtggagggactgtcctgcctgcacctatcagcagtgcggggccgggctactgcctcgccgtgcgcactgggtctacacaggcaagctcccgggaattcagctcctgcccagcccaaggcgatccggcttttagtacgaacccaaaggtgaagagatgaggctaggagtcgaaggcttgggagaagagagtggaatggtcaagaagagaaaggtacaaggatcaacaagacacccactctttgtgtctcactacatccatttccaatcccccaccccatataaaaaggagacacgttacttaaaactagaaaatttgaaaaacagcaacaaatcacctctccgatcttaaattttccaaacagcctgtcaagtgaatgctgcgctaatctgaagaagctttaattgcaaagaagacagagccctgaaaaggcaggctaataaattagaaatcgagaagcaaatggacccgtcaaaagaaaattaccttgactttaaacgaacaactgtttggtggttcactctggatttatacaagaataaaaagtcgcctcagatcacgttctctgtgatgcttattagtccccagacagaaaacacacaatagaagagaaaccctaacccagcgttttcaaaatgctgaaagcttatccattctacttaacgttgattaagacacatatcctagatctttcaaattccttgtacactgtattaagctcgtcctaacccgagagagccacgctttaaattcgactctcttgtttactttattatcaatcagatttaaatccataaagcctgtagaatcaacaaccttgagctaattatatatgaaatatgccttaatgaatttccatacaattaagaatgttgccaaataaccaatttcaaggataatttttaacagtcattttcttttcccagtgagctcaaggctgtcttgagccattaaagtccaagcaggcagaaggggtgtgtgtgagctaagggcgaaaagcctagaactgcgctcaactagcaaaagcaaaaccttatttatataaaacaaaaaaaatcacctttggagacatcaactctttatagcactgtttccaagcaaatttaatttccaaagaaattaaagaaagaaatccaaacatattcaaaataatttttgaaagtccttttgtcccccagcataggtcagctggagaggacaaactaatctcctctgggtttctgcatgggcgattgttttactatggagttagtgttatcatctctgaatgtgtatttgtttgacattacagtcaatgatttgcaatgccagcatgaagtatctttaaaacactccctccttgtccttgttcacaagattgggaaacttattcgatgtggaacaaagtggatgaagcagactacaaatatatttgcaacttatgtgtctctcctttgccctgaccacccccaaaccctatctgcaactcctccccattttaaacttgcagtccaaagacgcacatgagaattgtttttcagtctttcttcaccagtatcatcccactttaagaataatttagctgcaagggaggaatttcttcatagtaagctttaaatcagcatttctgcttttaaccttttattccactttaccccattccacacatacagacacctgctcagagtaaaacacatcctcatgtgacaggtctgcattagctgaggctcatacatccagctatattaggtcctgcaatcttatcactaaattatacacattacactagcagcctgttggtaaagaaggttaaattaatttacattctgctcattatctggtgcttaaatgacgcattttatcccggagatttggcgg

SEQ ID NO: 317220 - DNA, 4001 bp, Homo sapiens
gaaggggagacactaaccttacgtatctgtgaatttcaaggatgttacatttttacataaacaactccagtgcggattctctggaatggggggagtaatacccccattctagaatattaaaacattttccccccaaagcgtatatcctttttatttcctcaaaattttgaactatgtctaaagataatagtcttccagtaaactggagcattggaccatttccttcaccctttcctaccgacattttgatgatctgattttaatgtgtggggggcacagggaattaaatacagcccataaaactaagcttagatgaaacagtgctggctaagtgggttcagataatttttaatgagaatctcaattacactcctccccccaatatgttgagacaagtgacagaaccgttagaatggtaatcaaattggaaagctcagggagaacaacaatttcgtgatcaaattggggcaaaaccgtggacaaatgtggggtgacctccgccaactccctgtcacccaagagtcaggatttgggaaaggtacagtattatttcagagcccgctgtgacgggctgtgtgctaccatttactttcttcactctggattatgatctcaaccctggcaagcaatttccccagctccttatctgacaacaagcgagtatgtaaataccaatggctagcgatgtttaactgcctcaaacattattgatttgttggctgttctaaattgtcttcctagtccaggtcttgtttccgaattgtctattctagaggtttgatccatgcctccgatgctacaatacaataattgtttttttaaaaaaggcatttaagatgaaccaattgatttgcatataaattaaaattactatgcgttgccgattccggtgttttataatcatttcgaaattagtacttaaccacttgagctaaaagaatatataaatgcctgtattgactcactaatgaattacccaattaaaacgtccgggcaatgctgggcgctggaaagattgttaaatcaagacatattacaggagggatatgaagattagaaaggtaacagaccaatatctcgcactcaaaacggagtttccggtgattcccagctttaattttggagcaggggtctttctcctctgctgttaaaaagattttgtgcttgtttgtgagtgagtgcattcaagtggaaggaacgctcccacggctacggtggctcaggccctttgctcggaccgggaccttacagttctaacccaggagcgttaaactctggaagactccgggccagccctggaggtgcgtggccccgcaagtcgccaggccaagcttgctttttctgtctgcccctccggcaggctgggcgcgctatggcagtgagctttccgcgcaaacggagagctggaaccaaagctgacatttaatagatatgctaactgagcacttaccttcgtcctgagaataggaataaaaggtagctcttcttaagagaggcggtgcaaaggcacgctataggagttcagaaaaggctggcggcgggaaatctgtagcctgggggctagtcaacatcccctttcatttcaagcacttattgatttgctgttgtcatctttggcgacgcagaaggacacttgaaagaatttctgatggggctctgatctgagaaaggaggtgacctgcccaggctcccaccaaattcttaattaccacatcaactgcttttttttatcccccacccgacctccttccttttgcttattcttaactttttaattattcagaaactcccttacctctcagtggcttcccttctgcagcagttttctattcgaaccttttccccgcctttccgtggtagggcctgtatattgatccctctgacctttggcacatctgggccctctgaaatctctcaatcttttcagatttgaggatggcaggctccaccctctccactgtgtgcacacactcagagatatgaaaacttacacagactgccttcaaacccagggtatctaacagatgttccctttccagttcgtctcttgatctgaaatgcctgcctgattccaacttggataccactctttcttgcccttcctttttcaaagcagtttggacatgtgtgcaagtgagcccagaacagctccacccatattctttaccaaactgtaaataaaagaagaactaatgaagtagattggcatatagattgcatcaagagcccgaatccccagtttctggattccccattcaactctggctgtcatctacattgacagagtcattctaagcagaggcccagagaaacctgcattgtgggacaacaggtaaagccacagtaaaaagtggaataattttaaagtcattttattagaatgtaaattgtatttctgggttttgttcgtaaccacctagttttaatatatacagagttagacaggaaaaaataggtcaacacagttattggtactagagaagacaaattccatgggctcctcagtgaaaagaagatccccaaagtctataatttttgatcatttaatttcatttataattgtgggaatgaataagacaccaactgctttatgtatttcatttacatcaaccaatttgtgtttccatcaaaagcagttatacagaatttcttttaacttctggtagcaagttcagaaaatgaagcttacagccaccctgaactggatacatctcttgagctgaccatttctgtaagtgcaggaatataatattgttcttctatggtctttttgcactcttttagggtttgcaagtccttatcaggtctgacatcactgtttgggtctacattcattacaagcaaatttgattactatgctgattttaaaacagcctatttggccagcataatcttagttttcaaattataaaaaccttttaatatacgaagttcccagtttttacctcctctagctccttgctcattcaaaacttctattttaattggtgtaagtaataataatttgtattactatttgtactccttttacttttttggagattgggctggattccagagagaacaccagcatcaccaccaccacaaacaacaaaatctaaaagtaaagcccttatttgcatgataattggtacttggaatgcttctgacttactcaatgccaccttataaaggtaccttgtaaactttcttggaatttctagcaagagcttgtagtaactggaacaactctctgggaagatatcctctttgatgggctttcagtttctggaggaatagattgagagcaattagggagggaggggacattggaaattggcagctacgtcagctgaaacaagcctgggttcagtaaggtgactgatgttgtggttgattccctaccccgagtttctctttaattggggcactgactcttcccactttgggatcccaaggcactcggtgtgtatgcagattcctcccttgtggtcttcaccatgtggtttcgtagcaggtctctggttcaatgatattttatagtcatagccctcatattcattatcatgatctcaatgtttaggcttttagtgtatttatattaaacctgctttattagtaagctggagcacacaggagagatgggggcaagtaaggactcagcagagctcaaattcagacatgtttaaatggctttgactgtgtaaagtgtggcaatgcttcctgctgccctagctttccactctaagcttcacatgtcctctggctaatgaagtgtgatataggccacatgctaggaataatagtatttgttgagaacaaagtgaactcaggaaacctggtatacacaaaatgcatctagtcatttgaattagtaataatggtaaaaactaatatttacagagtgcttagttaatttagctattgtactaaacacttttgtattgacaatcacacttattccttatgccaacactacaaggtaggtactgtcattttacaaatgaagacagtgaggtttg

SEQ ID NO: 317221 - DNA, 4001 bp, Homo sapiens
atctccataaacgaagtaccaaaatgtttacatttatatttctgaagcgctaataacatgacaaatacatgctgcacattttatgtcttaactcacttaattctcccaaagagtcaagtcctaagcgttatgatcatctctttaaaaaaaaaaaaaatccaaaaattgggtatcagagaggataagtaacttgctcaaggtcgtacagctaatgagtggtggaactgggatttcagtgtaggcctgacctggttttaatcacactgctgtaacaacacctggattgtttttgtgcaagactttcaaaactgacagaaggagaagaacaagaaaaactcaactgagaatggaaactcttaaaaatatagattaaaataatttggagggtaaaagcaaatgaaatactttcccaaggatacctctgacaaaatttgtaaaaagagaatttcctctggtactagaaaattcatgtcctcttactgggcactggcaaatttgaaaattcctcttctgccttttgtagagctgggcgcactgggctcagacacatttatcagctgctatctggtgacttcatcattttggtggaatttcaaagaacattaatttagttatttaaaaacatacttcaaatttttttaaaacaatgtaatctttcctttgcaactgtttttagaaaaatgtctagaattagaaacggccaaataacttcacgatattattttattctatttgtggtgttcttaacagctcccactcctcaaaacaaccacacacatcaccaaaaaaatgcaccaatgacaatctgccacactcctcccacaacttgacattatatgcactgtactgctacccttttcagcccgggacaatggagtgtccaggcaagaaggaaaccacgggtgactataacattttcctttagattttgtgacattggcaaatatgcagttgcaactaccatcagttacacaagtaatgttcattttttcctctacaagaaaaaaaaaaacaaaacccagatgtactctttcactctaattaggctttcactaattttcagtaaaaaagactatggtgacatatcctgaagaaggaggtatccaataaatatgcaccaacaaaagagcagtggaattccgcgctgggtaccggaaatagggcagcactagcggaggtggggaatgcgcttccaagggaggcggaacgcagaggggatgcgagatggagcccggggagctgccgcagcgggcgatggccccggccggcgccggccgttctggttcgtgcatctgccgctgcgggtcgcgcgctcttacctcgcagcccgcgaaccagcctctccgcccaggccactcggggcggctgcccttccagggggaggtggcgatgcagcgggtccccgccgccgactgggctggggcacggcgggccctggtcctctcgccggcgccgcctcccgctcgggtggcccgcgccgtggtagcccccaagcccccggctccgcgcgcccacggagctcacggccgaggaggcggccgacctccggctgcccgggcgccactctacgtccatctccaccaccattccgccttcttccccttccacctcctcctcctcctcctcggcctcgaagccggggttatcgcggctccacgcctgccgggagcacgacgagagcggaggagaaggggaggccgcggctccggccggggggtcccgcgcggccgcctgccggatgcgctgcatctcgatctccaggccccgctgctcgcagaggccgcccggggcggcgaggctggcgcccacggccgcgcagccagccatcagccggcccgggtccggcgcgcggggcgcgggcggccgcttggcgtccccgggctgctgaggctgcacgcgactggagttcaccatcgcggtcactggcgtccggcgcgcgggtgcgcggcgccgcgctcggcgctgtgcgcctcaggagccatgttcctttcttcccggcgcccgccgccgcctgctccccgcccccgacctccccgcggtcccgcgtcctctcgcccgcccctttggcccgcctccctctggcctcgccccgcctcgcccatccgccgcggcgcgctgagcggggaggtgcgagggagccgcccccgcggtctgcgcgctcgcccggcggctcccgagtccgcgttccaagtggaaccggagcccgggcgcgggcgcccacgttccattcccgggaaggcctgggaagggagggaatcgctcacccgccagcccgcctgcagggaaagggctcctggagctgtcgatgcctgcccgacgctgagataactcttgggtcccagttatccaccagccacttctgcctcgattcaccaaagggcagggaaagaaccttttggtgagatggtgtgaattagcgacatccagcctgagctgaagtctccagcgggtcaaagaaatctttccatttgcaaactaccaaggctgacttgctgtgcatttggcgggcctcctgcccctgattctgctggtttggagatgctttctcgctctttggttggcttctgtctccacacattgtggggatcccagggattcgtcataggactctcggatcgctggtgcctccactgtgatctccggtctccctgcggccagcactgacttctagcaacagaatcctgcatgagggcctaggcacagaactttatttccactcttctgaacacatctaatgtgatgctctgcaattgtctgaaatttatcctaccctaagtcattatcttgtccccttctctggaacctgcttcacttcccgtatcccaaggtgaggtttggggcttcgctgtcctcctcacttcccaggccactcttcttcatggaagcctcgcggtttaccctccaccgcctacaccttatcttcttgttacttttgccccacagatatcaccctgatatgatctctgtttctcactcctgctggcttgatcttatgtcttgcattattccgcattagaacaattgatccctgtcaactcccatctctattctccacgtcggtgtcctcactatttccaggttatattgcagaaccaaagctgcttatttgtcacgttgatgcttagacacctctgtgggcttctggcagctgaaaggataaaatttaatttctgtggtttggtttagtaaattctcataatctgctcctgtatttgtttgttagggctgccataacaaagtaccagagactgggtggcttaacagaaatttatttgctcaccttgtctctacaaaaaatacaaaaattagccaggctttgcggtgtgtgcctttggtcccagctattagggacgctgaggtgggaggatcgcttgagcccgggaggcagaggatgtagtgagccaagatcgggccactgcactccaagtgacagagtgagactctgtctcataaagaaagaaagagagagagagaagaaagaaaaaaagaaggaaggaaggaaaaagaaaagaaaaattgtattttctcacgaggtgttggcagagttggtttcttctgaggcctctctccttggcttgcagatggccccgcttttgtgtcctcacgccgtcttccctcttccctctgtatgcgtctgtgtcctaattgtctattcttatacatcatattggattagggcctaccctcatgaccttgttttcacttcattacttctgtaaagaccctgtctccaagtatggtcatgttctgaggtaatgggggttaggacttcaacacagaaatttttggggggacacaatttagctttaacagctcttaatgtactcctctagcatggcatcccatgccatccatccaccttaatgaattattcatttgttctctaggcacatataacatgctgctaatatttaggtaattatggctacctattacctgatcctgcagtttattaatttagatattcatgttcttctcttaactgtgagcttctcaaaggc

SEQ ID NO: 317222 - DNA, 4001 bp, Homo sapiens
cattccctccccttaccacgtgcagatttcttctcaaatattctttcatcagtgaggcctttgctgaacaacccatttagaagagtaaattgcctccaacatggcccctcgtctgccctgatcagactccacacttcccctaattttacttatttactagtttactgcccatctctccctcaccagaactcaagctccacggacagagatttttgtctgttttattaactgctgaatctcaaattagaacaacatctgaagcacagttgggactcaaatatttgtataatgaataggaatgactaagtaaaactgtaacatttgctttaggaaaggcaactatttgatccttaaattatgcacttaatcctccgaacaagttctacaagaataaaaacatcttcatgaagcatacgtttaggtggtaacgtttaggcacaaatttaagaagcaatgcaacatgtctcagcacctgttcagcgctttaaagtatacaagatacagttcatcctttacttctattaacataaaactagaaattatcttgaaaattgcaggcagcatgtggcatcataggtttacatgataccagttccttttaagttcacctatacaatcaggttccaacaatgaagtcactggatccccgattattttccgctgccagcataatgagactctaaccttggctaatcttattggaaacatgatctcccaactgctctcttaacattttcaatttccaaacaaaagtccaatatttttctgacctattaaaatatttaagcactcaaaaatgtgctacaaaagaactatctctgcctgaaatactgagttgattagtactcataccgccaccaaacaaattctcaggttcaaagagaaagttcaaaaaatattaaaagagtaaatgaagataactgtattaacgttaaccaacaatgaggaggaggcgggtcactgatatctaaggaaagaagagttatcggaaccctttctcaacactcgagtacaccaaaagtctgtacaaaggtcgcaagttattgtctatgggtttgcagaaaaaaaaccatttaatatcaattatagagaaagttaatacggcatggtttttaaattctcagtttgcttcgcatgttcatccaatttacagaagcaaaaatgagctaaaaccagtctgttccactctattcccatgattcctacgtcagtaagttcttcggcaacttggtgcaattgagggggggaaaaggtaattcagaagcaatgcaaatgggacggggggtacacctctccgttagaatgtgacctctcacattctaacaatagtggtgcgaacttgtacccagcttgctcaatcactagaacggcaagattctagcagtggttaagtttttccacagccgaaggacaccgtcaaggtctgccttgcatctgtcactcacacctccaggatctccgtcaccccaatcccccgaaagcacgagccctcgctgggcccgggtgccccctcaccgtcactgcatttatactggcagagaccgtcctcgcctcccaggaggtccaaggcggcgttcaggtacgtgtctatcttatgaacgccgttccggatggtcttcagggtggctctccagtcggtggtctgggcctgctcctggcacctgacaacagcggccatgaggaggagcaggagggtgagcgcggggcgcgagagcagggccatgcgcgcagcgccgggctctacgggtccccgagccgcggcgcggggcgcgtccccacagagtccccaggacgcgctaggcagcggcgcgggccccggacttggcagcagccagctccatatccacgcctccttcccggctggccctcaggatctcgctgtctttacgtgaaccgcctcgggcaggcagcgccgtcgcggggacgcgcccgctcacctggaccagcgcgcccgctcacctgggccagcaaccgtcccctgtgcgcctgcgccggagcacggcgcgtcagcggcgcacgggaggggcgggacgcgcaggggtggggcggggcgggggcggggttggggggggcggggaaccgggggaggggcgcgcggggcgggaaacgggggcggggcctccatgcccacgtggtctccgcggcaccctcccaagacccttggtcctggttcacaagagaaccttaaaaagtacccaggcctgagccccttttctagggagcctgattacgttgtcccaggtggcagtgggcgtcggtattttttaagaaagctctccgggctgttaaccgtgaagcaagagttgcagagctaaccccggtggcctaacctgaccagtcggggctcagcacagtagccccgagagacaagcttttctgggtgtggacaacatcggagaaaataacccctgtgccccctcgcagagagcgctgcgagaggtccagctgagtttccggcttgaagacgtggttccattggcaatgtgggcagagtccggctgtcagctcgcagagcagggcttttcctccttgcgtcctctcccggtcctccagatctgctgtggccgcggttgggggagcgggatctggaagatgccaacccatgccttggcggtgcctgactctaatcaggacgagctaaatgctagtttagactttccggaaaaagaaaatgggccaacataaaaatcataaaattctcccctggtaaggaagaaacagtagtgtaaacttaaatacagtaaaaagtaaaataaatcttaaggaagtcattgtttttctactcaagggattttgtaacttgatagttacagtgacgtttgtttctctgtacctaccaccctgcccccagcattgtgcgggatccataaataactattgcagtagtactttgtatcagttgtaaatatctggttatcttagtatcacagcagtttccaagaattttacagtaagatccagagcaatgttgaaagtattgggcagaccaagcgcggtggtttacgcctgtaatcccagcaccttgggaggcctggaactcctgaggtcagaagttcgagaccagcctggctgacatggtgaaaccccatctctaccaaaaatacagaaaattagctgggcgtggtggcgggcacctgtaatcccagctactcgggaggcggaggcaggagaatcacttgaacccaggaggtggatggatgttgcagtgagctgagattgcaccactgcactccagcttggggcacagagcgagactctaaaaaaaaaagaaagtgagtaagtattgggcataggtgtgtcctttctataagaattaccaataagttctaggtttggccttttgtgtttgttacaaactaaatgagcttataataaacgttcagtgcacagttcataaaaattacatccctctttattgagtgcttactatgtgccaggcacttcatgaatatgatcgctcacattcagaacactactttacaaggatgcagactttgggcaagttagaaacatagaaaggcattcctccctacaaacagggtagcccaacaaacggtgtagctcctggctggagactgcctgcacttcactcagcccctcaaccaggagtcttgggcagtgattaattcctaccacaatggagaagggggaagaatgttccctggaaggtattattatcttcctcttttacaataaaagagtcgaggtgagaagtcatgtgacagtatctactccaaaccaaggcctctgtcttcacaaaataccacagatatttttattttttaatttttagacaacacatttcaatacattttaaaaagggaacttagaatcattgtcttagctttctggaacattggtttctcagctccaaagtatgaaagttggactagattacctctgagataccaccacctgaatccttaaaccaggcttggttcttacaactccctagtccagggacaagactttcaaaagaaaggatagaatgtaataaaata

SEQ ID NO: 317223 - DNA, 4001 bp, Homo sapiens
gttgcaacaaatgtaaaacagaaacaaatgtaaaattgttgcttgttcaaacaaccacaattctctttgcttcagccatgaagtctttagccttagccattcaaggtaaaaggtcagcaataagtggagagaaaacgtccttgaaaatctagagttcctaggaccttaggtaccagcttgtctccttagttcagtggtcctcaaagcttactattagtaaaaccacttggactgctctttaacgtgtagatttctagacactgctcagagattgtgacttagatagaatgagctagggttgaggaatctgtacaatgtagaattctacacactgttcagagattgtggtttagatagaatgagctagggtctaaaagtctgtaacgtgcacccgcagggctgctgcccttatgccataggcttttgtcctatgaactagaaaaacgtggcccttctcacagacacggcttggtgagcacgtagctgcttcggtgagaattcgaaaaacggtacaccttcctccatgcgatgaagcccatgctagaccctctcgcattcccgggagcacattccaaactagctcctctcccttcaggtgcgggcctgtgcagtatcctgggcacttcacaagattctaatgccagtggccttgcagagcacattttgtaacccacgaccagtggccttatttttcttctgttactaataactacagatccaatttaattcagcaaatattttattgagtgccagggtgtgtaaacgtgttgggctggatttggtaagggctaaggagatgcctgaggtttcctatctgtggccagcagttctgcccgttgtggtgtgaccacacagctgttttgttccatgccatctttaaccccacaggagcagagagagtgattaaaaaaaagttggcaggggccaccttggaaaatgcaggaaaaatgggggcaggaggtagtgaaatgggaatcttggtgggcaagctttggagaatgagactagaatacctttctttaggaagttctgtggaatggtctcaatgtcaggaaatcttgcagtatttggctcatattttaaacaccttaattttatctattagttaagaatcaatcttgtatttgtctctcctttctatgagcacttcactcctgaggacagcccactatcttaataaaatacattaatattaatataatacatgatattaattatagtaatattaatacatattattaatattgattaatccagatactagacatattattgagatttttctcttctactgtttattgatgttaaatttcatttttttgctttgattgaaacatttccatttcataatctctccatctctctttatacatataaatgaagcaccagaatttaattttgaagaattctagtctgtttttcttactttcatagtgagaattcaagaattcttataattcattagctaaatctacaaaattccatatcttgtttctaaatactttgaatggataaaatagaatatttgtaaagcagaaagaaattagaccggcataagtcaacatgcatacatattgaaataaagagtgaaattaatgatcatgttactaaatacaatgtataatatgtgtttgctgcagaaagcagcaattgatgaggattcaaggctgggatcttacactactttgaaaagcctggcatttggcaaaatgcttagcaagaaattgttgaatttgactaaatgtataaatttaaagcaattagataagaaaaccttagtcttttagctgaaactcaaaatataacatgctaagaaaaaaacaagaaaatcaaataacttttaaagaaagctttttttttttgaatgctaagtttttaaaacaagttcttacttgtaaagtacttacaattagtaaacaaggttccgagcaggaaatgtcttgtggcctgggagagaatctcaccacaaatgaaaactacgtgaaaggggagaggtaactgtgtttctatcgcagggcatagtacatagaacagtttcagacgctcttattggccagagtaatccagcagaagtggtttcaatgtgtgtttctcttatctggagaatgaatatatctcttgccaaataaggtgtgtttcttttcctatattgtgttaggtacactgatacgtctttttaatggggaaaggatttaattcattatatagtttgattggttttacatgtctggcagagcttactgttgtttttttgtgtttgttttttgttatctttgtggggaaaaaaaagatcattattgtttcagattatatagtagttggcatctcaagcatcctttaatggtatcaacttacagatactgaacattaaaataggccaagcattatcaatgacttgttaatgactttgatagttaggccttattttttcaattttagaggtgaggaaacaagctcagattcttgagctgactttcagaggccacatagctaacaagttactcacctaggattttagctcatgtcagctcagctccaaactatggctctttttacaatgttgcatccaatttctttgtacctttttaattattcttcttattggtggtattactatttctttcttttgaaatttttattcatagtctttgaatttctgatcccatagtttaaactatcaaaagacaaaattacaacaaatttagtttagaagatgtaattgccttttatttgcaattctagaatcaagcaacacatcattctataaaatagaatgagtgtcctggtgagtatgaagaaagcggaaacagagaaaaaaagatagattggttgtttcaaagttactttccttataggactaaaacagagaggacttccttactacactgactgaggttgactgaaatctcctgttttttggaaaactggtccatttcaaagttcagtttgattatatgtcacttagcacaagcgacttcattctggtttggtctgattttctggggcctagagcaggaggctagtccataacaatggcctctcataaactttgtttaacaaaacctttcagaaatgagggtgggccggcacagtgggaggcccaggcggaggactgcttaaggtcagagttcaagacaagcctggccaacacagtgagaccttgtctctaaaaaaaaacaaaaacaaaaacaaaaaattaaaaaattagccagacatggtggtaagtgcccgtaggcttgtagtccccgctacttggaaggctgaggcaggaggattgcctgagcccaagaatttgaggttacagtgagctgtgttgtgtcaccacactccagccggagtgacagcaagaccgtgtctctaaaaaaaaaaaaaaattaagaaatgagagtggccagctttcctgtcattcactctgaagtttttgcggatgggaaatctttcccactagaacaaggctattgtgtgaggttgtacagtgagaatgtgtggcattatggcagactctaagtgcttagagtcccttttcagtcccaattcctagctgccatctgctagccacttaacatttctatgcctcaggttccttgtcaaatgagcgtaataattgcacctaccccacaggattgtagggaaaattcaaaaaattaatacatgcaaaacatttaaaacagtgcctaacacataatcaatattaggggaaacaaagaaacaaagaaatctgaagaaggagaaagaaaaagagacatgtggaattccagatagcctattttcttccaaatactatgtataaactccacaataaaaagatggcaacatggccaggtgtggtaactcacacctgtaatcccagcactttgggaggccaaggcgggaggatcacttgagcccaggagtttgagaccagcctgtgcaacatagtgagatctcatctccttttttcaaataaataaataaaataaaaaattaaaaaattgaaaaatcaaaaagatgtcaacaaatat

SEQ ID NO: 317224 - DNA, 4001 bp, Homo sapiens
ggggccggaccgggaccgactccaggttgggtcacaacgaccaccggcgcctgagcttgcattttcagtgcagggccttaaaagcagtggactgaaaaggcagagtggtgttagaaatctctgttgtggggtggggggaggggagagggatagcattaggagatatacctaatgtaaatgacgagttaatgggtgcagcacaccaacatggcacatgtatacatatgtaacaaacctgcacgttgtgcacatgtaccctagaacttaaagtataataaaatatatatatatatataaaagaaatctcgaggttgctctttaaaggcccactttaggggcaggatgctgaggcagtgtagaggaagttgctctgtttgaagaacagaatttctatctccacccttcacaagatagagaccctgggggtgaggggaaggaattcaccgaactgggccgggcgcggtgactcaggtctgtaatcccggcactttgggaggccgaggccgacggatcatttgaggtcaggaattcgagaccagcctggccagtatggcgaaaccccgcctctactaaaaatgcaaaaaattagccaggcttggtggcgcgtgcctgtaactccagctactcgggaggccgaggcaggagaatcgcttgaaccgggaaggtggaggttgcattaagccgaggtcatacttctgcaccccagcctgggcgacagagtgagactccacctcaacaaaaccccccaaaacaaaaaccacagaattcacggaactgggaaggtgaacagttgcttctcgtggggtaagggagctgaagagtgttgctcgtgtactgtttttagacaggtacctggtattcacacaggctgcgaaacaaacgagcaacctgtgatcatggccgacagtagtgaattatagaaaatagcattctctaaaatggcatcatcctaaacttttgtgtatatccccccttcttgttcctaatttattcttttttgttttggactgatttccgatgagcaatcctttccagtcttcccacttcctgacttgtccttcacttcatatttactgggagcctgcaaacctgtgtcagcgctggcctgacggaccctgctgtgtggtaggggcagtttattaagaagtacatttggtaaggttactcctcatttctctacatcatgagaggcagtgtagggtcatggaacatgaattagattcggagtgagagcagctttgcccaagtcttagtttctgaaaccgtgatcttagactcatcatttaactagccgtttaaatgtccacttgttaaactgtaaaatggggtttctgacctacccaccttacaggctcattctaaagaatttgtctttaaataaaaataccatgaactgtattcagaacagctgaagcttattttaaatgtattagacgtgtccttctatagacattaaagtggttttggcttctgtttgatttttttaaaaatgtaccataatagccgttcactgcttttttacactaaaagaaggaggcggacccatctgtggatcccacagcaaacaagattttctgcaaaagaaggttccagtaagtgaacaaaaaaccagggggtccggctgagccgatcattcagggcgtgcatgagccgcggatgtgtacgtggcggtggaggagcccctgttgaggggcagagccgtcgggtgacggactaggcgaacgtgtgtctggcggccgctgccttcgggcctcttccagggaggaggatcgaggaggcggagagcccgcctggctcttccccagttgcagggacaggtctgaagcacgggcttcaggaggcggggagtgggtgggtgggcttcttaccttctctgcccgctctgcactcgggaaggggctgtgagcggcagctgcgcgcggggctcttcgatcaaccctcaccccgccggattacgcctcccgccagcccagctctgggacccctgggtctcctctgctgggaccagacctgcctgccggtaaattcttaagagcagcccgcgcagaatctatcccaaggagaccgcccatttttgctggggcaatcagggaactgcgtctgcggatggctgccctcgggggaccattcgccggggcggcgcgccgctggggactcggcgtgaaccgggcagcgggcgcgcggtctcggagcccagccccagcggcaggcgccaggagccgcaaagctgggcagggctggcgccgcttcctcccgggcacccgccgctctgtcgctccgggcgcccaggctcaccgggcatttctaaattgtaaaaagtttttatcagatggtatgggctgagcaacgctgggattggaaagtaagacaagaaactatcacccaccccctcccccgcccgctgatttgaatgcttattagatggaccctggattctagtcttggggtacacgcccacgtgtaagagtaagcaaccacagctctctagacacactcatgccgccaatctcatgaaataagaggtaaggaccttgcaatgattccgttttcgtcactcaccccttttacaataattagcttggctttgggaaaagtaagtcccaaatccccaacactgagggtaagctccacaaaggcaggggattttgtgggccaagttcactgaggtgtctcaaaaccttagctcgggacctggtacacaggaggagctcactagcgcccccgccaccacgctctccgcttccgggctggctgaggccatgcgtgatgcaggctccagatggtgcatagcaaacagtggcgagagcccagccctggaaacgcaaacaaggctaatgtttcacctgactctgcagacctccacaggtggggaccagatcttccctaaatcccaactccagtactaacatggtcgaaaccatatttttgggtgatggcttcccacatttgaaatcctggaggaagaagcattacaggaaatgctagagaatatgtattcaaatttcttctgcatttcatcttggttatcaaataccagaaaaaatatgaaaggctaattatccgtaatgtcaagtggctatccctaggtgattggctgatagactttttgttgttgttgttttgtgataaggtctctttgttgtccaggcaggagtgcaatgaatggcacgatcataattcactgcagcctggaactcctgagctcaagtgatccccccacctcagcctcctgagtagccgagattacaggtgcacaccaccatgcctggctaatttgttttcgttttctgtagagatgggggtctcactatgttgcccaggctgaccttgagctcctggcctcaagtgatcttcctgccttggcctcccaaaacactggaattacaggtgtaagccaccacccatggccgataattttttttataattagcatttatttcttttataagcaaaacaagaaatatccttttcagaaacaaaaagcaaatccagtgactagaaaaaaaattttaaggggtcataccaggccaggcacggtggctaacgcctgtaatcctagcactttgggaggccaaggcaggtggatcctcggtgacagagcgagactcttatctccaaaaaaaaaataaaaaaataaaaaaaaaggagggggcaagtcatacaaatgatactatagctgtttgtatttttttccctcttggcccttagccaatgcttggcatgaaactggtattcaataaataaagatgatcctacaactctttcagaggaaaaacatgttcatttaacacccttattttttcaagaagcctatattctgttttttaatataataacagcaatctgaagatttcagaataaaaaccaccctgcaattatgtaattgtttttcctttacctgactgtatttacttagtgtatggcatatgtgtttttgtattcaaattggctaatgttagacttcatagcagtttgagtcctgaacattttctgagtgcctt

SEQ ID NO: 317225 - DNA, 4001 bp, Homo sapiens
tgcagcctcaacctcccaggcacaatctatcctcccacctcagcctcctgagtagctgggaccacaggcacatgccaccacgcttggctaatttttttttttgagatgggaatttagctcttgttgcctgggctggagtgcaatggcgcgatctcagctcaccacaacctctgcctcccgggttcaagcgattctcctgctcagccttcagagtagctgggattacaggtgtgcagcaccacacccggctaatttggtatttttagtagagatggggtttctccatgttggtcaggctggtcttgaactaccgacctcaggtgatccacccgcctcggcctcccaaagtgctgggattacaggcgtgagccaccgtgcccagcagcagctaatttttgtatttttggtagagaggaggtttcaccatgttgcacagttgttttcaaactcctgagctcaggtgatccacctgcctcagcctcccaaagcgttgagattacaggtgtgagccacccacccggctgacaaataattcttaatttgcttatgtttatgttactcctattaggctgacttctaacaatcaagaataatattttgtatgttacagggaaatacaaaattatacacagtgaactataaacaaattatttgttagttgatttctactcattactccaagtatggataattacaccacatacgaggtctactgaacattaatgaagataaaacttacttaagcaaggtcaaggctttcctaaaatatttttaagttcaacggctggacttggcactattgtcttctgcctatgtaaagtgttccttacactataatcaaaggaaaggctagtagacaaggagtttctgacatctctgatacctctctagttacttgcaaagtacaggagagaagttgattagtttattcttaccattttgattgcaacttccaaaccagtgtgaatggactcagctctgtagacaccagcaaatgatcctttaccaagcagatttccaactttaaaatccttaaaagttaaaattaaagattatgtgtgatgactcacagtagaaaggaagatgggaaggggctggaaaaagaagataaaatggatcgagtggggaatttgacaaaattcaagcgggtattacacctcgatgcagcaggtgtctagggtggaaggcatgttgactccgtgcggggatacctgcgcttccaggctggactggaagctcagggtgatggtgcaccctagtgatctggttcctcaacctcagtgcagcctaagcgccctcctcccatctccagccaatccccgggagcggagggctcggtcagaatcccgccgcagctcccgccggagataaccgccatccccttggagaagtgggaggtagccctgccctgctctaacgcggtagctcgggcgggattgctgaaagaaagccgcagtgcctcgggacactgccgggcggggagggactcacctgtcccgccttccctactcttgtctcttgaggggcgggccgctccgcccctaaacagcaggggtctgggccgttgggaccctccctaagcacctcggtgcccgccccgcagccgttagcttcgttcgctccccttcccacagcggtctcgtgtcctcccacaattactcccacccgccccgctgcagactgccgagtcttttcacctcgatcttctccccgatgcaggtcgccatatttccaggctctggcctgggttctccggattagcttccttcacgcagtcccttcgaggcagcgctccaagcagccagccggccttggcgcccatcaggctcggctctctaaaccgccgctccaggcgacgacgctgaaaccacggaaagttctccctgacaccttccgaggcctgggcggtgcctctgggctcccattttgaaaatctcccgccgcttgccgtccgagctaggctggtggtgacgtaacgagatggatcgctccggataggctgcgccggggcgcgcatgcgcggcagaccttcctttgcggccggcccagggttctagacttcggggccaagggccggaagcgctgcggagagtttagttcgggcgggaggctgtctcgggcccactctcggaagaacttctgcaagacgggtaaaagagcaggccttaaagatgggacacttatggctgatcggttacttcacggtccgaaataccacttctaattccggaaagggtttaaaactattttaaaatgtcaagcgtttaagacttgacggaacagggcaaaaaacattaccttcctttaaggaacaccgtttacaccactaccgcttattccgtagtttgttataactgtagttaatgtgtacggtaccttaagaaaacgaactccattctttattttggcaaactcctaagtatttaatattataatgtcatttgtataataatttacagttagatctctcatacacataatttgtatggatcaaaagagacctctgtaagtttgggatggtgttttgcaggtgagaaaagtgtgatgcttaaggaaggatatttaacaaacagaagtagcgcacaaacttagatcttctgttattaagtgaaagctcttttccttgatgttagtgtgtatttctttttctttttcttttttcttttgagatggagtctcgctctgtcgcccaggctggagtgcagtgactcgatctcggctcactgcagcctccatctcctgggttccagcgattctccttcctcagtctcccgggtagctgggatttacaggtacgcgccaccacgactggctaatttttgtatttttagtagagacggggtttcaccatgttggccaggctggtctcgaactcctgacctcaggtgatccgcctgcgtcggcttcccaaagtgctaggaatacaggcgtgagcctccatgcccggcccatttttttttttaaactttttagtttcaaataattttaagcttacagaaaagttgtaaaaataatagagaactcctgttgtcctttactcagattaaccaattcttaacattttgccacacttgtttttactattcttcatgtgtaatatacatgtataaatatataaataagcctattatttgtattttatgaatcattctaaaataggttacatacactatgctcttataccccttatttctaaagtgtgaatttcttaagaaccagggtatcctcttgtatgtttatcaaattaaggatatttagcattgatacaatatttatatttaatctaatctacagttcatattccgatttgtcaattgttccagtaatgtctttatttaacattttttccttccagtatagatctagtacaggatcacataccgtatttagttaccatatctttttaatttcctttaatatggaagagttcctcagcatttgtatttttgtgacattgagatttttgaagagtgcaggccaattatttatcattcgttcatttgttcattccagtattactgaggtatagttgacaaaaattgtatttattcaagttgtacagcatgatgatttcatatacattgtgaaatgattacaacaatcaaattaacacattgtcaccactcttaggagtgtgtgtgtgtgtgtgtgtgtgtgttaagggccagttattttacagaatcttccctactttgggtttgtctcgtgtttcctcatgattagattcaggttatgtattcctgattgtaatattacatacatgaggttatattctttccaagagaccacatttggaggcacgtgatattgtttgtctctcattagtgatgttaatttgatcccagtttctccactgtataaattgctggttttctacttgcaactaataagcaatctatgggggagacacttgaatttcctgcaaatattctgctcctcagcaaacccctctctcacaatttagcagtattattgatttttcctaaactagtctttactat

SEQ ID NO: 317226 - DNA, 4001 bp, Homo sapiens
aaatgttgacagactttcaaatataaactgcttaaaagtgaactttgaaaataaagtatactttaaaatagactgaagtccttttatacgtctttgtggtcaacctactgttatctgttttccccatgcacctagcagagtgctcggcagagagggtgcttggtaaaagtttgaccaattaattctaatatcctatctcaatttaaataatctaatagcacaactagcctaactattaagaaaaaaaaatcccaattcaggcaaattttagagcaaaacctccagttctttttctaagtggtttagataaatgattttttttttttaaaggcagggtctcactgtcacctaggctggagtgcagtggcatgatcacagttcactgcagcctcaacctcccaggcacaatctatcctcccacctcagcctcctgagtagctgggaccacaggcacatgccaccacgcttggctaatttttttttttgagatgggaatttagctcttgttgcctgggctggagtgcaatggcgcgatctcagctcaccacaacctctgcctcccgggttcaagcgattctcctgctcagccttcagagtagctgggattacaggtgtgcagcaccacacccggctaatttggtatttttagtagagatggggtttctccatgttggtcaggctggtcttgaactaccgacctcaggtgatccacccgcctcggcctcccaaagtgctgggattacaggcgtgagccaccgtgcccagcagcagctaatttttgtatttttggtagagaggaggtttcaccatgttgcacagttgttttcaaactcctgagctcaggtgatccacctgcctcagcctcccaaagcgttgagattacaggtgtgagccacccacccggctgacaaataattcttaatttgcttatgtttatgttactcctattaggctgacttctaacaatcaagaataatattttgtatgttacagggaaatacaaaattatacacagtgaactataaacaaattatttgttagttgatttctactcattactccaagtatggataattacaccacatacgaggtctactgaacattaatgaagataaaacttacttaagcaaggtcaaggctttcctaaaatatttttaagttcaacggctggacttggcactattgtcttctgcctatgtaaagtgttccttacactataatcaaaggaaaggctagtagacaaggagtttctgacatctctgatacctctctagttacttgcaaagtacaggagagaagttgattagtttattcttaccattttgattgcaacttccaaaccagtgtgaatggactcagctctgtagacaccagcaaatgatcctttaccaagcagatttccaactttaaaatccttaaaagttaaaattaaagattatgtgtgatgactcacagtagaaaggaagatgggaaggggctggaaaaagaagataaaatggatcgagtggggaatttgacaaaattcaagcgggtattacacctcgatgcagcaggtgtctagggtggaaggcatgttgactccgtgcggggatacctgcgcttccaggctggactggaagctcagggtgatggtgcaccctagtgatctggttcctcaacctcagtgcagcctaagcgccctcctcccatctccagccaatccccgggagcggagggctcggtcagaatcccgccgcagctcccgccggagataaccgccatccccttggagaagtgggaggtagccctgccctgctctaacgcggtagctcgggcgggattgctgaaagaaagccgcagtgcctcgggacactgccgggcggggagggactcacctgtcccgccttccctactcttgtctcttgaggggcgggccgctccgcccctaaacagcaggggtctgggccgttgggaccctccctaagcacctcggtgcccgccccgcagccgttagcttcgttcgctccccttcccacagcggtctcgtgtcctcccacaattactcccacccgccccgctgcagactgccgagtcttttcacctcgatcttctccccgatgcaggtcgccatatttccaggctctggcctgggttctccggattagcttccttcacgcagtcccttcgaggcagcgctccaagcagccagccggccttggcgcccatcaggctcggctctctaaaccgccgctccaggcgacgacgctgaaaccacggaaagttctccctgacaccttccgaggcctgggcggtgcctctgggctcccattttgaaaatctcccgccgcttgccgtccgagctaggctggtggtgacgtaacgagatggatcgctccggataggctgcgccggggcgcgcatgcgcggcagaccttcctttgcggccggcccagggttctagacttcggggccaagggccggaagcgctgcggagagtttagttcgggcgggaggctgtctcgggcccactctcggaagaacttctgcaagacgggtaaaagagcaggccttaaagatgggacacttatggctgatcggttacttcacggtccgaaataccacttctaattccggaaagggtttaaaactattttaaaatgtcaagcgtttaagacttgacggaacagggcaaaaaacattaccttcctttaaggaacaccgtttacaccactaccgcttattccgtagtttgttataactgtagttaatgtgtacggtaccttaagaaaacgaactccattctttattttggcaaactcctaagtatttaatattataatgtcatttgtataataatttacagttagatctctcatacacataatttgtatggatcaaaagagacctctgtaagtttgggatggtgttttgcaggtgagaaaagtgtgatgcttaaggaaggatatttaacaaacagaagtagcgcacaaacttagatcttctgttattaagtgaaagctcttttccttgatgttagtgtgtatttctttttctttttcttttttcttttgagatggagtctcgctctgtcgcccaggctggagtgcagtgactcgatctcggctcactgcagcctccatctcctgggttccagcgattctccttcctcagtctcccgggtagctgggatttacaggtacgcgccaccacgactggctaatttttgtatttttagtagagacggggtttcaccatgttggccaggctggtctcgaactcctgacctcaggtgatccgcctgcgtcggcttcccaaagtgctaggaatacaggcgtgagcctccatgcccggcccatttttttttttaaactttttagtttcaaataattttaagcttacagaaaagttgtaaaaataatagagaactcctgttgtcctttactcagattaaccaattcttaacattttgccacacttgtttttactattcttcatgtgtaatatacatgtataaatatataaataagcctattatttgtattttatgaatcattctaaaataggttacatacactatgctcttataccccttatttctaaagtgtgaatttcttaagaaccagggtatcctcttgtatgtttatcaaattaaggatatttagcattgatacaatatttatatttaatctaatctacagttcatattccgatttgtcaattgttccagtaatgtctttatttaacattttttccttccagtatagatctagtacaggatcacataccgtatttagttaccatatctttttaatttcctttaatatggaagagttcctcagcatttgtatttttgtgacattgagatttttgaagagtgcaggccaattatttatcattcgttcatttgttcattccagtattactgaggtatagttgacaaaaattgtatttattcaagttgtacagcatgatgatttcatatacattgtgaaatgattacaacaatcaaattaacacattgt

SEQ ID NO: 317227 - DNA, 4001 bp, Homo sapiens
gaaccaaaaatatgccaccactcaaaaatcttcatcatactaacgagaaaagatgggagtagaggtactagccaggtacaatttcagctcagcaaggctctgagagcagcgggaagctgaaagcacatacaaagtgattgattataaaataaaatacctaaaagggactctcttaattactgggtatttgtaaaatgcaattaattaatggaacttttactgtaaaaggccaaaaaaaaaagttaaatcagcttaaattatgccaaaacaccactcattattgaataattagcccatgactagcttatctttaaaggactccctctccctgctctcttcccctagtattagaatgttaagtattttagcaattgaaaaaaaaaaactacaccaacctctcttcatctaaaggcacaggttttccattatcagctacaaacatgtcatgggtcctcttcaacgacctgaacacaagggtgtgtacagaatgtttctgtacctcctaaaaaaaaagaatgtaattacacacctatctacaaattacacaaatcataacctaaagtcagattgattatacacttcacgtgtttaaatatgtaaaaagctttataccactcaccatagctacttgttgcaagctacaggagtcaagttcagagaagaggaggaagctcctctttggctagaacctcaggtttagcaactgagtgatgccggagtttaacttactcaataaatatttactgagctcctactgtgtgtctggcaggtattgtgctagaatctcacaatagaatgataaaaaggtggtcatggtccctgtgctcaagaggaaacagacaaataaaaagtaaaataattccacattttgataagtgctatgaaggcaacaagcaaggcgctgagtcagggaatgaaggactaagtataattgtgaaagatttcactaaggtgatatttaagcagaaagggagttagccttgcacaaaacagaggtaagaacgaaccaggctgatggaaatgtcatgtaaaaaaaagttcagttaactgaaataatacaaggagcgcagtacagctgtgtatggaggatgagatggtgctttgtagctgcaagggtagacaaggtccagattaggtaaggtcttttagactattacaacagcctatattttgttctagcaacatagggtcagtaaagggttttaaacaagaaaggtatgaacaacttacgttttaaacagaacaacttatagaacaaaatggaagcaaggaaaccaaccaacggggagctaatgcaccagtccaggtgaaagatgatgttggtctcaattaaggtggactgcagcggatatggagaagagtgaatggaatcaataaacatgtggggtaagatggacaagaccagctaacagcgttggctgttcatgccagggaaagatgtaaagaacggcaagtttttctgggggtagaggtgaaataagagacgacctgaacgcaagatagagaagactaccaatcttttagggcacagactcactgacactgccccgagggcggcaagtaccagtggtcgatcaccaacagaggccccgcctccgaggacactttccagctcccaagagtcaaacgaggactggacgaattatctcaggcttcgcgcccaggctgaacctccgactcgggttctcatccggcttctaccccttccccgaaaacccgaagaagagaccactcggccttggccaaatagctcccctcgtagcctcttttctctctggactccaagtactctcaatcccccacgcgcactgccaaaaaaaacagtccagagacaaacgactcttgagagccccagtgtcactttacctcgaccatgatgctaccgtgtatcccacctccggcagggaagaaactctaatcactaacgcagtacccgccgccacagctgtgcagcaccttccggaattgggcgcccaggcggcggatgtgatgcaagctctgcgcacgcgcgctagtctccctcggccatctaggatcaggaggcgggtctccctcctcgggaccgcctctagggcggagtctcgaggctgaaagccggagactcctggaagggcctgggtggagggtttcactcgtccctctgaagaaatcttagaattatgttttctgccttagttggggtcctggttgttcgtgctgtattccccggaagcttaacgctttttattcagagaacctaagcgtctggagagcaaactcccgtgggctctatctaaggcatttccactaccttgatctctttggaggtcgcctgcgtgctttgtgtctcctggttctaatcctggcgagaagcacttggacacttgtaggcttaacacctgaaaacaatttcgcttaaacagtccagtaaacacttgttaagtgaacgttgaggaatagctgttttaatttggaaaattttgacatgtagttataacaaaaccccatatttattttctgctaatagatttttttttttaatttctcaaaactgcatagctcttgtccatttcctagttgcctgctgattattgtggcttcaacaatgccagggtacagcttttcaaagctggtagaagacacaattggagactttagccatttttatttatacatatccttgtgccaagtattggtatttttgctttctaccctggtaaaatctgtggtttgtgatcaaccctacccaattatttttctatgtaaaaaaaaaaatggatggacttaggcatttacaaacttaaatagacaaacattttactggccctgtttcagtttcactaatcctgtcctgagagcatactgcttacactttgagagggggaaaaaatctagcaaaagaatagcaatataaatcaaccttacttggaaattcattaaaaacattaaggtcatgggtttttgtttgagacagagtttcgctcttgtcgcccaggctggagtgccatggcgcgatcttggctcactgcaacctcagcatcccaggttcaagctattctcctgcctcagcctctggagtagctgggattacaggcgcccgccaccatgcccggctaatttttgtatttttagtagagacagcgtttcaccatgttggccaggctggtcttgaactcctgacctcaggtgatccgcccgcctcggcctcccaaagtgctaggattacaggcatgagccactgagccctgccttaaggtcatgtttttacttgaagatacagcatctctgaatttaactgtgagtttggcctaagaattgcttttctgtaaaggtggcaggtgatggtatttccttgcaagaaaataccataattgtaaaatatatacttgatgaactaaataatatactcacctattaataataactatagaaaataacatgatttgaaatgacaataaaaccatagaaacctaagcaagactaatatatatggcaatatattaattgtctagttggatctattaactttttacatatttaatcatcctggagacattaatttaatttctcaataacaacatggtaatgattgaggtaaattgcctcgaatttgctccttttaaaacactgtcgtgaatttatagaatgatgtcatccccttgaaagtttacaatattttagataaatatagaactcaagtgaccctattatttagttcagggattcatgaattatgtatattgtaggaaaattttgtatttatatgggaatatgttttattttctggagaaaggatccacaagtttaattggattcctgaaaggctccgtcatacacacatggcctggctgacacccgaagctgccttatttgaacagcaggtgtcaccactgctctttgtacgggccctcagggctgtccttaaagcagacacggcaagtaacttattaatataaattattagtattatgtctgtgtaaaaccaagaatacaagttttaaggaaagccctccttctttagg

SEQ ID NO: 317228 - DNA, 4001 bp, Homo sapiens
gaactggggatgccttccagacaccagccagtgagaaactgagacccttggtctgaaagtctacaagaaactgaattctgtcaacaaccatgtgagcttagaagagaatgcttccccactgcagcctcaggagagacaccagacctggctgacacctggagtccacccttgcagaggacctagcagagtcaggtccaggctcctgacgcacagaaactgtacaacaataattgtgttttttaagccaataagtttgtattaataatgttatacagcaatagaaaatacaaaatccttatgaaaattccactatttttacaaatccaagagagaaaagtagtatcatatctttttctattaccttctcaataaccttaacaaacaaaagccagaattttaacggggtattttattttcagagatgagatcttgctatgttgcctaggctggactcgaactcctgggctcaagtgatcgtcccaggcattaacaatgtattttagaacaacaataagagcttatatgagatggactgactgtcgtaaatttttcatcagagcctcatattatagctgccagaggcatttcattattcttaccggtttttgaaggggagtatatttccacctctgtcaagtatgcaccctctattattcaaaaaaatatggaataatgtgattatgatagtgtcttacactatcaattgctaggcatgtaattcacactcaaaaattcttaccagtttattagtgacttctactataataaagtatataagcaacagatgcctcaatatgaatggatcaaaacgttaagtgcaaatgtatcttaatcaagatgtgtttataagagcttttgtgctaatattcggcaatactctcaattatttcaatgcaatttcattactcaattatatctcactcacttataccttattttgtagaaagagaaaccaaccacaaactattggcccaggcttgcaaatttaaaataaaaactgctttgctagtagcaaaaaaaaaaaaaaaacaccaacaaaaaacaaaacaaaaaaacaccaaaagccctgatgttataaacatttcagtgacatttgtgagcatatcactgctttcacttttttttttttttttttttgagatagagtctcactctgtcgcccacgctggagacctcagctcactgcaagccccgcctcctgggttcatgccattctcctgcctcagcctcccaagtagctggactacaggcgcctaccaccactcccagctaattttttgtatttttagtagagacagtgttttaccgtgttagccaggatggtctcgatctcctgacctcatgatcgccgacctcggcctcccaaagtgctgggattacaggcgtgagccaccgcacccggccccactgcttttactattataccacatcataaatccatatacactgatccaataatccttgccacctaagagtttacatttctatagcagcacaatacacatattgtcaaaaacatatctcttgttcaccacacaaaatagcaaatactatgtacaggtttgatgacctgagaaccaagattaaagcatctcttttgaaaatactaaaatacctgatccagattctaagggaatgtttgacagaaatacctggaataaggaagagagtgttacatttttaaagcaatgaaggttaagggaacacgaaagttagcaagcagaagctcagtctgcactgaatgagtgtaaaaggggcgggagctgggcttcatctgtctacatgcattccattttcaattcttagtctttagaacaattaacattcaaagtatcaagagaaagaaaggttcataaaaattacttactctctgtactctttccccaagtcttagaatccactaaatcacctgaatgcatagcagacataatcttctgagcaacactggagagcggtgtattacagagatcaaagcctaccaatgcctcataattttccattttcacaaaatcctaaatgtaagattaacataagataaatcccatatattaatcctaagactataaaacaggaaatacaattattttcaaaaatttatataccaactttcatttaaaatgtctatattcataaccacagaaaataggcatcaatcatccaataatatagatagaaagaaaaaagcaaaatagctagaggcttaatccaggtatcatagtaaatagataacttattttctaggtgaccaatttagaagcaatctactcaaatacatcctgaggtttgaaaaatgttattaaatcttcaaataggctgagcgcggaagctcatgcctgtgatccctgcactttggtagactgaggcgggtggatcacctgaggtcaggagttcgagaccaacctggccaacatgatgaaaccccgtctctactaaaaatacaaaaaattaaccaggcatggtggcacctgtaatcccagctactcgggaggcctgaggcaggagaatcacgtgaacccagaaggcagaggttgcagtgagctgagatcatgccactgcactccagcctgggcaacaagagtgaaactccgtctcaaaaaataaaaaataaataaataaataaataaatcttcaaataaacctacctagtaacacaacgattataagtaacttgggtaattacggcagacacacaactaccatccgtgccttgatctgccctgctggccccctgggctgagcaagtcaaggtttgggtggggacagtataaatcaagcatctgggcaggggcatggtggcttacacctgtaatgccagcactatggaaggccaaggcgggtagatcacttgaggtcaggagtttgagaccagcctgaccaacatggtgaaaccccgtctctactgaaaatacaaaaattagccaggtgcagtggtgcacgcctacaatcccatctactcaggaggctgaagcaggagaatcacttgaacctgggaggcggaggttgcagtgagccgagatcattccactgaactccagcctgagtgacacagttagactctgtctcaaaaattaactaataaatcaagcgtctggccacacatctaaatatgtgacactaatttaaacagaatatgctaccataaaccaggaaaccaggtgacatattttccacatttttggagaaaataaaaattttaagtaaattctctattccgaaatagaatagaaaaaaacatatacaacaaaaaaaaagttgctcaggtgatagggagctgatagcaaaatcttaaacaaaatttactgctacaaaattaaggtttacataaaattttaaataacataaacacaataattggcaaaatatttttgttcaatgggtttcaaaaatcaagaaggttcatctgtcatctaggtatgcctgttttctgatggttatagctaaaaaattccataaagaccacccaaaacatgtagtttttagattggcattccatattacgaacaggtgaggaatattcttaaaggtattcctacaaagctcacatggtatttaccacaggccatgtataaattgggcactcaagaagcatctgatgtaataacagatgagctacttcaaattattttagagcaacgcttaaaatattttctggctgcccaaataccattgttaaatacaattagacatttttgctcttaaactgattaaaatagtatcatacatcttttgagcaaccacttttacagaattttgaaattcaaatttcatttgaaagtcatttatgatgtgtaagtcacattaaagtcaaagcactgctcagctgtcttgtagaaacttttgagtccccagaattcagactctaaaatgaatgcaggcaggccaaggaagtcctaatactctgtggtacaagtagggacattaaaacagcctaaaggtctatagcagggaattatggaggaatacaatttgagcagcagaattttatttgacagtcaaacatg

SEQ ID NO: 317229 - DNA, 4001 bp, Homo sapiens
aatctcagctactcgggaggctgaggcaggagaactgcttgaacctgggagatggaggttacagtgagccgagattgcgccaccacactcaagcctgggcaacagagcaagaccatcaaaaaaaaaaaaagaaactgtggagtgataagaacctcttataactgttataactgtagttacccactgtggagagttcaaactgggcagatggtgggtaagaaggagacgtgacactttaacttgttttttttgagacaaggtctcactttgttctcagctcatagcagtgtcaacttcccaggctcaagcgatcctccagcctcagccccacaagtagctgggactataggtgagcaagaccacgcccagctaatttttctatttcttatagagaggggtctcccatgttgcccaggctgctctcgaactcctgagctcaagtaatccacccgcctcagactcccaaaatgctgggataacaggcgtgagccactgcaccagccaccccactttaacatttttaaattttctggcttgtgagctatgagaatatattacccagccaaaaattatgctttaaaaatcttttttttcgaatttttcttctactgagatagtagttaaaaaagaacaaggaatataatgatgctaataaatttctacaacacaagatataaatgagacagaagtttaaacagctttaaaagtttaagcttttggctgggcacattggctcatgcttgtaatcccagcactttgggaggccgagacaggcagatggtttgacctcaggagtttgagaccagcctgggcaacatggccagaccccatctcttaaaaaaaaaaaaaaaaaattaagcttttgcttcaattttttccatctgatttatcagaagtacctgagggaatagagagaggagatgtagggggtggccaaggaattgagagctataagaaaataaggtttgaattagcagatatggagaatggaaaaggcggctacgaaaatacactagactcaactaagaattttttttttttttttttgagacagtctaactctgtcactcaggctgtggtgtagtggtgcgatctcagctcactgcaaactccgcctcctgggctcaagcgatcgtccggcctcagcctcccgagtagctgggattacaggcgcacgccatcacactaggctaatttttgtatttttagtagatacaggatttccccatgtttgtcaggttggtctcaagcgatctgcacatctcggcctcccaaagtgctgacgggagccaccgcgctcggccactactaagaattccatatgcgcaaacaaacaggtattatacattggcccagtgcagcagaatacatatcatctgagaactgtgacattgtgagaagaggaagttaaaagtcatcctttaagacaatttactttgacttacaaacagtatgaagaaatgtcagactaaaccgagtcccccccgccacccccaccccccgatattctctgtcccggaatatttccaggaccttccacactgcctgacacaggctgacactcaacaattgagctattcgttaagtcgactgtggctttaaggaaaatttttaaagggtgccctttgcttcaaattcaaaacgtaatttatcttacgattctgcacgctacttcaccacaggaaacgaggatcagatctaacggaacgagaaagtgcagagagcagcagtgaacgtaacctggaacattaacactatgttccctgcaccctccgcctctccctaccccagtttcgttcccggcctggtaagtgtgggaacaaggctggggactgtgcagccggcgcatgggaaggccccaaatcctcaatccaatcagttcccaacgctttcctgcttaaatggaccgccacggcgtgtgttttgagcgttcacctaccctcatccgcgtcgtacatattgccaaacggttctcgagctcctaactcttgaaatcaaaagacaaaaaccgcccagaagccagcagcgccaggagctaaagacgaagtaacttccgtctccgacgttcccagaataccacgcgtctcacaccaaaggccgcccacagggacgccaaagttaggatctgcgcctgcgcaaattgtaggtcaagcttgggccggggttagggttgcacacgcgtaaattgtgggccgccgctgccgggctgattgagaggacagctcccgcaatctgcggtcgtatccgttccgtcaatgttttatttctgcttgtttttcaatgttgttgcacaaataacgacacctgaaaacaaaaccaggtatacttattattaaaaagtgttcgtcctgtgaatccgcaacattgggatgctcaatttatttgcctttataaggaccaaaacacgaagctattttttatttttatttatttattattttttgaaatggagtctcgctctgtcgcccaggctggagtgcagtggagcgatctcggctcactgcaacctccgtctcccgggttcaagcgattctcctgcctcggcctcccaaatagctgggattacaggcaagggtcaccacgcccgggtaatttttgtatttttagtagagacggggtttcaccacgttggccaggctggtctcgaactgctgacctcaggtgatccacccgcctcggcctcccaaagtgctgggattacaggcgtgagccacgcgcccggccggaagctcctttctgtttttgttttgttttgtttttttgagacaggctcgctctgtcgcccaggctggagtgcagtggcgcgatctcggctcactgcaacctccgcctcccgcgttcaagccattctcctgcctcagcctcccgagtagctgggactacaggcgcccgccaccacgcctggctaattttttgtatttttagcagagatgggggtttcaccgtgtaagccaggatggtctcgatctcctgacctcatgatccgcccgcctcggcctcccaaattgctgggattacaggcgtgagccaccgcgcccgaccccggaagctcctttttaagtgtgatttattaagggcggcttgtgctagcagtgaggcgttaagcctgaaagtgaaaaaacccaaaacactcactgctcttttctgcccacctagctcaatcctccagtgcctttgccatagctttaagtaggttctcagtctcagagcttaaatcgcgagaactgacgggattagacgcaaaaccaaccaggacagctcccaagtacccacgcgctttcgtctcgggtcaaatgcgcgcctcggaccctagtgcgcgtgcgcgctggtggctccgcccctttggagctacttcctcatgctgcccgctcgcctaccgttcaggctgctgagccttttccttcgtggatccgctcccacggcagcgcgccatggcctccgggagccgctcctggagaggaggtgcgctgccgcctcctccttccagcactcatcgagtctgggacgcgagcttccttatgaccccgtggacacggagggctttggagaaggtggtgacatgcaggagcgttttctgttcccggagtacatcctggatccggagccgcaacccacccgcgaaaagcagctgcaggagctccagcaacagcaggaggaggaggagcgacagaggcagcagcggcgggaggagcggcgacagcaaaacctacgggccaggtcccgggagcacccggtcgtggggcacccggacccggcattgccgcccagcggcgtgaactgctcgggctgtggggcagagctgcactgccaggacgccggagtgcccggctacctgccccgagagaagttcctccgcacggcggaggcagacggcgggctggcacggaccgtgtgccagcgctgctggctgctgtcgcaccaccggcgcgctctacgcctgcaggtgagccgcgagcagtacctggagctggtgagcgccgcgttgcggcggcccggcccct

SEQ ID NO: 317230 - DNA, 4001 bp, Homo sapiens
agtcgccaaaagtgaaaagaggcagaagagaggagagaaaagagcggacgaggaaaggggcgtctctggagaggccaagagtcttctaaatgccggcggaatatttcattcttttctgtttctgcctctggttgcagaaccagacgcgcaccacgtttttcttcaggtccagcttctccgcgatggcggcgatcttttcagaggagggccgaggctgaatggcaaagtaggcttcgagcgagcgcttctctggcgcagcgatggacgtgcgcttgcgcttcttctccgcgccattgaagagttcaggcttggtgagcttctcgcggtgggacttctcggcctcctcgagccatgcctgcaggatgggtttgagcgcgatcatattattgtgggacagtgtgagggactcgaacctgcagatggtgctctggctaagcgagcccacgccggggatcttgaggttggccagcgcggagcccacatctgcctgggtcacccccagcttgatgcgtcgctgcttgaagcgctcggcgaatgcctccaggtcccgcgggtcggcgtccacgtcgctcatgcagcccatgtgcgacggcagcccgtgcgcgtgggccatgctgagcgctgcttggtgcatggggttcatggtggccatgtgcggcgcgtgagccggcgtggacaccacagcgccgtcggggcccgccatagcgcccagggccagcccgggactcaggtgctccagcagctcgccctccagcgcctggtgcggttggtggtggtggtggtggtgatggtggtggtggtggtgcgtgcccgccaacgcggaagggtgcgagatgggcaccgatgaagaagaggcggccgacgtgcacgggatggtattcatagtgtggtaggtggcgtccggtttgaaggggctgtggtggggtggatggtggtggtggctcttgctctgggagacgatgtccacggctgccagagcctcggcgcgggccagcagactctcatccagcccgccgaatatattgctctgcaattgtaagtagaaggcacacattacgctcagcagggaattgtacgccctctctccggaagccccggcccagggctcgacaccgtcgccgcgcctacaacattcccagatcgttaaaataataataataataatcctgaaaacagaggtgaagagaaaaagagggaagccacagaaagaagccgagagtgcaggaggaggaggaaagtgagcctgtagacacaacgaaacacaacacaacacgcgcacaggcaacatcccaggtcataaaaattaatatgaaaggcaagacctgctgaatacttaagagagagagaggggaaaattggttggaggtgtggggtgatttgctgtgcagacatgaaaaaaacatcaagcagataaagggggctgtcaaaatgtgcctttaagcggtgattatgcagaaatacgcaccggtggggttggaagacaggctctccgcatagcctccgagcccccgccgccgctgctgccactgctgctggagctgctgcttcggcctccgccgccgccgccgccgccgccgccgccgccgccaccaccagcgttgctcgagctgctgggggagctggccgagggcgcgatgggagccgaggagcccggcgaggtgctgtgcagtgccgagtacttgggctccacgtgcaggctgccgccgtgcggcatgctaaacgcctgcttgctgttcagggacatcatcatcatcttcccgcccgccggggcgctggtccgtagaggcactcactggtcccggctgccgggaccctccgagaagtgccgggccagccggggctggagctgggaagggctgtgcgaagttgagctcacccgccgccgcctccggactctgtacgcctgatctcggctacgcgctccttcgccgcctctgctgtcagtctgaacggatgcctgactccgcttgccgctagctgcagacctcggcacccgaaactgcccccgctcctcgcggccggcgagttatactcccctctccccgcgcctacccccgcgccccccgccctccctctctccctctctcccgcgcgcctccgccctcccttgccaggaaacgccggctcctgttcggtttctcgcgttgccccttcttcctctctactcccctcaggcttgagtcctttctgctctctcagcactcgcctcgcgctcccccaccgcgccctccgccgcctcttttctgcccccgcccgtgctctgttgccgccgccccttcgcagcgtcccgcggctgctactcacaatcgcgcccccactcaaccccacccaaatggccaggtccgcgctccagtcgccgggcagtgcctacctaaggaccagcctccagcccctcccgcttcttctgccgggtctctgtctcaccggaaaaagaaactcccaaataaagttgcggcccaagccagcgttgggtaggtaagagtgcctcttacctggctgccacctcctacgcctcctgcttaccactaagttccaggcttccaaccccactcggcccgcccccaccccgtcagctcaggtgaccctgatcccaggttcccggccaccgctgagaacacagacgttgcggccaacccgggttctgcgcgcggctctgaactcccagcccaatacgagcggaggtcggcgttcggctacgagccccccacggcccggcgggtgcctggtgccaaagagacatggggtcggaggggctgcagggctttctctcactcgatttctcgcagctctcagcggattggacagccgcggagcaggctcgggtcgtctgtgcgcatgcgactcctccccctccccgctgtccccacccctcccacaacacacacacacatacacacaggcacacacacacgctcctcttgccccccttttctcttcctcctcctccctgtatccagtacagttcgagttgagtcttggaaggatccactggcaaaccctgcccctggatttattattcttcattagccacaatcaaaggaagaaggggcaactgacagggagagggaaggtcagaaattacacagcgcatatgctgctgaatacaccccacaacacagacacacacacacacaccctcgggggctggcacaaacctcacttatcttcatttccacagcctctcggtgcggagcctatttttagctgacacttcactcccacttctgtcccagtcccagtgcagaccacttttcctagagatggacacacactcttggttccagttgcaaaaggagataatctctttctatctatctctctctctctgtcacacacacacacacacacacacacacacacacacactacttcctctccttctggatcccattttctctatacttcccgcggtgttgggggctgctgtcacctccctagagagcggaaggagcagggtgcaggcgagggtgagaaggccccgggaccccgacgcaggaacccgcgggtggcccaatccggacgggggttgaccgggagcaggtgcaggcactgggcgcctggggaaggcgagcaggtgcgagagcaggcggcaggcctgagaggcgctggcgcgcgctgggacaaaaacagagtgggaaggagagtggaaaaggggaaccctcgggtggtcagctcccggaagcggcggtggagagtaggggaccgcctgtccacccctgacctcagccgggcggaatagcggtttcaagatgggaccgctgtcctcaggagccgccagagtgctggggaaggcggcagcaacgagcgcgcgacgggctctgtccatggtccttaacccccttctgctttccctggatcctctcgggcttccctttctcttcccctgtgtggaggaaaataataaatagtagccgaagggaactcctagcagcagtgttgccgggtgtgagctcagcgaaacctggacatggggtagggaaaggggagtgttcacgtgaatg

SEQ ID NO: 317231 - DNA, 4001 bp, Homo sapiens
gactgttagaatctccgttattcatccaatgccttcagggaataccagtgctgagaaggaccttgaggatcatcgtttcaaggtcaaaagcttcattttacagctgaagaaactggctctgtgagaaagaactgaagtaaccacccacccaacagcacacagcgagttaacggcagagccaagattatggcctaggactccccattccaaatccggtactgggtcaactactctgtgcgctcctggcttctcaagcctgtttttgctcaaccagtgtatttactttttccataattatagtaatattgtgaatctctgtactatgcctaacagtgtctagcacacttcataaatatttattatttgggtatctattaattaccgtacttattgcaaatctagaatacttgcagtagacaggccttttttcaatctgcttaaaaagcgaactgccacttcataattttttctgactattcccattaatcatcacatggtaaccttttagaacataatccattcagaaatttgagacttcctgttcacctgatcagtcttaaccaaagatagaagaaaatatgtggcatagggtgaaaactgcaaccaattttgaagaaaatagaaattctagtactagttgcattataatcacacgactttaggcaaactcttctttcccacaaaataatcctcgaccctaaactcatgtagcataactgcaaatctctcataaattacaaatatctataatgattatcggtattaacaatagtaatttatattttaggccctgtgactaatcagtttacatatataatgtcatgtaatacttgcagccctattttacggatgagaaaaaacaaggcttagcaacttaaactcgtccggggtcacagagttaagacgtgaagaactcgagggcctgcttagaactgaaagcctccagagccagtgctccgaaaaggggagcgataatgcaaggcccactttgatactaccactccaaggctctgcagtcagtggggagtgaaggcaagcgaccgacatcgctattttctgttacggttaacgtacacagtgaaacaatggggtacacggaacaatgagtcacgaagacctgggtcctttctctgagctcggcaactcagggacccccccgaagtcgcttagccttctgggcttgttcagcttggggaggaaaaggggctgctccggaaccaacgaggctttggatggtggatcacactcagggtgtaaacttgtgcgtaccaagtcaagcttctggggaaagaaccttcatcagagtccctccaaaaaaagaagacgcgctggattaggcatccgcaaagttccgcctgcctctccgacgtcagggagctcccgcagtaggaggtttcttacgcctctaggaaggccggcgtgtgggcgggctctgccttcccttcctcactgagttgtgtgaaccgggaacggcggccgggccggctaatggctgcaggccgccgcggggtggccgcttgcactctgcctacccctcggggagggcggctggcagggcacagggcgctatctaccccccagccggcagccctgcgcctctgctctccgctttggggtcttgatccgccgcctcctcgctggcagttctcgtgactcggtgcgcgctcccgcgggaagtaaggtggcctggaccgcgcggctaccgctgagggccccaaaaagagagaagggagaccgcgcggggcgtcccaagtgtcccccattccatcccccacccaggtttctccggtgcgccgctcggcgaacctccgggagctacttactaaagaagaggcggtaattctgcgagcagggctggccgcgctcctcagtgtggtacagggccatagcacggcgcgacccggtccctgcactggtccccaaccgcaggcacgcagcggctggggcacccgtgcgcagcagccgcagcagcgcgctcatggcgtcaatgacggtcctgctgtgcgcgcggagctacctgggggctcggccgggccgcacgccggtgccccctaccgtccggagtcatccctcccgccccggcgctcgggctgcgatcctggtccctgccagtggaatctggaacaccagccagttgtgcgcactatgccctcagcgaggccgcagctcaaagacgagtgagacaagacccaccacccctgaagagctcactgccactcgttaattcatacatttattcatgccttcatttatcccgtcaagaattactatcatgattttttagtatagtgatgtaatattgagtgattactctgtgccaggaactgctctagaccctgtccaatataggagatgagcgcacatgcacgcaaagacatcactataagacaaaatgatcaggccaccacgtgaaaacgggacgttgacaccgacttacagagcaaaaaaccctaagtagcttactcaaatgccatcttctccataaggccatttcctaacccagtagagattatttattctttcttttattttattattttttgttgttgttttgtttttgagacggagtctcacactgttgcctgggctggaatgcaatggtacaatctcggctcactgcaacctccgcctcctgggttcaagctattctcctgccttagcctcctgagtaactgggattacaggcatgcgtcacgacgcctagctaatttttgtatttttagtagagacagtttccccatgttggtcagactggtctcgaactcccgacctccattgatccgcctgcgttggcctcccaaagtcctgggattacaggcgtgagccaccgcgcatcggccaggcggggtggcacacacgcctgtagttccagctacttgggaggctgagataggaggatggtttgggccagtatccaggagaatggatattgtagaacaaccagtagtctgccacgtgtcattttatttttttctagtccatcttctttgggactatcatcatctaggctactttcctactgggcacccaggttctttcagcatctccaattatcgtgtgatcattaaaattgagatactggtctacccaagttccagaaaggattcctaggagatattgtgactagctacttagagacactctactaagattatagatcctaaaatgtttttgtcaacagtggtacctttgtaatgtgtcaacttgaataggcataactataaggcaaatgctcccataaaaaggagagaaaatctcttctgtgcatatatcacagagttgtataatttttttgtttatgttgaaaaaaagcttaatttttctattaacttttgaagattagatatttaaataagacaaattcctatggaggcagggttgtaggctaatttctaatgatctgtggatacttaaagtatccaggctgggcgtggtggctcatgcttgtaattctagcactttgggaggccaaggtgggaggatcacttgatcccaggagtttgagaccagcagtctgggcaacatggtaaaacccatctccataaaaagtacaaaaatcggccaggcggggtggcacacgcctgtagttccagccacttgggaggctgagataggaggatggtttgagcctaagaggcggaggttgcagtgaagccaaaatcatgccattgcactccagcttctgcagcagagccacaccctgtttaaaaaaaaaaaaaagttatctattgagataatccagcataaagttctgaggtccctcttgctaatagcttttcttaactctggcaacatattttattagtaactgacaacaagttatatgcatcctgatttgaagaaaccaacaaagatactaaacgtttctgaatataaatgtttacttaaaatgaaatcttgacactaacttgttattttgtaaattgcattgtaaaatgttaccaagttatcatgcattcagaaaagaaaacgctgacttttgttaagtaggtttacattta

SEQ ID NO: 317232 - DNA, 4001 bp, Homo sapiens
ttcaaaaaatgaaaactgccaacgctacctgctgctcgtaatattttatacaggcggaggtgattcccagagccgctgccatgtaggcaaagcttctagcagctagctgcctatagtgcaacagagaagtgactggccaatctcagccgactggcgactctatccatggctggacaagtagccaagacctttcctccttaagaaaaaaatttaaaggccactattctaaatgcttctgatgtttatttgaaaatgactgcaggaattccaatgattaaaataaatcttccttatttccatatgatctagttcctcaatcaactcctaacagcatcaggaataatacatgatggaaaaatgaaactacagcagctgagacccacagtgccagccagacaaccacccacaggacactccggctactcaaaggcaattaggactttgaagccacttataaccctgactcataatggctacagggcatatgaattatccatatctattccgccttaccaagaaatcagaacaagataacaattacaatccacaaatacgatctaccaaggcaagggagggcaaatggagccaacatttgcaaacccagcaaagagttaagaatcccgggcatgcctcgctagataggaaaaatgcattcacagacggccttggccaaattattttcactttagatgtgtatcgctgcaccacatggacatcttatttaatcaaatcacgtgtgggcttgatcctcccccttaccctacgtgcccccagctacccagaggaaacactcgcagtcttttgccagattcattgttagcagctgggatcctccatgcaattcaattcgagtccatctcaccagagtccacagaaagttttgcttgtttcccaagttgcccaaactttccttccgagagcattccattgtgctgaatgcaaacacgccgaggtcctccgtccccccactagactccagagattacgaggaaactgcttgcgttattttcccccctgtatgaattgtagccagcagagactgtggaattgatgtattgctgtctatttttacactagcagcgagcagctccacacacagtcctgcataaactctattctctctcagcttcaggcagctctccgtggtacaggaagatttaaccattggcttccctgccaccgacgcgaacggaaaaccttgcactgccaggcgtttctttttattcgctggccaaatctttcaaccacgtataggagttttaaaggaagcagcatcgttgttttgtgttctgtgggaaaagcaatctaaaatagcccagcaggattatttaggattttgtaagttctctgtctgatgaacagagagagaggggggaaaaatccggactagagtcaaaacggactatatttgaacacatccattttaatatttttatcttcgtcttattataaatagaaatggcatttttccaaccaggccactaaacaccactggaaagacttcagcttctgattcatatcaatatcttagagcataaatattgcatatgagtagaaacagtgccaaagtcacatggaaagagtttctaactgcaacagatactgatgacagcagctaagctttgatttgctcaagccatctcagagccaccttaaaatagcaaacttattggagttaagataagattgagattcttctaaaagctcctgcctggactactttcctggctcctctctttgcccaagcccatccccccttacaggaataatagcatctgagggaagcgtcagttgtggctgcagcgccgagccctgccccagctcacctcgatgtcactccatacagactcagagtcctggttgcacatgtcccacgccatccagctcctgaatgacgccagtcaagctttttcaactccaatccacagtgacacagagcacacactcatgcaggcaaccagccccttactgagagtgaactgaaggcacctgtcttactacagtccccagtcacatgacaaagctattaaaaagtaggctgggctgtcactcacccagcctcccttcccctgtgcagcttgctgctctaactcgtgacgtcactcaaaggcagccctctgcttcagtgaagtaacgctttaaaaaaaaaaaaaaagaaagaaaaagaaaagaaagaaagaaaggaaacacttagacttttggaggcttcaagcatcatgctgtgattaaagccagctttgaatgccacagactctaaacggagccctggccatataataaccaaaatcccctgcaatctttttttaatttattttccttccaaaacaagcaagtggcaaagctccctgtttcatgacagagtaactatattcttagctaaaacgtgtattccctaagaactctttaattctaagatctccaagtggactcaagctcagtttgggactaaagcaagagcttatcacatgatgcatttttatgagacattttctcattgagggagtgtttgaaagcgcaaacggggctttttttttttttttttttttttttgcttgtttaatcaacaaaatagcctgtatgtgttaaggtataaacaaactcctccacccagaattcggctgcccccatggcagtagggaataccagctcccgaagagttgctgcagttttctttgctccatataaggagaacaagccacaaaaccccatcctttcagcttccttctaattatttccatttctctcataggctcccagaaaacaagtgttagtaaatacagtcgctgctgctctgctcagatcagctttgattcccggctcctatttttcatacatgtagcgtttcctccctaactgccttagggtgcctttttgaataaacattgaattccaaccctagtgccctgggttgtgtagtttgcgttttgaaatcaagaatgtctgtgaactgagggaaaaataccaacacactattagcagaaatattcaattcctgagctttactttctattatttttcagcttgtaccttgagacaatgagggctaatgcaggtaggtgcaactgttttatgatgacactacatattgaatacataacaaactcaaggtactggacacagtggaaaaacacttcctgtaacatgacagtggtctgacttaacccttccaagttcccaggagatgtacacgtgtatgtatctgtgtgaataaacatgttttcataaaatgttaaacccaatatacttttagaatcagctcaattcttttacttgataataatttacctgaaaacaatcccccagttacctaaatataatttgtaaagcattattctactgaggttaatttacactgttcttcattgtccatctccttaaacagaaaaacatggttatttgccctaacacatattttaaatattaaattgctcaaatattaaagtgaaagaaagaacaaaagaaacaaaataccagcagactgctgcttctttcagaccatacatattataagagatttgtgtgctgtgagagctgcaacaagttgctagtaaattcccaaataatgtaaggaagttgacagtttatcattactgggcataaaaaggtggccaagagctttgacattttaagtttgctgaatacagttcaccagcacattttcccttttataaacagcagaaaattactgtagttttaattttctaatgaaagaacaggaaaatacaacctcgggaatgcttttatacaagcaattagtggcattactctgcactccccacaaagaaacactaattttcttcccaattatattctgatttaatgtaaaacttcagtaaattattaaaattcaggacaaaggtcattggctctgccctcaaggatcaactgtgaaataatattggtcacctggccaagaagagtcaatgtttattaattattatcatgtgattcttccattgtgatattcactgatacctttatttgtgtttatccaatgctag

SEQ ID NO: 317233 - DNA, 4001 bp, Homo sapiens
gcaaccctaaagacctctagattctccctcacccccatgacagagtatccaaaataacaactgtttttttttttttgagacggagtctcgctctgtcgcccaggctggagtgcagtggcgtgatctctgctctctggaacctaagcctcccgggttcaagcgattctcctgcctcagcctccggagtagctaggactacaggagcgcatcaccacacccagctaattgtatttttagcagagatggggtttcaccatgttggccaggatggtctcgatctcttaacctcgtgatccgcccgcctcggcctcccaaagtgctgggattacaggcgtgagccaccgcgcctggccatagtttctaagaatgttacaaactaatgttgctcacaactaccacataatcaagagtttactttctccttggattacgtaactaattttctcaataaactttttttaaaaaaaacaagaaatctattatggtcaacccacaattatccaagattggagctacgcaagttaaaaatattctttttgatgcttcccacattctcagctctttagtaaacaaggaacacacaaaatgtgaaactgaaattgaagtacctgggacaatgaaaacagcaaaaaatacttctaatttaagtttggtggaggaaaagctaatcttttggaatgcgtttatacgtgttgcacccattttgctgttacgtgttattgccaagttccttaactgtagtgtaagttgttaccactgtattgccttatggaaactgtaatactttcagtaagaatatcaaacccaggtttgtttttcttatcctagtgtaataatttatatcaacttccagttaagtcaggtagtaagaaaaggaaagatcaccgaagcaaagtaattttttttaactcgaaaggatctcccaatttttcaaaatcaagtgtatggatcttggcatagagacactactcccctgtcccccttttgaagaagggagttaatttttgtcatgttattaccaacgttttcattcattaggcaagacgtctaccaatgaatcttttccagatgcactgttccctatggttggcttatttccatttaatttatgtgagatctactaccagtagtcattctcaacatcaactagtcatctttccctgggtctgaagtctagcatcctcaagttcccatagcgataactactttcaaacccataatctgctcaatagctctgcccttgcaaacaaaagcttgtggtggttggaggccccgcgcgaaaacctttaggtgttgaaggacctggactggccgccacgccacactagcctattacaggagcagccacaggctccgggagactagaacccgcctgcagtcggggaggagccctgacccagctagaccaagcaaaccggcggtttacaagctggccagcctctggatgggtgcacacaccggggggcggggagggagagagcccctaaaaggcataagtggctgggagggtgggcaggacaggctaaagttcatggaagcgaggtgcccctcgtgcacgcctaggcaacccggtcgacgccacaggcaggtactggcttaggtcggagaggtcggtcctcccgggccctcgggcgctcatgagaacgccgactgcgggaagcggctccgagagatggagacgcacgcccccgccacccccaccctgttgctcaccggtgctgcagccccacgagtcccagagtgatcacatgcggtacatccagctgcgtgggccactctcctgaggcgatgcacccgaacacgccacattcctctcggatccccaactcctccagctccatgtcgccgccgaaagcacgtggaaggacctgccgctgcggccaaggtgtaagcaccaaccagctgccagctcggcccgtcgagctcagaagctcgcgctcgcgacaggctcttccttcccgagggtggccccagctactgcggcggcgcgcgctgtccctaggtggcgtggccagctcagccctgctcctccccctccgagtccaccaacgagcgagggcggaggggcggtcccgcggctgaggggcggggtcacggatgctgtagggtggagctagccttcccctaagagctgcctggaaagctgtatttgctgcacgtggaaatctccgttattttccagcacccaacagtagcgtaatgggagtaacggacttaacctcatttctctttcagagcatttagccttcatatgcccttccctgcatgcttcccccaggccgtcaagacttggtacgctccaacttctgagtcgctcccgcagccgagaaggggccggggtatgcgagcttccgcagagtggggaggggccgccagtgcgcgccacttttcgcctgtccgggcactgcgccagcgcggggcggcccggaggcggggtcgcgtctctgcgcctgcgcggcgggaagccagtggggcgttgtttcgtccgatatccgcgtttcagtctccgcccatacccctccgggttaggcggctgtagcggagctcgaaaagagtggcgcagggtcgcgcggccccgcctccttccccgcccagcgaagctctctgaccacccctcttttctagagttctgcctcgcttcccggcgcggtcgcagccctcagcccacttaggataatggcgacagctgagggtgagtaacagggatccgggcccttcacggtctccctgacccccaggccgtgagctcgcggccacgtgcgagccgcgaaactctgtcccgcctccctgcagcagcgcctctaggcagccgcgcgggcgcacacgtggcccaggcgctcccgggcctccccgaactttactgcctcggggatggggagaaggagcaaagtagaggagaacgagaaatggccaaggggtggaaaggtgcctggaagtattatttataatcaatagctattgcaaaatacaagcaaatcagtcttgattcgtcaaaacctgagtcttgctttgcccgttaggttaatgacctttctaagaaggttaataattgaaacttttgaaagacctgtctagaggccgggcctggtggctcacgcctgtaatcccagcactttgggaggccaaggcgggcggatcacctgaggtcagtagtacgagaccagcctggccaacatggcgaaaccccgtctcttactaaaaatacaaaaaattagctggacgtggtggcgcgcgcctgtaatccccagctactcaggaggctgaggtaggagaatcgcttgaacccggaggcggaggttgcagtgagccgagatcgcgccattgcactccagcctgggcgacaaagcgagactccgtctcaaaaaagaaaaagaaaaacctgtctagggggcgtgtgtgtaagtagtctttgatgccatggtgtgtgtgtgtgtgtgcacgcgcgcgtgaagtagtctttgatgccacgatagcttggggtgtgtgtacgtgcgtgtgcgtgtttaagtagtctttgatgtcatgggtgtgtatgtgtgtgcgcgcgcgtgttgaagtagtctgattccatgatggctggggaggggggctgtttttaggtagtctttgatgccatgatggtgtgtgtgtgtgtgtgtgtgtgtgtgtgtgtgtgtgtgtgttcgttccagtagtctttgatgccacgatggctttgaagaactccaaaacctttaggcaaaaaagttgcactatcaggaaagattgttcttgctatttatgctggaaaaaaacaaatgctggttttttccacacacccagttgctatatgtatagtgaggcaaattgcttttgtggctgctgggtacattcttttccacatagaaagtaactgaattcagattttaaaaagctgtagactcaggccgggcgctgtggctcacgcctgtaatccccagcactttgggagtcccaggcgggcggatcacgaggtcaggagatcgagatcatcctgaccaaca

SEQ ID NO: 317234 - DNA, 4001 bp, Homo sapiens
taaccagatcatatctatcttttaaaaaattgtttagttcatgcatggaaaacacttagtattcctggcatattaaaatgattaataaattggaactgttatcatactacattaagaatgacaccgatcatcaatttagtaacttttgttgttcaaactgtgaaataccaagtatacaaaaaagagaggaaaattaaagctttttttccccaacaatcctgttaaaattaataatagatgacaacaagtcaatagcaaatttttatttcatgtgaatatttttgtaagaatagtgtgggtataagttttagggtttaaaaaatgaatgaaagttctgttgatgaaaaaagtagaatttagaattaggagtctagtaaggttgaagtcctatattgtacttatttataaggctcattctaatgatagaattataactatgtagatatgttaattcattttcatcatctatttttgttctactagtggcaaatatattcactttaaaccagctaaccacagtttataagattcatattcaccaatttattattttagtgtttgatggctaaaataaacatcagaataaactttcagggagtattttaaataagacatcctaggactaagacactgagagactccattaagttcctaaatatattaacaaaaatgtattgagcaaatattctctgttgggctccatgtaattcctattatcattgaccattatgaaatctaataatacccatgagtatgtctaataaccataaagtagaccaggaaaaatcaaccaagttgtgttagaatagaaatttttaaagaaaaaaatgcaaagtacagtccaatgtttaggcaagaattagagggttgaaaccaggcttatttattttcatcttctttctgccatcttttaaccaaccttctcagaataaaatgtgatttttgagacagaatgaaacacatatccaaattttaatacagtaagaataggtatcctgaataaatgagaactctagaaaatcaaggtttcaaaattctacccttcctgggagttaaagaagtttggcagaaacagaacaaattaatcagcagattcatcacctgccaattttttctgtacaattttcttgattctgggagcatctgggtccaggcagattttcctcccatccttcagtgtggctctgcaaaagagaacagggttatctgtgggtgtcctgatctgaatatcagaactaatccatgagactggaggaaacgagtgcatatgtggatggaggtagagggtttctctgataaggcaatagcacagaaacagcaacttacatcacttcgacttggttgcaatgggttcctttcccgatcacttccaaactttggatgtttttgggatgaattccagaggttgtctttatacacatgcagcggagttcagcatacaagtcactgtctagactttcctctagggtagaaaatgtgacctattggtggtcatgaatattttcctcaggtctcttatttgcagattgagggcaattgtacctctctcataaagccattgtgaatatgatctgtaacgctttagtaaagtgcccagaagattgcccagcacacaagaagtgagaagtgacccccctgtgtgtctcctccaattggagttattggtataatggccctctccagccccaaaggcaccaagctagtctttaccccagagacaggtgtagcagaagcagcaacaagtgcagagaagcagggcctctacctttgcctttcgccaagtttctcttagtttgtcctttggtggaggaagccagagcagtcagcagcaatgacagaagcagcagcacctgcaaggcatgaagtggtctcgcactgttacaggaaggggtggtatcaagtctgaggctcatggtggagaaggctgagctagagttgtttccagaaccagaagacctctgagtgagggtgagttgctgcctacaagtctgcagataagtggcttctcatgccctgaagatgtcatttatatgctctttctcaaagccagtaagaaggaagaggtaggaaaggaggaagtgagggtatgtggtgatacacacataagcatttgaagctgtgcccaacccagagaaagaccagacaggtcaaattcctactaacttgcttaatgtgcatcacttcacattcccactctccctttctcaatacttatcttccttacacctgtgtaagaactccgttcaggaaggtaagaactagactgaaatactacatgcattttctttgtatgatttataacaatacgccctgccttttctatactgcagtttttaggcttaatagaaactttaggagcacctgaaggcacaaacatgtggcccttgaaagagaaagttatctttgcttgccaaagaaagcaaatgttcttttcatgaatgttgataaatattgggattggtttggagcatgtaagtaaaataagagccaattaccgtcaaaggttgtctttggattttagcttattggattctttctgccttcaatctatattatcttttgtaatttcatctagaaactacaaatgaaactcatcctcctttatattacaaaagaagctacttgtttctaccacctaagaatacctaaaaagtaggacccagcatatttatttttctttttatttttaatttaacagaaaaattatataatttattgcaaaagattcgtatgctgcagatgtctttgaaataaaacacaaatttctcttcatcatttctccacattcctactattcagtggtaaacactggtaacaattttgcattagttttcaattctgtctgcacttatatgcacacatgtatatgtatacaatgagacacgtttaagacatagaggtacacatatacatagaagtattgtatatggatcactatacagctgacttttatccttcaaaaaatatgtgttccttatcttttcaggtcatcttaatgtagttttcccccattcttcttaatgaccatgtgacgtcctgtgataagaacaatagttactcaaccttgccttgttggtgcccttcacggtgtttccaattttgcactattagaaattgtgcaagaaatgtccttaccaaggaaaatatttgttcctgaattctcagacccaaattaaaggttttggtctgaaatgctatatccctacaaagatagagaggtggacctacacattacatgttggctttatgttattttctggttctctgtcccatctgtaagacttccttcctcaattgaaccatgcacttttgtagggagtggcatgtcctgtgtttgtttgaatgtctcatgtatcctataacatgtaggatacttcaatataaagtaggtcttaaataattaataaatcaatgaatacgtatcacatgaaagcttccctatcctttctaatcacctacaattccaggccaaactcgacaggacccaaagcaactatgctatttaaatttatttggaagattgtcaataaagaagaggcagatgtaagtggcactggcaacaagttttcttccttttacaactatgtataagtctcacagaatattatttaaattttccatattcttttcttacttttcatatccttaaattttagaagaaatgcttaaaatactaaatgttcaaaattactctctatcaaaaagatgaatatagtaattttttaaatcatgtttttgttttcaagccaattttccctattgtttaatagttatctactatgtctactcaagttctcaggtcctgtttttaaatgcgataacctacagaccacatttgacagtttactttagaagtaagcagacttccaaattaactcgccctggaaaggtttcgtgacttgatggtgacattctatctctgagtaaagtattttattacgagttcctcaaatgattgatgtactaattactgtagaacctactgacactaaataggacaa

SEQ ID NO: 317235 - DNA, 4001 bp, Homo sapiens
aggcacatgtgatccctgccttggggctccctggtctcatctgtttctctgttatttatggataatggtaacgtcattacagggttgttaggagtgtgaagtgaggttatatatgaggagtactttgcaaatgtttgtcatcgtcatgaaaaacatagataaggaattttcttaaatgacatcctcaaaaatctcttaaagttcttctcctcctcagataaaaagcaccttaaataattatcagtaaagaatcaacaaaatacatcatgatgctttaaaaacaatggaatgtattccaccatgacaaagaacaaggcaagtcgatatgtaatcatatgaaaacggccccaagatatattgttacatgaagaaaagcaaattccagaagagcacgcctagtgtgatatcatctgtataaaaaaagtcagtaagtatataaaaatgaaagactatacaccaagctattaacagtaattacctctggagaaagaggttgggtgagagatttccatttttaacttatatacttctattacagcttttgtaattaaaaatcaataaatgatatttttctaaaatttttacacataagaaaaattagaaagtggctctgactaaataggtatcccatatggctgcttaagagaagaagatggagtcatctacggacaagcagagaacattctagaaatcaataagaaaaatggctgggtgccgtggctcatgcctgtaatcccagcactttgggaggctgaggcggttggatcccctgagctcaggagttcgagaccagcctagccaagatggtgaaatcctatctctactaaaaatacaaaaattagctgggcatggtggcacatgcctataataccagctacactatttgggaggctgaggcaggagaatcgcttgaacctgggaggtggaagttgtagtgagccaagatttcgccactacactccagcctgggtgacagagcgagactccacctcaaaaaaaaaaaaaggaaatgaacagaaaggggaagtagaataattctcaagggaaaaactaaaaatgtgaaaacttcataaggtcagccacagaaaacgagcttgagggagcccgagattgttgaatcagcacctttggtaatcaccagctgtcttctccccctgatgatttcccaagctgagccatctctccaggtgatgagtacatccacccaacgtgggtgagaccccttctccttctagaatttgacttagcatcatcaatgcctcacattatcatgaaaaacaaaaattagctaggggtggtagtgcagcatgcctgtggttccagctactcaggaggctgaagtgagaagactgcttgagcccaggagttcgaggctgtagtgtgctatgattgcacttatgaacagccactgcactccagtctgggcaacatagtgagactctgtctcttaggtggaaaaaaaaagtgtttatctgtccactaagtgagcccaagaaatccagggcagaatggtcacccagcacttgaagatctcatcacacagatagcaaagaccccatctggatgagttgatagataacagaggagctgtctttgacctttgtctcaaaacaactctgtatttatttcctaggtaaaaacataagtgtcgccctcctgttctcacccatttctactttaggctagacagaaagttcttaccttctttgctgggttttttatttaccatgagacacaacaaggcagaaatctctttaacatgcaggcgtgatccccatcctgtcttcagagttggctgagggatcccaggctgatctgatttctttcagacctacagagcccataaagaaggtgcagccctagtctgccatgtcttcttcctgaaaagcaatggtgacattcacagccctggccaagtattcacagtgacaggaaggaaagttcaggcttcttgcctcgaaggagtaggcaccccctgacgtcagtcagatcaggcccccaaggaagatttgaagggggcgactgcatagtcggggtatctcccatatacccaaggagatgggtttctctaacagcacccacgtcagtcctaaatcttcttactctcctggattagaagactgtgtttcccaggccacatctgagaagcctgagctccttagccctgaaatagcagagtgctgacaagacacaggggcctaggggctctggagtccaaggggagtcctcagcagaagacacataggaggcattctttgttggggctggcttttctgtttgcaaagcctgcttgaaatatcctgccctttctatggacactttccttaggatataacctaatctgtggttaatcactattcttggacaacttactttttcagttaatctaagatgctcgtgtgtgtgttctggtaggtactaaatgcaccatggaaattctcaaagaaagtgatattctgtttgtctatatctagtaggtcaagtttgttcattattattattattattattattattttgagacagtcttgctctgtcgcccagactggagtgcagtggcacaatctcagctcactgtaacctctgcctcctgggttcaggcaattctcatgcctcagcatcccgagtagctgggattacaggcacccccgctgccatggccagctagtctttctatttttagtagagacagggtttctccatgttggccaggctggtctccaactcctggcctcaagtgatctgcccacctcagcctcccaaagtgctgggattacaggtgtgagcctccacacccggcctaaatttgttaattatattaattcagatcctctttatctttgtttattcttcctgatctgaccatctttgaaagaggtattttgaagatttctatgacaagtacagatttagcaaattctccttgtatttgagtctttgcattacacgttttgaagctatataattagatattaaatttaaaccatgtaaaattgccatcggcaactgtgtaattacacatgaagccgtattgtcatttaactgtcttggtagagggtgacataaaaattaaatatcactctgccttttaaaattctttttgcatttgattctcttttgtctgatattaacattttcacattagcttagtttttgttagtggctgactgctaacattctttctccaagttgactaaaagactgataaaatcctgtattactgagagtatgagaaaaaggaccctctccatatactattgctgggatcgttaaaatgtttcattttgggggaattaaattaaattttaattgtaatttattaaattacatacttaaaatatgtaaatcctttaatctagaaattatacttctaagtatcttacagaattatacacccatgcaaaaatctatataaggatttttattactgtataatttgtgattaggaaaagttggaaaataacctaagatatttttttatgtggtattacccatattttctagtttccatattgatgctttgacattttggggccttgttgaccagggagagactacacctcctgggattagctgatccctgagatgcaaactaaccaatctagagccctaccaccaaatccctccttttttggactttcatactcaaggccgttatctctctaccctaatcaccctgacatcatatatcagacaactcagtgcagtctacagtcaggagtcagctgacactattccaactagctagtcctccacctgcttagccgccttaccctgcctcacccattccttccctcgaaaaccacagttctcctgtcctctgcctgtgaccaacctcagtgttctctcccgtggctgtgcaggtgtgacctctcctcttgggaacgaggagtaataagctatcttttaaatggcaattgtcccctgatctgttggccttatcatacctgaataaaaatagaatctacattttaaaacgtttatgcatttttaaatgtctt

SEQ ID NO: 317236 - DNA, 4001 bp, Homo sapiens
tttttctcctgtacacagtgcacgaaaattttccgcagttttgggtacgatatctgcaaacaattctaagacaattcgaccaactaaaagaaaagaaaatcttgtcagtatgcaaaacaaccaaatagacaaatgataaaaagaaggttggtataattatggtagcagatcaatcatgaattaccaagttcccctttactgtaatttttcttttttgcaatttcaagaacacaacacattgctactaactatagtcattatgttatacaatagatctcttaaatttattccccctttctaactgaaattaggtctctcgtgatcaacatctacccaacccctgaaatccaccattccattctctacttcaaggtcaactttttagaaaccacatgtaagtgagatcatgccttgtcttcctgtgcccagcttatttcatgtaacataatgtcctccatattaattcatgttgtcagaagtgacaagatttcattattttttatgggtgaatagtactccactgtgcacatatatcaaattttaaaaaaaatccatctgtagatggaaacctagtttgattccattatcttggctatcatgaataatgctgcaatgaacatgggagtgcagatacctctttgacatacaaacttcatttcctttgaatatactcactagaattagtgaatcttattttattctaatattcaaatttagtctacctactgtcatgtatgtatataaacagatttgaaacattacactaaggatcataaccaattatagtagccaaaagattagcaccatgtaagagatatcattaaatacaaatagttttaaatcctgagtaatttcttcaagaggtactgagaatttccaatcaccaagcaaccaacgggagaaaattaaacagtctttgggtgggcggacttgccacgtgttacgtatacctgcagcctttgtgctctgagcaaactgcctcatgcaacctctgaagcaaaagctgtaaaaattcctcctctagatagcagctaagacaggtgagattaaacctagccctagctagttgcaacaaactgaatgtacgtgtaaacgtgtgtgtgtcctgtacatgcattcaaacacattgcctggccagcaattccaacgtgttccagaacaaggccaatccagttacaaagcaacacgctccctaattcaccaggccttaggaacttctgagcggctatgtaacctaggcaacaccatcactacgttgagcgcattttcccaatggcaaattaagagaaaatgtttgctcatctgaacggacctctaaattaagaatcagtaataaggcaaaagcaatgagcaaacaagtccctttaacgtataaataacacagcacgtgctgatatattatctcatgtggcaaatatagtttcctggggcccagcagacgcatatcccaggatatgctttccgaactgtcccattgcaaacataaaatatttcatgctaacttggtagtgcaaaggtggcgtggaagtgccaccaaatcaggaggcaaacctaaaggacgccacaattcccgaactagaaatttccagaaacttccgcaccaccgatggcattgatacaagggcgctggatcgatctagccctagatctccgggcctgctccggcggaccagcctaggcagccatcccctccgcgaaactgagcagtcaccggccggagccgcattccgcccttggaatcccccaaatcccgggaacccccgcctcctcggggcttttccgcgagcgtcagactccgctcacctcgctcccctccgatgtccacgtcaaagaagactcgagggttactggggttggagggcttggcttggggggacgggtgcgacatcttgacttgcagacgtgtttagtacggaatatcagagtacctagtggccgcccgggccgcccaaactccagagtccgtctccgccggagaccggcagcgacgctgaccggccacttccgacgcaagaaccggaagccatggcctgacttccggcaccgccccgctcccccgcgcggtgtttcaaagagcctgagcgactccgtgcagcgaaccgcgtgccctccgccacctgttcctggcttctcatttaatgaagttgcgatcccagttctcattattcttctcgcttgtgtttcgttgtctttcccaccctcgtggcgtagagagctttggagtcaaccccatgccagcgtcagctctgccaccaagttgggtgtgacttctcagaaactcagtttgctcctctggaaaaagaataaaaacgctgacctcggaaggtcgttttgaggattaaagacatgaatcagtacaatgcctggcataaactggtggtacccaaccaataggagccttattattgccatgtcgttacaatttgatcttcacattacaatgtaagtggtaaggcttagactaaacgctccaaacagctaaagctgagagtccagaagagagcacagttttgattcctgataaaactgtatttggcggggcgcggtggctcacgcctgtagtcccagcacattgggaggccgaggcgggcggatcatttgaggtcaggagttcgagaccagcctgaccaacatgatgaaacccgtctctactaaaaataaaaaaaaaaaaaatcacccgggcgtggtggtgcttgcctgtagtcccagctactcgggaggctgaggcaggagaatcgcttgaacccgggaggcggcggttgcagtgaaccgagatcgcgccactgtactccagactgggtgacagagcgaaactgtcccccccccccccaaaaaaaagaaaaacaaaaaaatactgtattactatagcccacttttcccttatggggatctgtgtaaaacatttactttttacacacacacacacacacacacacacacacacacacacacatatatatgaggagaacatagccttgcctcttaataaagcctaattttggagaagagtggcaattccctgtgtagatgctttgccctgtagttctattggagctcagcaatttggattcagcctgaggcttactttatcaataaggcaggagatatccttagatgcttcacatttttttttcttatgagaaagtaaaaagtattggaatccagcactcaaataatgtctcaaaagccaggagccttgtgtcaacagcagcagccagagtggctttttggaaggaaagaccagtgctaattttcccctatcagagctgtcaccatccctctagatgaaggctcctgccctacttgctacccggtcttaggataagtaaaagttagaagggttacggttaaagaacaactgattcctattctcaatttgaatttgcctgtgatgttatacactggactaagcacgaaagttgatgttaaaaaagaaaaaaaaaaaagcaaaagcttcaagttctgactacatgtatactaggcatgttaccaaagaaaagtcatttaatttctctgaacccttctcatttccttttcggtaaagtgccaaagaacagggtatgagaatggaaaaagataatgtgtaagcatttgccttgtaatctctaaagcattcttatacactcttttttaaattactgaaaattagatgctatagtgcctgaagttgttttaaaataacctggagtcaggtaagtgggttgggttgtggatgaaacataagggccaggcagatgattggtgcatgggagtttattatactactcttctttattttgcacatttaaattttttcataatattttaaaaagtaaaagagaaattacatgtattactagctactcataataaaaccaatttgttggccgggtgtgatggctcacgcctgtaatcccagcactttgggaggccaaggtgggtggaaggcttgagcccaggagttcaagaccagcccagacaacatggtgaaacctcatctctacaaaaaatattttctaaac

SEQ ID NO: 317237 - DNA, 4001 bp, Homo sapiens
ctatatcccaaacctgtaactttataatgcctttaagaactttccttcacagtctattatgtcaccagccactctcctctcttctttcctcgtctctaaggattgcagtcaaggaatttgcctgggtgatcagtagtaatgactaaggttgcaagaaaaaattattagcgagaactcactactcaaatattgtaactaaggtattttatcagacacacacacacgcacgtgctgctcttcttcctgccacagctgcctaaccagaacaccacaaaccatggctgtttttctttttctttctgagacagggtcttgctctgtcgcccaggctggagtgcagtggtgcgatctcggctcactgcagcctcgaccactcaggatcaagagatcctcccacctcagcctccggggctgggaccacaggcacatgccaccacgcccgggtaatttttgtatgttttgtagagccgaggtttcgatgtgttgcccaggctggtctcgaactcctgggctcaagcccgctttggccttccaaagtgctgtgatcacaggcgtgagccattgctaccggtctcattgctctttttcatcgtcattgtaatctgtcactttagtcgctcattctgaaaccgaaggacagcctcattcctccgccctgacggaaagaaccgatgaggccttgctgcacgttagcagtgggaggctcagaaaagcccgtggagcttttgagactgcaaattccctggctatttccacctggagcctctttgtcacatccggtgaattccctcatctacagaaagcggctgctgaaaaagacatcaccagctacaacgccttgagtactacagcgctccctgcgcaaagtaaaacccaagtcttcggatcaaaaccagccggggctgtgcatccttcacgatgccggacctcctgaaaagctcacctgggtacagctcaggatcctggcctcggctcgctggccctgacaggcgggtggtcagggtgacacacggtgggaagaacacacgcccgcctgcctgcgaagcctcgcaaatagctgggctccctcggcaccttctgccgccaggtctccgcctcccaacctccctctgggcgtaccgagcccgttgtcgccacgtttccctcgcccgggaggcaacgcggcacccaccccgcagcatcctcgcttccggggcctcgggcaagggtctccagtcccagcccacccaccctgcccgcctcgcgccgcgctggccctccagcctgcggccacattcaaggccgagcgcagtctgggctggaaacccgccgcccggggcgcaggcagcccagctgggccccgcctcaccccgacgagctgctcacgacctccaaagggaagaaagcgacgctctgagaactccgagaggccgccggccaagcgccgactcggggggcgggggaacggaaaccgacgtctccccttcgacctcccgggaaacccttctccgtttactctccattccgcgaccgccaataaagaacagcatacatggttagcagaaataaatgaattgcactctctaggctcttacctctggatggctacgtccctgaaaaatgttttaattagctaacggaggacgggggaggagctttcttggtcggtaaataagagtgccttctccgtcgtctcggatctccgaagcaagcagtcaaagcggccactgccttgcctgctggaaattctcgaaaatttttctcccgcagttgaccagatggagagggagaagtctgttcccgctgactgacagcagatccggccagtccgcactcggcgagacggctggccggccgcccgggccctcgatcgcagccagtcacagatgccgatgggaacgagcctccccgcggctgctatttgacttcgcaggcttccagctgcgcggcggagcgacgtcaccctgtgccagtggtggctcgcggcggcgccccgccctcccgaggttagctccccagccaaagagggggcgcgcttgcgcggtgggtggggccgcgagacttggtacctagccagcgggcggagcgcggagggggtttcgcttcgggctaagggactgtagttgtgacagccaggaaaccgagaacggaatgccaatactgcttaggcttagagtttgaaaggcatctgatttcactgccatgtctttgaacagcagtgcacagtgcagtcttcttcgtggctgaacaggtatcttgtgatctttagggaatgtctattaattcattaaacaagtatttctgtgtttattgaaggacgtcttgtatgctatacatttgctaggcactggggatacgcccctaacacagctagacacgatagctgccctcatagaattttcagtctaacaaagaagagggagaaaaccaacaagtaagcaagcacatagaatagtaattaatcatgtcaaggaaagaaataggcatggtgtggacactggaggataacttcagataagattgttatatgagaactttataagatggcatttaaaccatcagtcattcagccatggaaccaataaaatgatgaattgttttgggcagaggggacagcagacaaaggtctctcggtgagacagcccggcgttttggaagaacagaaagaaagccaaagtgtctccagcatattgagggagggaaagaacagcatgatgtgagagagatgaggcagacaggggcttggagttggcattacattttaaatttaatgggcttctattgaggcattcgaaaaaaagaagtgaaagggtctgggtttagactttacatcactttggttagtgtgcaaagaacagttaaaataagctattgggaaactgattaggagatgatgacagatgaaatttaaggtggaagatgactttgattaaactatgacaatatcactgaagggagagaagagcagagagattagagattttaaagataaataattaacttgatttggcattttagttattctaggccagggacaactgttttgaatccagtgcatttaataaccaggttagagagtgactctcatattgacggctcacaaattatagtaataaccttgagtaatattatgttgagttgatgtcttttcatagacttcctggatttttttttcttttgtctttctttcttttttttttttttttttttttttttttgagacagggttttactcctgcccaggctggagtgcagtggcgctatctgagctcactgaaacctctgcttcccaggctcaagtgatcctcccacttcagcctcccaagtagctgtgactacaggcacgctcaaccatacacagctaatgtttatattttttgtagagatggggcttccccatgttgcccaggctggtcttgaactcctgaactcaagcaatccacccacctcagcctcccaaagtgctgggattacaggcatgagccactgtacctggcgtggaatttaaaaaaataataattttattgaaacatgtgtcttaaaaagtgcacatatcctaagtgtagacagctcaatgaattttcacagtctgcagacacctttgtatccagcacccagatcaaggaacaaaacattattaatacctgggaaccccatcaacctgccttccaggcactgccttcttccaaggggagtttctatgctgactttcaacagcataggtagttttgcctatctttatacttgttatatataaagccataaagtatgtgttcttttgtttctggctacttggactcaacattacacttgtgagattcttccatattgttgtatgcagttgtagatcattcattttgttttccattctgtggatatactgtaatttatgaattcattcttctgatggacattagggcagtttgccatttagagccattatagatagtgctactatgagcattctactacatatctgttggtgatggctttcatttgatggagtattttggtagctaagt

SEQ ID NO: 317238 - DNA, 4001 bp, Homo sapiens
ctacacacacggagagagacacaaacacacacacagacacacctatacagacatagagctacacagacacacttggatacacacacagatacacagacacacccacagatacatacatggatacatacacacactggcgtttagaacccagggactgactcccagcccaaagatcttccgtgacccattgccagccgcaagcaggctctagggagtcctaagagagctgaagaaggttctacatcgagcctgcctaccccttttctgaaaagcagagaaaggccatgtggcattcactcactcacgcactcactaatcgacagtcaacaattccacactgagaagctgcgatttgccaagcacagtcagtgtcctgcagacatgaccggatatagtccctgccctcaaggggtgagggtattcccaggggtgaggacacctgggacagagaaggcatcccaggtgggcggaaaccctcactccacagcagggaggtaggaaacagacacattcaggggcctggagggagctgagcatgagcaggcgaccagggcgtggtcagagtgcgggggacaatgagactgaggaggcagctgcagcagattgtggggcactgacagctgacagaggagctcacctgtgggcaacgggccccactccctgccacagcccgtcccctccatgttgctgacagtgtccctgtgatgtcttcccgtgacagtgtgagcacatgccaaagaggactcgccacagcctctggagctctcccactggcagctgtgtggcctcgggcaagttacttaacttctctgcacctcagtttccttatcctataatggggataatgtggggaggattcaacggagtcgggggggggggttggatatttgaaagctcttggaacagtgtgtttgttatataaagtgacagagaccagcaccctaccccggtccaccagccctctgtaccttccatcacccacctcactgggcccctgaagggaggagggaagaaagcaaaaacagattcctgggccctcaccagtaccccccataggcctcttcttttatctctgccacaaccttgcccgctaagcaacgtcatccccatttcacagaagagaaactgaggccctgagagagtaagccacttgctgaaggccacccggccggtcagggcgaagctaggattcaatccaggcggggcagcgtctcgggccacagagtgtgtggtccctgtccctgggaccctccgcataaaagccaacccgggtcacttcccagggtgcgagagcagctgtccatcccaccaacgctcttcgggctctgggcgcgccactgtcatggactgtccctgccagccaaaaaaaaaaaaaaaaggcttctccaaaccagagcagcagccgggcctgactcagcacccaccggcgcgggcagcgggaggagcgcgtagacgctgctggatggtacccgcggccgggactgaactccgccgcattgggtcttaccccggactccgagccggaccccgcgcccgcaccttcagccgggcagcgagggggggctcgagcgcgccggttctcggccgagacgctgtggctgacaccggtggagcgatctgccctggctcgcgcggcgagcaagtgctggaggcagggttccaagccggttctgtcgggttccctcaagaccccgagagcacgcgctccggagggaccccggcacttcggaccctagcagagccagccctgccccaggaccgccccggggtcggtgcccgggctctctgagtctcgcttctggcccgcgaagacgcgccctctcctccagtcgcgggagtcccgcacccgagggccgcgtccccgggcagggtgaggtcctgcggggctgggggtgaggcggggtgggcgcgaggcggctccggagcggcggggccgggcgccctgcagcccgcgcttaccttcggaaacttcgaggtcggcggccccattgagctggcacaggcaccaggagccctggtcggcggcgggcgcggcgggcgcggcgggggcgcggtcagctggcaaaacagcaagggcgcgtgagcgcgggcccggggcggggggcggggggcgggggcgcgcggcgaggctaacccggctgctgggccatgggcggctccgcaggctgcgaccgcgacgggcgtcctccgggcggctgcggggggccgggcgcggcggccgctcctcctccgcctcctccgggctcggctccctgcgcgggcgggcgggcggggaggcgcgcccagaaggctccgcccggagcgcgggtgcggggcgcggggtgcggctgcgggcgccgagggtgggcgcggggcgacgatcgcgaggcgcggatcgcagggcgcggatcgcggggcgcggggccgggcaccgggtaagaggcgcggggtgcgggcgcggggcggggtgtgggtgcgggcgctggggctgtcgccacggaccgaagcgtccctttctgccccacccaccggtccagcggcagccgcctccgccagccgtcaccgcgcgagggccgcctgcctgatggcgatgcccattttactgaggagaaactgaggcacggagagggaaagggactcaggcggagtaagcggccaaggcggggctcagctccagattgcgattctggtttgagcccctttgcatcctgcccttccccagacccgccctgctgggagctggggtcgctgcccacccccgcccccccaccgggtgcgaaggggacagcaatcaatgccatgaggaggaacgggagcttcacagccacgccctccgaccttccacgtgcaacagacgaaggaggaagagcaatcagccacgccgagaggaggaggctggacgtcccgcgggaagggccagggctagagaagcccatccaaggagggaggagagagcgtgctcccacggtgatcctaaggcacgaggggccgctggccctcttggggtcccagctgcctcaccctaactgagcacagaaccccgtgatgccaatgtgcacaaagtggaagcagacagccacagggacacacgttaatccccccactcccccctctcctaccctcccctcccaggaagggagaggagcagggatggctaaggataggctctccagggagcagaagaaggagagcagagggaaggaaagagtgctgcaggccccaggccaaaggtcaggccaccccaccccaccttagcccagttctaggcccgtgagctgcaccctagcccctctacacctcacctagcaggagggatctgccttctaagcctctgaccccctccctcttccttcttggccttgaaagtccaatttcgtcacctccacctccaggaaggcctccagggtcctcccaggagccccaaaagccccagagcagcctctccccggggcagtgcctgtcttccaacacgaggtcatcctgcagcagcatcagcccctgttctctcagttcccagccctctgcctggcacagcgtcagggcatggcggggtttcctgataaatacatgtcccacgggtagccttacagcctgaggtggggtggacctgggtcaggtcccgggcagtcacttggcatggcctagtttcatatttacaacaaccctatgaataggcataaatatccccattttaaaggttagaacctggaggctctgggtcaggctgccaggagccatgggatgcatcgtccctgccccagggttaagtgacttgctcacactgcaggtgagctgtggaggtgggatgagcccctcagctgagctttctgcacacaccagggcatggcccatttccttgagtgtgcaagggagacaggcatgcaggtaataatacattcatttattctttcgacggaaggtagacagcccctcctttctcccaggtgccaaatctggtagtgaacaaaacgaagtctcacggagcgtatggtgtagcgggtgaggaagatgttaaccaaatg

SEQ ID NO: 317239 - DNA, 4001 bp, Homo sapiens
acccaagttttcacccatgatctgggtctgtcatgctcccatctctatgttcagggctgccatgctcagtagaccttttttatcagatgtcagtgctaagaagcatccccgtggatcctctgggccccagataccaccaagaagtgacctcatttatccttggtagctaggagcagtcacccctcatcccagtgcccccttctctaccaggccacccagcagcagcaggagtccaaatggcctcggtcccagtgtccactttcacagactgtggccctgctccctgatggaagccttccttcttggggcaccaggacccccaaacacaccacgcctaatgaactagaagcaaaattagttcaaggggttatcagggggtgactgctatgggttgaactgtgtgctctccccacaaaaaattcacattgaagtccaaacccacaatacctcagcatgtgaccttatttggaaatagggtcactgcagatgtcattagttaaaatgaggccatgctggagtagggtttacccccaatccaaaatgacgggtgccctcatcaaagaggaaatttggacacagagacagacaggcacagggagaaaggcagacaccacggtgacaccatctacaagccaaagaatgccaaagatggacagcaaatcacaataagctgggagaggggtacaggacagattccccctctaattcctccatagaaactgacccagctatcgtcttcgtcccagactgctggctgccagaaccatgagacaatcaatttcctttcttcaagccactctgtgtgtagtgctttgttaaggcagcctcagtctgtagacggctacaacaagataccttagactgagtagtttatgaataacagaaattgattgctcactggccgggcacagtggctcacacctgcaatcccagcactttgggaggccaaggcaggcagagtacttgaggtcaggagttcaagaccagcctggccagcatggtgaaaccctgtctttactaaaaatacaaaaatcagccaggcctggtggtgcacacctgtaatcccagctactgaggaagctgaggcacgagaatcgcttgaacccaggaagcagagattgcagtgagccaagatcatgccactgcactccagcctgggtgacagagtgagactccatctcaaaaaaaaaaaaaagaaaaagaaaaagaaaggaaggaaggaaggaaggaaggaaggaaggaaggaaggaaggaaagaaagaaagaaagaaagaaagaaagaaagaaagagaaagaaagaaaagagaagagaagagaagagaaaagaaaagaaaaagaaattgctcacaattctggaggctgagaagtccaagatcaagatgccagcagattcgattcagtgtctgacaagggctctgtgcttcaaggatggcgccttctcactgcgtcctcacatggtagatatctgcctcggcctcttttataagggctccaccctcttgacctcttgacctaatcacctcccaaagccccaccctcaatactctgttggtgggtagatttcagcacaggactactggagagatgggaacattcagaccaccacacagccccaacacactaacacagtggccacgtctggggctgccctgtgcaatcattcataacacaccctttcattctctaaggtaccccactttggatgataaattatttgacaccctagtgattataagccagtgaagggctcctcctaactccatccactggtcctcaaacctgtgtatgtggctgtgcaggtgacagtcacaaaacagtcagccgctgatctaaggcatacaggacaaggccccacctgctgtgtgttgtctggaggccggtgtggcagccaggcctgcagccgcaggcccttctccctgcttctgggtgatgagagtgaaccccacgggcgagggccctttgccgcagctctgcaccaccgcaggaatcctttgaatgatgtgatgcttgtgggcgacggtgactgtgaattaggaattccacaatgacactgctgacagaagcgggtgggaaggcgattctgtatctggcttatgcatccgcccccctgagaacaagggaaccaacctgccccccgggtgcttgctggtctcctcgggtaatgctgccacacccaaagtcactgttgtcccctgatgttggagactgggacctcagctgtggcagtggccagctcagccctggagagttgaaggccatattttctgcctgtgtgtttccccatctctgccctattttgtgtgtgagcccaagagtgagccctggggtggctggaaagagtctgcccagcacccacaggcaggctagcgtgtctatcctgtgaccgagagcctcctgcgtgaaggatgcctctggggagcatccgcatggggcacgtgggggttcattccatgtgtcaacttgacggggccacgggatgcccagatatcatgctaaacatcatttccaggtgtgtctgtgagggtgtttccagtagagatgagcatttgaatcagtagactaagtaatcccactgtggatgggcctcccccagtttgttcagggcctgaatggaacaaaaaggcaggagaagggagaattcactctctctgtctgtctgctggagctgggacatcagtcttctcctgccctgggattggcactcacaccatcgcaacatcagccttcctggttctcaaaccttcaaactagaacaactagttctccagcttccggatggagctcaggggacttctcagctccataactgcctgagccaattccgtgtgcgtgtgtgtgcgcacacgtgcagtgatcctattggccctgtttctctgaagaaccctgactactacagggcacaaatacctcatgctctgcagtcatttgagaggtccatccacacacctcttccccaggccaccttgtcatcatcctgcaaccttgttctttccagagccctgcccagcttgccaacccatgcattagtgtagatccctactccaggctgtggttcctccccagcaacatgagcaaccagattctccccctgaagttttgcctcctgggagaatctgcaagcatctctcggggtgcccctgagttggttattatcacagaaggatgcagccactgcaccctcctccaaaggagggaagggggaaggaggcggcaaccctacttctctctccacctgccctcccagctcctggcaatgcctcctgtgggcaaaacccacccaaagactccccggcagagatccaggtggtaaatttgacaggatcaggttccaggcacagaccagggcagagagaagctggggctggaaaggaacaaggggtacaagcctccttagaagataccgaggaggattcaaggtaccagccttcaaggaggtcatttttaactacactgtacttgctaataggttcctttcctgagaaagagtagaaatagtcactttaaattcactgtattgtggtcctgcagcactgacattagaatctgggaagaatatttgaaccactcattggtgttatccaaacacacctgatgcattaggacaacaacatctacaacaacaggaactatgagccaggctccgagaacacagatgagttcttacagatcttatagtcaggagatgctgggtgcaaggtcagcaaaaaaaaaagaaagaaagaaagaaaagaaaagatgatgacgttggacccggagtacagtgatggagactccctgggtgggacgtatttagctgggaggcaaggaaggtctctggagagaggacatggaagctgcgacctgaaggatgagttagagtgagtgctgggttagcaccaggagcagagggaatagcaggggcaaagggcccgggacaggagagagcccaggatgtaccaaggtcgggaaaaaggctgctgtgtagtgagcgctgtggagatgggcacagcagaggtcagcat

SEQ ID NO: 317240 - DNA, 4001 bp, Homo sapiens
acaaacaaatgacaacaaaacaaacaaagaaaaatgtgcaacagatcctagcactttgggaggctgaggcaggcggatcacctgaggtagggagttcgagaccagcctggccaacgtggtgaaaccccatctctactaaaaacacacacacacaaaaattaggcaagcgtggtggcatgtgcctgtaatcccagctactcgggaggctaaggcaggagaatcgcttgaacccgggaggcagtggttgcagtgagctgagatggtgccactgccactgcactcctaggcgacagagtgagactctgtctaaaaaaagaaagaaaagaaaagaaaagaagagaaaagaaaagaaaaatatgcaacagagatttacacagcctgcaaagtctaaaatatctactatcaggcccttcacagaaaatcgaacttgctctgagcccacacctcattttgcaaaagaggagtatcagggactcctcttctgggatgttagggcctgggatgtgtctgggtatcagtgtcctgtggctgctgtaacatattactacacacagacagctggaaaacaatcgaactttatcctctcctagttctggaggccaggaatgtgacatcacagcgtgggcaggcctggctccctctggaagctctgagggaggagccgctccctgactccctcctggcttctggtgtgtagataaatcaccccaatctctgcctctgtcatcacacggccttcctctccctgtgtctctgtgtgtcctctccttagaaggacaccagccattggacttgaggcccactcgaatccaatatgacctcatcttaactagtgacatacacaagaaccctatttccaaataaggtcacattctgaggttccaagtggacattattcttgagagaaggacacatttaaacgcacgacagtctgcaatccccaatttttctgcatcctctggagaactatattctcagaggtacagacacttctgcgtgtgtgtgcatatgtgtatgtctctctcagtcacacacacactcacacacatacaactactccacatgacaggtgagcaagacttcccaaggacaggctgtgcaacgacaggaggctggcacacagccatgacaaatgacctgtttcttgcccagtcccactgccaatgtctccttccatcagaatgtgccaccagtgataaaggtgagaataagatcattcaccgtacatgaatcaaaagcatccccccacctgtcccgttctatcaacagcaggcagccaggatctcacaggtccagggacttggggctgcatgtgcggcctctcgccccaaggacagatgtactttttctgcaaagtgtctgccacacccccgccttgcgagtccggaggcagctcccccagctatgtccctgccttgggaatccagaggcaccccttcaccctttctctatgctcatctctgactcccacctgcttaggtctggaaagggaaccactgttggttaagctctatctgcgggacacgaactgtcatccaggaaattatgggcttggtcctccaactaactcaacaacctctcacagagcaaaaatggaaaagctgatgcccagtaagaggactggttaaacatgagacaatggagccatagagttggaaaccagacctcgacgatgacggcacagataagtatttgacatggaatgacggctgggacatgccagtgcccaggtctgtgctggcacacacacttgttggatgttactgatgggatgtggtagatgatgtcccatcatctgcttaccaagcctcctcctacgccacctaccaggcaggcctcagaagggcagcagccaagagcttgggcagctggttctcctcgatgtgcctgaggagggcttcgtggaggaagcggtgctttgtgtgcacccttcttcctatttggggtgtccacagaagtggagaggccacacctttctctctgtttcccccaaaacacatgcaggtatgagccctaggctcagcccatcacacaccacttcctggttagcacatgaccagtgggggccaatcagatgctcccacctggacccaggagccaatgccacaaaggagtcagggctgtgcattcaatcatggtcgcactggctggcccctgaaggccgtgcgggtcagcagctggcctggcctgccaaagacaagcttgtgcttcctacttctgggattcccaggctgccattttaaaaagctggtttttccactcttgctgaatctgcaggccccaaatggagtgagggtttgtcctcatgtttgcaattccgagcaccccaagtgacacctaagtgtttgataagtgtttgtggattacccggaagtgccgctctagatactgagtgtcatccgctttgcaccaggcactctgcgggcagccaaaatggcggccgtgaaaacgaagcccacagacctggctggaatgctcacgggcagatggaccacaagacgataaaccagcgaggtgactccagacgcgagggggctgagaatgacgaggagagggcacgtggcataggacggccgagggggagccacctgcactggcactcggaggcccagcctccctgggggactgacatcttctgagacttgaaaagaagtcacagttcctgcccacccacttcacagttaccctgttggtaacagaatgaaataagatgtaaaaagggctttgtgaacaggccaggtctgcttaccttcaataatagggttgtcatcttactctgcctcccgataaccaaatgctttgcatgtgctgagcagaatgtaagtgaagtcaacttaggaaagaaatcccataatgtttcaagaagagctactccctgttgcaaaaaccgaatcatgcccctgagacgctgcagccggatggcacattggtgcaattttttttttttttaactagagtcttgagtagtcaaaactttgtttctcacaaatgctcaaccagtcttcagaggctcacaccaaaagggggaattgagacccaagacttgggaggttgatgaggctccataaaatattgactttctaaccagccaatagcagggcactgaaatggagacaagtgcctctgggcttagccgccacttgcgtgagaccaaggcagacggcgtggcctgcaccatctctggaggcacactagtggaccagggttcaactatcagtgccaacgcccgccagcaagccctgtggctccggcaaacgagttcacctctctgagcctcagcgtcctcatttttttatatgggggaaatactttgctgctagagagagcttgaaaaattaaatttggtaactgtattcatttctagtgccaccataacaaagtgccccagactgtgccacttaaacaaaagaaatctatttcctcacagttctggagctggaagtccaagatcaaggtgtcagcaggatggtttcttctgaagcctctctcctggcttgcagatggctgtcttctccctgtgtcttcacacagttgtccttctgtgtgtgtctctgtcctaatctcctcttcttataaggacacagtcatattggatcagggcccaccttaatgatccagtttaaccttaggtacctctgtgaaaaccctgtctcaaaacacagtcacattctgaggtgctgggggttaggacttcaacatgtgagttttggagcagacacaattcagcccataacagtaacacagtaggacctcagtatatgtcatgcttacttgattagagtttttaagtaacaacaactaaccttgacagagcacctgccaagtgccagcagcatgccatatattctacatgcaccaacccaatccagggtacaccccagtgagaaggggttgtcatcgcatcccagggccacagcactcacatctgtcacgctggctccccgatggctgtgccctacctggaaggggctgcaatacactcatccaggcactgtttcatt

SEQ ID NO: 317241 - DNA, 4001 bp, Homo sapiens
cgagccaggccaccgaggcacgggccagcaacccggcggcttcctccaaccctctgtcgctgcaggctgcgagcagaaaccacatcccggacccacgctgatcccgactcagcctcgccgaagcaggcgacaaaggaccgctctcagctccccgggcctcccaaagccgcggccgggtcagagccccaccggcccggaggcccgggcagccctgcccctctctcgcacacacccggcggcgaagcgtgcgtgactcagcggttctcccgccgggagcgggcgcggcccccgcagcctccctccgcccaggtcccacgcccagcctctgcctcccgggccagggcgccccgagcccgcccgcgcccgcgctcgcgctgcgctccccgggcctccgcggggctccggctccgctcggcctcatttccggcagagccaggcttcgaggaggcggacccagccgcaggagcccggtctccgccgcctggcccactcggtctccctgacacaggcacccacgcgcacctgccccgcgggacccgtgcccagggcccctcccactggggcacccacccggggaatccgcgcacacttctgcggccgggccgccagcccgtgggttagcggctgacagtccccgcactcgggcagggctccagcacaggcggccccgagcccagacctcccggtccccatcctccatcggggtcactccgcgggccctgcctgcgcacggaagctgtccccactgttcccctagcgaggcagaccagggggcccccggaagttccaggcctgtaagagaggggcgctgacccaccagcctcgggggtagggtgggggtgggggttgggcttgtagggccaacttaggggattttaaacagggcctgtttgggatggcatgtcccacttttttggaaaatcccgacagttagcccagctgctcctgtctcaatataactcaccaggaataaaaaggccagccccaaaccagccgccttctccctcccactcagggaccctgcctctggaggacagggaggggcccgggcaggcgggcctcccaggaggatctggcaatggattatgtttttttccccccgggtccctcttcttctccagggagagggcagcctagaaaattctgcgggctttgggcagggctgaaatggcaaatccaggatttaaaccattaaatttccccgagatttcttcaccagattagccacagccgtggccttttaaaaaattatggtcagggccgaatcaggatgccacctggcttgggagaggaaagctgcctcccggagggcggcgcggaggagggcgctgccctgtgccggcgctgggcagcggaggccggtaccctcgggctccctccctcctgggccccgggcagggtgggatgggatggggtggggtggggtgggatggggtggggtggggtggggcggggggacacgacacacatcgcgcggtccaaaccttcggagggcattcggtgcgacggcatccccacgccgcggccggccggaggggtctcagacaacacgtacgttaccttcagtcacatagctgtggtcccgcaggaagctgtggttaattttccgcgtgtccgtgtcctcgcccattgaaggccgtgcccggtgctctgggcatgccccgccgccacacaccgatgcaatccgcagaggtcgcgccgggcgcgcgggccatgccgccgcagcctagcaggggcgcgggccgccggggccccgaagggagggcatcgcggcagggggacgggcgggggcggccgggggcgggcgccgcggtcaagcgagcgcgcggtgggcgggcggcggccgcgggttcgggcgggccggggcccaggcgcgcatcccggccggcccgtgcgcgctgcgtccgtgcgcccggcggcggggcctggtgccggtgcgcctggctgcggcgacggcggcgaggggacgcgcgcggcgctgcgctgcgccgaccaagccggggccgagccgggctgcgcgggctggggccgccgccgccgccgctgtcgcaggcccctccctcgcgccgcccgctctccgcccccgcggccctgcaggtggagccggcgcccaagccgaggctgcaccgccgtgctcgggccctcgcggtgggcaccttggtgctgggtgcgccacgggggagggaggaaggagaccgccagcttgcggggagagggtgatcagctgagcttggggggagggtaccttgggtgcccaggtgctccagttatgggagagaaggccaagagccggggtgctgggaagggggcaggaggagagcagcctcgcaggcagaaggcagaaaggactaggaaggaaggagtggggtcgcagttgaagagggcgcacctggagaatggggactcgggggaggggaaggacactgtctcccttcattagtagaagagggtgggtcgcgcaagttctggggcccgttgggagcattaagtacatgtgaagaagctggtggagggggtccagcagccgacaaggcaaaactggatgaaatggctggaggggtgattgggcctcccccaggcagggctctgagatctctcctcatgcccacctctcctgacgagtgagaaagttaaagaaatacagagctaggtacctccaaaaccaggctggaaaatgcgtccccctcctcccttccctccctcccctccaaacccagggctctgccaaacaggaacctccctctggtaatcagcctggcacatagtgggccctcaaaaaatatttgcctcctgttttgccaagctgccacctcctccaccgtgacccaccgcctaatgaatcacagtcccctgcacgggacacaagccccagtggggattcagaggtgtgggtgaggaaccatcagccctccctaggagctcaacagagccttcctggaaagcgagggactctgtggcttgcctgggaggggtaagtgcagtggggtgaccagagctgcaggggctcttgggtctaaggcatcagtggagccatgctccaggtgggggctggtctgtaatggcctccacttgtttcaaatggttctgggggaactccagacagctccccaaactgcagtggaggtaggagagtccaaaggcgttgggggcagggagactggggctgtgggaaagacgagggaaggtgatgccgtctcagatttcttggagattgagagggagtttttgaagctacagctttcgtgcctttgaaatccccagaatggacctatgaggagatgaaagccccccagcagccccaccagcactctgcaggctgtcatgcaagggctggcctggggagaggccctggggccctgccagcacctgctttggcaagtgccctgccctgttccagcctctaccttttcactgtggaacaagccaaaatctcccagctgtgcagactccattcaaggaccaggtaaatgcaagggccggaaggatgtgcttgttctttgtcactttctaccccgtaggaaagtgaccgacacccacattggcccccacccacctggcatgttctcctctctctctctcacctgtctgctcacatgccccccacctcacatcctaaggccagccccccactctctgtccacaccccctcacctctctagctggagccagcaaaatggctatgctgggagaaagacaggctgggttcaagtcctgaccacaagggggcccaggcacaacctcatctgtaaagtggatgtgatggcaggagtggccccactgggttggggtggccagtcctgctcagcaggggtcaggcctcctgggagctctcttgttatcatgctgaggcccaccctcccgcatgttcctcagcctccctctctgatcatggagaagtcccctctccctatctgtcaatcctgccaaaacacccaccctatgctggcatcagcctcatctcccgggatgtcctggactacaatgaaaacagccccactctg

SEQ ID NO: 317242 - DNA, 4001 bp, Homo sapiens
atcctcagttcgtgggccatgctcaggagtgaatcgggggaaagatgattccgcaggtcctctcttcacccccggcttcctcccctccctcctacctccccttctccaccttctcttctcctcctcccctcccctcccctgcctctcctgctccatcccctcctccctcctccttggtttcctggatgtcttctgcatctaattccaggcacagtccgtgtttgcggggggagacgccctctctgaggccgggtggtgtgtgacgttgctggccactgtcctggcgtcgggcagccaggtctgctgttcactagctgggtggcttctctgagtttccgcatctgtcacaggggtgtggatctggccctcggaggtgagcagtgcagagtaaaccagaagcaactccagaatacttagcaagtgttctcagtaaatgggcttttgtcccgaggctctttcagtgttccagaaacgtggtcctgggcaggttgtccaggccactgctgtcttacccagagttctgctggacaacaagcccccgggggtgggggtgaggacaggggtgaggacaagggcccaggcctgagcaaaaaccacctagctcagtctgagggctgtgacagctgggcaagagtggagtcctcccgctccccagtctggccaggacaacgcaggtcacccaggcagaggaaggtttcactgaaggcacaagctggggcagcagctgcctgtgccacatcctgaccattcatccagggtctaggacagagcatgggatgcaggcagctctccgcaaacatcggctgagggcagggggctcagaacctggctttgccagcccacccagtgcactccccctaccaccgcccgccactcccacctcggcattccaaagcatcccattcccacccctggaatccatgcccctgggagatgtgatccaggcaagacaccccacacctcctgtcagttaaaagccctcttgtgggttggagtatagtcccctcccacctctcaccgcatcaccccttatcccccttatccttatcccctcccaccatgcccgcctcccacctgactctgctccccacccctcccacctcccaccagacccagggcttcgcacctctggttcccgctggaagatgacgacccggccgcccttgtcacctgtggccagcagctctcccgtgtggttgaactcaacggtagagatgatgtcagctgggaggggaacagcaagacgggaaggggtggctgtcagaacccgcctctcccgggtgctcaacagtgccacagcaatggcgagctccccgctccccgaggccccacagccctgggcaggaggcagcagggagcctgaggggtcaggagcatcggcgaggggccaccaacctgtcccctcctgccctcctcttccctctgcactggctgcagggcagagatctcgggacttggcacaggcctggggcgaccacagtggctggcagactttatagtaactggacactctatgggactcacggtggtatctgaagccacctggatgtggcctcatcctcctgtcttgaatctcccacacctacccctgccacccaggcccccatgctccagcaacctgggtcagggaagcccttcccaatatctccatagataagcgcaaggcaaccctctgctaggggcccactcagggcttcccacacagtaggacagaggtgaattaccccctctccttcagactcctgctctgtggccccacctccaggcaggcctctgggatcgctctctaatctctgctcgcagaagcgaagctcagccctgcctgccctgaccctccctgcacttcatcccaaccatgtttcttcaggtcactcaggaacctctccttatggagtcacccccatacctggagtcttcaatgcccagggctggccttcctggatgggcaagtgtttggagaaaaaagacagccccatctccaggccccactttttgcatgtgggaactaggggaacaccccttccatcaccaacattctcaggttctacgagtcacagagatgagtggcctgcacattctgggtggccagccctgggagtgggggagagcaggggaggacaaggccctagcctggaagagaaacccccactggaggacagctcaccaacctgaagcctgaggcctgctccaccaacaagttttactgcagccccaaaatgattattacttttaatttgaagtcattcttaatatttgaaaagtagaagatttcctataaaaatccacatttccagtatgtcttggaagatggaaagttctagaataccatccccataggcccaagcagcaaaagctagtaggagcccgggatggcccgctgctgtgaatgggacctctgtcgttctttgctctcctggcctggattctgtagtctccaaaatctgtgataccacctttagcaaaatggatctactttcaaaccagccacagatctgaccgttgctccctgtagccacagagaggacactccacagggttccctgtcccagcctctgttctccctctggcggccaacgtgatgaccaaactcctgagccagtgcatccctgtgtccctctattcaaaacccttcattggtcaccataactgaattctgatccctcctcagcctcatcctctgcagcttccccagtctcaggtgatgacagctctattgttcacttgctcaggcccaagccttggagtttctcgttctctctctctctctctctctctctctctctctctctctctctctctctctctcacacacacacacacacacacacacacacacacacacacaccccacatccaatcctgcctgctcagccttcacagcatatcgggatgccagccactctcccacctctcactggatgactgccacagctctttctccctggctatgacgtagcctcaacagactggcagcagagaggctggtaacacccaggactgatcctggcactcccctgctcaaaaccctccagcggctcccattgtgtactcagagaaaagcacagagtgttctaaaggcagcccccacctgccgaggcccaggtgggccgcatctggagccaaaccttcacccctcccatggtgggccaggtgacctgttctctgccccccaccttgattctgggcttgtccctgtgttttgctttggcctgcagaacggcaattcgacaagccgcaaacagagatgcaaaggggcttaggtactgggggttgccatcaacgcctctggcggtaccaggagcaggacctgcgcaggctggcccactggcccctgagggggaggaggaagagtgggtgcagaagaacccccccaacccccggccaagcccagcctccagcagggccccactgacccacagagcagggcaagcccagccaagcccagaccacagaatcgcagatgcaagatgatgaaaacatttactgttgtatgcacggggtctcgtgtttttaactcagcaaaaggtacctcctccccttccccagcctcatctactgctctccacctgcttattcccctccaaacaccaggctccttgccctttcccaaaagtcctggccacctgctgtcccaagacctgctctctcggcctgcagtggctttccctgggtaccagcatggctccttcctattcttccaattctgccccactgctgccttcccgtgagcacagcttggatcaccttgctgaaactgctgtctgcaccccagcaccctcatacaggacaccctgaccatccctgccccaacctaatctgatgtttttctttctgtaaaggcttttatcatctgtaggctctcttcctggccagaacgtaaacttcatgagggcaggagcctcaggcttaattcacggcttcaaatggtgcctgtatgcagtagccaggccagagatatctatccaagaaatgccttttctttttccagtctgggcctttta

SEQ ID NO: 317243 - DNA, 4001 bp, Homo sapiens
aacacacacacattacaccagccagtgctgtttccaatttcagaggcccgctccccgcacagctcatgcccatctctgctttgcttggtgtcctgacccccaggaatgtgagatactacttaatccaagtggttctgctctgttgcctcagccttccaggattcataggatggttcctcccccactacacctaggaatacaaggaggccgatagattcccgtgcgacagagtgatcaaccacagcctgtccccttcctcactccgcacatcccagtttctctttgccagcaacctcagtgcatccttgccaggagtttatcatcccgtaggcggcgaagaggaggcaataataggaatccaacagcccgttacaaaaaggatgccagggcacggaggaagcaggcggaatgaggttatcacttgggaggtgtgcacgagtggagaaccctttaagagcaatgacaggtcggcgggggacagccggggatggcaagagaggctggagaagtggttttcgtgtctctccccggggcgtgcgggggaaatcccggggcggcaacggctggtgctctcaggtcgttccccgcctcccgcgccccccgcggccaccctccagccagcgaccgcccccgcccccgccccgcgcggaaggaagcgccgggctccccccacgctctcccgctctctcgcgagtcctgtgcaggcccttccagggggagggggagggggaggggggcgcggagggaattgctgcaatggagctccaagacaaccctgcccaagtgaggcagtcggtggaaagccacggccacataaaaatgccgtattaatttttaaaaagccatcaatcacccctccctctgcagaagaaaaccataaacccgatcccatgcaagcctgtgagcagagccacccacttcctatttctgtcacagcagctacaccctaccagcaaccaccccccgggcgccccctcccaccaccgccacccccgccgccacctccccgcggctcagccatttgccaactgacgcccccgtcaataaaaatgccccaagtgaggctgggtgggacgcgtgggggaagggcgccgcgggggcggggggttcgcggggttcgcgggttgcacaatatcctagaaggtccgcggctggagcggacagaggagaacctggggcgggggaggggaggaaaggcgaggcgaggcaagctgccctggcgcctgcggcacacggtgcacccaggccaccgcggcgctccgcttacctttcaccaccctgtcggtcgtcgacaacttgggatcaattgccttgggctcggacatctccagctgccggaggacagcgacgcgctgctcgtccgtccgactgcacaccccgaccggaccggcgggccagacactcaacgccgccgccgccgccgccgccgccgcgctgcaaaccgctcggctggaggtctaggctctgagctggctttaaagttgctgccttttccgcgcgtccctcctccgccgccgccgccttcactcctcctccgccgctgccgccagccccgccgactcgctccgggctgcgcgtgtgtggtggttatttatttattttctgagcacgcctcccggttcttcttttattcttgggggaagggggatggggaggagaagcgcacacacgagcacccaccccggcacggagacccagcaccgcggaatggagccccacgcgcgcacacacggccaggattaagaccgatcacatggggaaggccgggggcgagggaggagaggcagggccgccgatgtcagtgccaccagccgcaccttggcgtccccggcggcggagaggcggccgccgctgctgccgctgctgctgccgctgccgctgttgctgctgccgctgcccctgcttctccacacagagcgccgccgctggtgccgcggccgccggagacgtcccgccgccgcgatcgcccgcgctcgcctctgcctccccgcgccgctcctccactcaccaaggcacagccgccgagctcggcagacacagtcccgggcacaacctacccccctccgccgccgccgccgccgccaacaccgcgcccgcctccgcctcctccccttcctcctcccggcccccgcctcttgcgcgcctgcagcctcctcctccccactgagcccgcccccgacctcccgccccgacgccggagttcctcgcgttcattggctagagggcgcatcactcagtgccaggtggcggcctccccgcttgtcccgcctcccgctcctcctcattgtccccgccccttgctctgttttcttccagctgccggaccagcgggcctgccgcctctacggaccagtccctgctcaggtgtcacttttgctggcaggccgagattagggcaggagagtgggcaaggcgtcgcggccaggaggagaagggctctaccacgccaccctcctttggcctccgaacgcggaccccgcacacacacacccgcgcctctttggcaagcgtgccttgtcggctgggttaagccgcagtgtgagtagccaagtgcagagggtgtctccgggtgtgtgcgtggcccacaagagggcaagaagagagaaggcggggataggagggaagagggtgggggtgagaggcagccctgagagggcggaggaaggaagaggctgggagctcggcgcccgcggcgcagctgccgtcgctgccgcagctgtccagggaggatcgccaaaacggcgacgaataaacaacttaccttgcggagaagagctacgactgcgatgcggtgtacggttgtttttgcttttgcgttggcggcttaggggctgttactgtgtcccacccaggcgtgcacaccgagcggcggggcgctgtggaacgcgggagcggactagcggaggaggatgcggaccaagccccagcgacccagggcaactcggagctacctcgggcagccctgcgggtctccgaggagaaccgaggagacgggagaaacatgggagagggtggccttttccctgttcacacacacatgcacgcagccactggccgggacagttgacacccatcttccttccctgctccttccagtcattctacacccgcttggtgctgccagtgcgggcagggccttggagcccaaagcggatccccacacttgtccctacggtcggaaggaaagtagaggagagaaagtcaggcgcggcagggctaagagcaatagtggcccaaatgttcctggcccgcctgctgcgccacagagtctgaaaagcgggtctccgtctaccagaaggtgacctccacacagcccctctccccgaccaactgcagcacccaaggactggcaacgtggttggagcttttggggggaattatgaagaaatctgaataaatttctcacccttcatgtttcctgttttatttccaaagtccttcagtatcaggtttttcctatttcctcaattggaccacgggtccaataaaaggtttaaaatacacacacacacacacacacacacacacacacacaaagaaaacaaaaacaaaaaaaaaagtttagggagctgggagatgaagccaaaagaaatgttttggagacaaggattagattaaagctcaaacttgaaaatcaattttgagtaagagactgattgtgctgcagcgtgactttgatgtggactgcacggaatagaaacacacactagatacctctgtggaggcctagcaaaaggagcagacgcagggtgtgtcccaccaagatagggaggctgccactggcactgagattctgctgcccaatttccaaccccaggatactgggtggcaattagacaattcattcaataaagatattttctgtactccttttatttatatgccagactttgtggtgggtaattaggtggggagggagtgtatttgaaaattgtccttgccctcaataaagcctaaaattttcagagaacataaaattatgagctctgagaggtcactgt

SEQ ID NO: 317244 - DNA, 4001 bp, Homo sapiens
aatatatgatgattttggaagctgttcatttcattgcatgcccaaaaataaaatacttacaaagaatcaaacacatgaaaaaaataaactgaaattaataaaaatctcaaaagaaagtaggttggccagctgtttctaaaaatctatatggtaatataaggaaacaacaaggattatataataattctaatctttgcagagttgtttacagtactcttcataacattaaataaaatgatttttaagatctgtgtttaatttttaaagtaattaaatttaagccagaaacctttaaggaaggtctgtttgagaatttttcacatcttttaagaatgaattaaaaggagaatttcaactctgtacagacgtcatttggtgatggttgtatttggccttcaaaaaatgttgattttaacatttggccatttggcaactattcaatacacctctaattcagataaattatttattcctgtttttaacatttgaacattctcgccaactcccacttgaaaaaataaataagtggtttattttctccaattttgccctgaaggatgactggagatcatgttgtcagtggagccctttttggggattactagcactttctactactcttcaccagctctttaggtcagaggcaaaggggagagggttatatgcagatgaaaggcaccctagtgtctctactgcatcctctgaacctcttgttaacataccttacctgaacaagcctgttcttgcccaaacctccatcttacaaaatatctactaagaaaagggggcgaggacggctaggacgactctaacaagttataatattataagatcaaatccaaagagctggacttttcctgtggcctctcttcctaggcctttgctttcaacatccaacactttcaggcccttcctgtacgaactgagcaatgtgcttcctctcatcacatgcctgtaactttctggctggagagatcgaaccgatgttggagacaaattaaaaaaaaaaagagcggagaaaaaaggtatagacactcaaagatcatctggttggcacctccctgaaggcacatataatacattccagaaggagggaaggaaatcctgggcgtatgaatgagattctacggcctgcgtggagcggcgctctgggctgctcctcccatccccgcatggaaagttaggcgtttctagccacattaattcatcctaaaggaaaagaggcgacagcggagcagcgtgcgcgcgggggaaaacacccgcccacgcgtgccttcgccaacgcaaagacgcagctcacacccgtaaccgaggaagagggaggctcccgccgcgctcacttcctgcgggagagaggaaagacatcttgcggcagggaggccggtggcagttccgcccctggaccggccggcagcggagcgcaccccgccgccacctacgtggcgctgcctgctcgggtggcgcagcgagtaaaggccacccccgccgtgccccgcggtccccggccttcccacggacgcctggcccggcccgggcgaggggcgaccggggtgaagcccgccgcgccccgggccctgcggcagggcgactccgggaggcacagggcgcgcgaggtgcaggggcgcgcaggccgccgccgggtcacccacctttcgcactctgcgggccgtgtagagccccatgccgtcctgaacccgggaggacttcagggagaacctgtccggcacgtacatgcccagcattttcccgggcgcggcggccgccgcctctctcaacaccggcgcttagcgcccggcaggcggcacatcgaaatttggggtgccagggtagaggggagaaaccggcagggaaggaggaaatggagttttcctcccagaatccccacctccctgccgattccaggatcccccgcggctcagcccctcctcgtcccgggtcgggctcggcccggatccgttcctgccattcctgctgcgggggcgcggggggcgcgggcctgggcgctgcgggcgccgggacgccgctcgctgattggcccgaagttggcggctctgacccgcgcccgggcgcgaagcccggagcagggctgaccccagggcctcaaacccggaggcccgcgagctgcgcgggccgtcagcacccctagccccggcgcggcggcgtgcgttcccgcctttgtccagctctgggttttcaaaccttgccccgctgaaccattactccctgtaggggagtctcgcttgcttctcttcagatgcaaaacgaaatggaccttcacacagctggggcatcctccaaaacaactttatcaagttcctgactctgaaagccagcttattgccgactactgagaacgaaccctgcggtctaggaaatttccgtgcttctcacatttgagttatgcgtctttgctttttttcacgtttgttgcagaggctagaacttaataagggatcgcaaagtatgttgattaacgtacggaaaaatatgttgcaaacaatttaatgttttaagcactagaaactagatattttatggtaacataacctctgggaagttcttatacttctcaaggtacaatattcctgagacctcccttgcttgataatcattagacgtattacggattttcagacatacggaagtggatttgtgggagacaggaggggacacccaaacaatagcatctggtgtcacaacaatgcaataaagtcacaagtcttgttttagtgtttttaataagctgttaggctgtgcagtgtgcccaggacctttaaaagcctgtttcatccttcaaagtgatcctggggtcatctactcatttctcttgatatttatggtaattttctactctagggtcttttctcggaaaccatttgatgttcttaattgatgttctcataaaccattaaaagcacacacaaaagtttgacaaaattacagactacacacacacaccatggaaacgattcctgtttctgcaggaaacccttggaacatagttcctaagcagatttttttttttttttttttttgacagggtctagctatgtctcccaggttgatcttgaactcctgggcttaagggatcctccggcggcgttggcctcctgaagtgctgggattacacacttgagctaccacacccggcccctatgtagattttgattcaagtttggaaaaaggtttaaaaaacaagaacaaaaggcattatgggaaaaaaaaatcatgtagtggcaatattcggagactttaaggaacacagtaaatgatgacatgatcctctttctaagaaatgtaagtttagctttcacagcagggagaggaacacttagccactctgtgagttttgatacctttgacttcccatggaagatctctaacttctctaggggaaaataaatcaataaaaacaaaaactctcttttgggggaattgggagttccatggccttgaaaaatagtaggtgttcattaaatatgtcttgaatgaaagtcacttctgaggctgatctgagatgttcaaaaattctatggtgagcctagaatttacttgactttttgttgtgcttcacaaggaactggactaagtaggttttccagggttccttagaaccagggctgaaaccatgccagaccagatccactgggcccacagtccagaaggtggggccctggcattttcctggagcattcagctctttgtcaaacacaggcttccagccacccttaagccatccagggctctcagtcaaatgctctgccactgtctctttgggcacgagaatttccacagcttttgatcgctggagaggaaaacgttttttggttttagtctgaaacaatccttatttagggatccttatttaggcatatctctcaaatatttggttgcatgctgtctttctggggagcaaggctgcagccttgagaatgcccctctctgaatgtaggcttctttactaattagaaaatggtgaaagtatataaataaaattttaa

SEQ ID NO: 317245 - DNA, 4001 bp, Homo sapiens
gtggaatgtcagggccactaattctgtgtcagctaacctttctctgcagcctacaagaagggacgtatgtctgctcattaccataatccaacactgttcctctgaggctttaattaaaagcagcaagcagaggtaatttttttttctggacgtgcttatttatggatgagagtgaatcccggttaccttgttatacaagggggtggattgagtcacatgtggctcatgaagtgagcaggtacaggacaggcctaaagtgtccccagtctgaaatactgtgtgtaatgactggtaaattttcactccccctaccccatatgaccctttttgggcaagagggggcagccctgcttgagcactcctcagtgggctccccagctgtttaatccgcagcaatttagaaagtaatgccccaatgccctttattaaggtgtcataaagggacattttccttcctctggacaccccatacaagacttatcactaaaaaaaaaaaaaaaaaaaaaaaacaaaaaaaaaaaaacccaaaaaaacccaggtatttaaatttttaaactagctttgaactagctgcattgcttagtatttcagactaatcaaaatattcctccaagtttgttgttccctaataatgtcactgttggcaattatttatgtatgttttatataattaaagtagcaggaaagagtagatctaattcttttcctgcaaagctgttcattatggaataatgtcagtgacatctatttttattttaatttatattaaccagttaaccttacacgtgtgattacaaggtgtgcttttttccccccattccagctaacatagcctaaaactttggttagcctcattttccattcatcctcttgcatcccccaaatgtcaagtgttgggctgtatctcccagacagcagaaataagggaaaatatccataaagtagaaacttttttattctgcatcatctatccctggtcatttttaccccatacaaggtagacatcctgattttttcatttcaaattaaaatacattttaaaaaccccataacctcttatctccttttcaacggaatcctattctcctcttttcaatttccttcaattcagcgttttattccccaatttctctcttccttttaaaaatctctttcacacaagcatttcattgtgccgggaggtcgccccgtcacttcgggcaacagcagggacacagtcattaaaatgcagttctacctaacaatacggcaaaaaggtcctcactacgccgcgctaatagcggtcggagtcgcagcgccaggcgccacgagcctcaagcccatcacaataaccgctgggcaagagcctaggagcgcccgcccgcgtgcggtcgcctttgccacgcaacgtttcacagctccgtgccccgctctaggcccaggttcttatccgcctgccctgggaatataccccagagccggcggggctttctgaaagccggtcgctgctgcccgccactggcccgtccctctaggcaggcattgtctggcggccgcgcgctccccagtctccggcttctccggcaaagtgctcaccacccgctcctccttttgtacaatattactggcagtagacagcccctcaagaattatttttctctctcttctggataataaggagacggaagacaaaatgttctactctttccaccaaactgtcttcctcccatccccctcccacatcaatgcaaatagacttaccaggaataaggtcagtatagaatctcccaaataaggccacctggaaccgggaagatgcaatcgagtgtttccttttgcctattgtatcagtgtatttccatgtcaagaggtgttggtgttgccgccttttaggctcttcctgaagagataagagagagatggagagatggggagaaaaagattgggggggtggagggagggagggagggagagagacggagaaacggagagagttgtacagatggacccgatgcagtgactgactggcacgcagacacacactttttgtttgctgcacataatctgcccaatgacgcgtgacagcccacgtcccctccctttaactctttgctgggccaggcgctccctccggcgccgcctgcctcgcagctttttcccccggcctgcccgcgccccgcagatcctgagcgcctaccccgggtggcaacgcctctcagagagcgtcccggcccgcctcctcctaaagctcgggccctctgggactgctaggaggggaaaatcgtttcaggattggaaaggaaggtaccaaaatgattggagagggcctttccccgtttcactaggcacttggagaagctgtgacagagagctggacacccagcgcgtgcggaccccgtgcgtatttccccggagtccgcgttccgtgaaagggagaggggtgcggttagctccagggattctctagccctggagccaccgctgatttgcgcagctagttgcctgggggtgataaacgggcgtcgtctctcttcaggagcgccaacactaccaagcttccccctgcaaaattcagaaaggatgcgctttggtgagaacttggctcagccttcccgtggcttgggagatgaggttggagtgagaatgtcaccagacctcggaaggggacataacggtacctcctagtcccaggacacgggtacgtgggcggaggtggggtgtgggaggttggtgggaagagcgcaggttactggactcaaacagttcctgttttttttttgtttgtttttgttttcgtggggtttttccccccctctgcttggtgcgttctgcgcagccccagagggagtctataatgggtactgttggcactctgaggtcttggggttggggggcaagggtgattaaaaataaaaatgattaccaagatgggctccggaaagcttttcacatccagcgggtggtggaggaggggatggagttgccgaggccgtctcgggagcctcgtttgtgcgctaagccacttagaggcgctgacttgcccctttagtgcagcagctgatgctaatgacttgaggtctttaacagcctgcaagttgactccttcaacggggctgcaacaccacgtcgctggggaatctcgggcttctttttcacagttcaattctctactcctaaaggaagaaaggcctttgagtggtatagacagtttctcaactccttcagccccacacacaccaccactactttgaagtgggcaatctgtcagcattaggataaatcggattgtgtagctagctaaagtggaggaggcagaaccacaacgtaaggagacagcctcgttgttgtttttcctagtgttgaaataatgtatttggggagttggcaaagagcagcttaccatgttagtttgatcctctcccagctttgagacccttctctggaactcagtggggtattgaggctttgacagcctggtgactgcagtcccaggaggccaggggaggattttgctgaggagaaacaagtgcaaggactttcccatgaagttcatgttcttccttgttctctctctctctctctctctctctctctctgtgtgtgtgtgtgtgtgtgtgtgtgtatttccttctcttttctggttagtaccccaggcaaattccgaattgctgcctagaattaagctgaaattcacagaaggaagggctgcaaaatccccatatattcagagaaaatggggaatcccttagttttcaggttagctactgacttttcaaagaaagcttcttgaagtgcagttttatgtactttggctatgtgcaattttatctacttcggctaaggttggctcctaatgaccaaggctcagtgcaatgagggctctctcacatgcctgtatgtaagaatctgcagctatactgagctaccaattgtcttctgactgattgctccattgaatactagattcacttctcagtctctctctctctctacacacacacaaacacacacacacacacaca

SEQ ID NO: 317246 - DNA, 4001 bp, Homo sapiens
gatattcttctgcttccccccgccccagggcagagaatgctgatacagcaacaacctggggtatttcgtaaacttctggctcttagtccactaccctgactaaaaggtgctgttagcaaaaaggagaataaaataaaaccaattcctcagtgttctaccctgggggcaaaggagacattggtgagaaggagccacaacttggaaaaagatttatttttcctggccataaatctcatcccttgttcctctgcccaacgaagcatgataaagtccttttccataaagtattcagtattagagccacaaagctcccccaatcagtagccatctgcttctaccataactgctgctcccgaagcagggaaagcagcacagagaaagggcaccactgttaggctgctggacaaatgaggagcctgaatagctttggttttccttgtgtatctgtatctatagagacagcagaagaaaggccgcattatattgatacaacaattgtaaaacaaaacacggaagaggcatctaaagggcaatatcgcatgcatcaggggtccccagataaaaggggcactaacagatttatagaaacttttaattggttttcaattgaaagctaaagaggccagggtgtagctgtgaagagtggcaaagtgctctccttcagccctctggaggcgtgatcgatttcatgaagggagaaaagaggagaccctacccgcccagagctgctgcttctttgagggcagggagcaactccacattagcaactttcctctttggccagggagttaactgatctgatcttgacaatcaatctctctctctctctctctctctctccaccctgccttctctctctcccttctcttccttcctcccttatttcctcccttctttcttccctctttcagaccagtaggtaagtggaaagaggaaggaaaggctgcaaaagtaaatctaacattccagttctggaaaaaaaaaggctcctaataaggcccagactttaaacctgtttacccgctagtagggaggcctctgaaagtaacaggagtctgactcttatcctaccccatccttcctcttctccatttctataacaacccagtctttccttttctataccaaacgggaaaagctaagcgtcacaggagtctctccacctagtgcagtgagaagttttcccttgtggccaccgggtttatttcagagtggatctctccattcagccagtaccgcgcgccttttccttaacgccttcctgagaagccagctgcagcgacggtggcccccgccagcttcggtggacagcgcccacccatgcagcagcctcggacgtccgtccgtctgttcctaaagctaatttattggcccgaccctccattaccattttcggcttcctaattaatcaacgataaaaggcaatgacgcaaattacgattatgagggaactggaagacggttttgaataaaatgggagaagggaaatatgattaattgaacgacatgatagtgaaatctcaagtgcgagaaaaaggccccaagggatcaaactctgaactcatccgtattgcaggtgcgcccctcctgttgtcctagtgccctcgcaaggggacagcccctaaattcagtcacatgggtcctaagccttcggaagagaccgaactgggttcccactccagctcccaaccacactctgtgcatgaggcccttcctccaatcctaccccttcctccaatccccatcactcactttgccgccgcccctgacgattttccgggctccttgccggtgagtctgctccacttcaggaccgcatttttattgaagtgcaccctattatttcgctaatgagttgcgggtctcctcagtttcccttctgtccttgcacattcctctagcgaggctttttgtgaaattgtaggaaaacaagtctagtaggtcagagatcgcatttgctcgtgtaagggattaataaagctcttgtctgatgctgctttttagaattacgttcgggattaaaagacagactcaacacaggcacacattttgcatccgctggtggttgtgattaatttttccgaggggatttgggccgggagcttacggaacgtgctctctgggtctaaaacccaacgacctcggcgcacgggcgagcggagggtctgggggcactgtgggtacgcgccagaacactgggggattagagaggacatcggacgggcgcggagttgccagccactgcggcctttcaatgtcccttccctccctttccccacccccagcgcaactgcttctgaaaaaaaacggtgaagactgtccggggaggctgtctttagggttttggagagaagtggggggcgggggagagagaaagagagatacttttgactgtcatgacttttcgaggggagaaaggggctcagtacaaagccactgaactttaagcatccgtctagcaagggaaatccccagctctgcattccagggaagcgctgccccaagtgcataactcaccccccaatcaaacagtcgccgtgccccgtcccccgaaaagaatgacttcaacctctgagagctgccattctcagggctgctttcgcgagcacccagggaggcacctatggagaggagccagagccagaacctgagcgtgaaacacatccatcccctccacactaccttccggcgggcgacaaaccctccccccgccagtgatcagaaaagaaaaggaaaagtaccggggtgcaagcggggagggagggggaagtaagaaaacaagcgcagagagaaagagagaggaagagaggacgagggaggggggagagagagagagaagcaaaaaggaaacgagagaggagtacagttagaactgagaaaaatggggaaggggtggtcgcggtgggcggtgggcattaccgctttccagcggaagggggcatctttgcggcagaggcagcgttccccggggcgggggcgggacgccggggcagagccagccctgtagccccggccccggggtgctggcgccctcttctggctgctgtgcggccgctccctgcttctcgcgggtgctctggtccagaaactgttccgccctccgcgcccaggatgaaggggcagaggggaggaaggtcaagaaagagagagggttgggtaccggaacgctcaggctcctccttccccgcccttcgcctgccccgcggcttccttacctggggactgtggggctccttccccgggagcgcagctactgcgggcccctcggcggccgctctcccaccccaatcggagcctgccgaggagcccgtccgcctcgcgaaatggccccggtctctgctgcagcagctgggagggagggagcgaccgccggctgctgccgggcggcgtctgggggccgcgagccgagcgcaaggagaagccatctggagcctcggcagcgggcgggggtgggggtacaagagaaggggccaggctgctcggccccaggcgggcgcggggcagggctctggcgtgggagtggcgcccagtcgccccaagtactgcgtgtgtgtcgcgggaggggtggtgtggggaggtgtgtgagggtcatggcccctggggaggaggagcggaggcctgccgttctcaagtcccgccgattacagggcagcccggtacccgcaggtttagcaaaagagaggggatcctcctggcaaccaccagcccccctccagccattctccctccggggatggagagctgggcgaggacaacccaagcactcctacacgctcacacacccgctgtccgtcagaagtggtttgctcattttcctctcttcccaccttgtccatcccactccaggaaacattgctccccaaacggcacggatttctggacgcctccaccttaagacagctacttcagccagaacgtgggacaggcactaacgggatatcacccttggggataaacacgctccagtttcctgtggacggtggaagaggaaagaacaggag

SEQ ID NO: 317247 - DNA, 4001 bp, Homo sapiens
aaaactgctgctaatgcttgctaatttggcaagaaagtttagcacaggaaggggtttgggcatcacaataggataaggactagttcaaccacactagtcccctctttgcaaattactgctctgcagagccactgttaaggttgggagtgggtcctatttctcagttttattgaggcagaaaaaggactgtcaaacattggtgttcactcaattcaggagggataaagaaaggcctaagtcttatttgtgggatctgagtttaactcctgtgactgtctttttagcaacagcaaactacttaaccccttttttttcttttttttgagacagagtcttgctctgttgcccaggctagagtgcagtggcgcaatctcagctcactgcaacctctgcctcccgggttcaagcgattctcctgcctcagcctctcaagtagctgggattacaggtgcccaccactgcacccggctaattttttttgtatttttagtaaagacagggtttcaccatcttgaccaggctggtctcgaactcctgacctcgtgatccacctgcctcggcctcccaaagtcctgggattacaggcatgagccaccgcgccgggacttaacctctttaaactcggccttaacctctttaaaccttatcctctttaaattggaattcctatcccgagggattgttgaaaggctgaaacaaacaaatgtattatgaaaatgtaaaagcatgcaataaactcagcaaggggtaaccatatataaaactaagtatatttctgtgcagaatatagtccctatagtcgaataggcgcaagtgttagaaacaggctctgccatggggtccctgaatctgacttctgaatgtcaagaactttttgaaatctgatgcagaatgtcgtgctcacatgtgttggtgaattcttctgcgaaaatgattcacagtttgcttcagggtctgaaatgagttcacgacccaaaataggaaggggatcggtagggcagtgtatatagcacaccattgacgtaaccattaataactccatcttaggagaagaccccatttttacatttcataaggcatttgccaacaagcatactatactttaataaacaaataaaaaaatagtccgcatccagccaggtaaggacacaaacaagcactctcttccattaccagttctcaccacaggactctgtgactataaaagatggggccttcggcagctcccaacagccggcttaattgacgccgtctttgcagaaggacctctcggcccaaaccaggcttcttttcctcttcttcactccctctggattggttcgttaatctctttgccccatctctttttcctcatgatgttaaatgctactttgttgtgggatgcttaacttgtaacatttatatgtggattaagtacactactatgatgcgtgagcggcttgagcctgtgtgtcaggctctgactacccagtgaccagcaagtgctgagaactgcctccttgggaactccacgcagctcgtggcttttgtgatcgaaagagcgtccacagcagcctgacatggtggaaaacacagcatgcgtggacctggttatttctagcctggcaccctgatgacaggaggttaaggcttttgatttagggagagagacctgagggtaacccaaagaaaggcctcaggtcatcgcagaggagacagaaattaccggtgggcgtcccggcctgctcctcttcttcccagagctcaaactgggcagcaggcctggctttgtctcccttctaggtacccgttgggcctggcgcggtttccaagtctccctcaatttccctccagaatcccgcgctgggagcggaagcccgcggactctcaggaagacctagatttcaaatccggggcgggggagccgggccgagcctcagggcgggaccaaagcgggaggactggcgcgggacgcgagggcgggaccagggcgtgaggacgcggggcgcgggggcggggcgcgctgcggtgggcgggcgcctcctggggcccagcctggggctgggttctcgggcgggcgggagctaggggacgggccgcagcggaggcggcgcgaggggccgacaggggcgggcgggaggcggggctggcgctggagcacatctcccggcggcgggccgcggaagcagtgcagacgcggctcctagcggatgggtgctattgtgaggcggttgtagaaggtatgaggaggctgtgcggtgactgccgccctcgctccgggccgtcagccctgcccccgctccctgcgttctcccaggccctgcgcccgcccgggtacctgcccggtctggaaggcggagtgtttgttttgccacctcgcccgggcgggggcgagcagtgaagcccgcggagcgagagacttggcccggaggcgggagcctgggccggggccggggaagccaggcagcgggttaaggcttttgatttagggagagggacctgggggtaacctaaggaaaggcctcaggtcatcggaggggagacctggcccgggggcgggaggctgggctgggaccggggaggccgggcagcgcgaggccgggccggggaggccaggcagcgggaggcctggccaggggaaccgagcccggggccgggaggtcgggcacggggcaccgagctccgagggcgggagacctggcggccggccgagtgccggaaggccgggtcaggcggcggaaggcagcggcaagctgggaaacggacggcgctaccgccggcggaggagtggccccgggaagcggtgctgcgagggctggggcggccgggtgctgactgtgagatactcgccctgggggctgatccttccaattttggacgaggcttccgtctctgctgccttccatgcctggggcctggattatcccgggttgacaatgtggtttagctcttccagagagatagttgcagggtttaaactccaattccttttcggccctgcagagtttcgtgagtgctcgcagctcatacctgtggctgtgtatccgtggccacagctggttggcgtcgccttgaaatcccaggccgtgaggagttagcgagccctgctcacactcggcgctctggttttcggtgggtgtgccctgcacctgcctcttcccccattctcagtaagtggcacccaagcaggaaaccggaaaacatcgttcgcagccccctctcgcccacccacttcttttcctgcttagtcgccaagccttgtcgaccttgtaaatgtctgccagatctgtccgcgtctctctatctctgatttcagccgtctgaccacagcagcctcttccctggtctctccacttccagacccgcctgctcctttgcagtccactttttacagcacaggcagagggatctttatgaaatgaaagtctagaaagctcgtcctttgcccttaggttaaacccagcacttaatatggctaacaaacccctgcgtgtgttgggtcctgagtgcccccacccctccttatctttagcaccggttcgatttctgcacggcaatgctgaccttcatacctagtgtctgcctgcaacacctctgcactccctttctcccgccatcacatttgattagaagagctgctacttaaatttctgttttcattaaacagtttaaggttaaatcttcctatgctgtgttctttctgcagccagcattccctaagagagatgtgtcatatcctttgcagttgcttgtttactatcttccctgctagatttgcaagcaaactccaggagggacggacttggtttatcttggtatccttagtgtcttgccccaaatgcggggcctggcataacacagtgaatgcccatccattgtatttttacttttatgccctatctagaaaaagtagacctggtttaggattattcagcaaataataattagaaaagaaatggtagaggtgacatacggagtcactgaaacgatgtaaacctgcaagatagctgaaagagggccag

SEQ ID NO: 317248 - DNA, 4001 bp, Homo sapiens
aaggaaaaagacaatactttgttttaattttatggtaattaggacaattacctacattcagcccattttgatggatgtgggaagtcctatggtctaatattatcaaataactacccactgtaagaggaaaattcaccatctaaactccacctcctaaagttaaattttaaatgtgaatccagtgattccttctgagagatccacaaagcaaataataatggtcttgtgggaactttttctattttaaaaagcctaatatagttgacaaattaatcaaaaataaggttgagtatcagtagttctgagtctggtatcaatagattgactggccgaatcctgtgcacctcctaaaactgaatgcaaaatgttgattgaagaagggtctacaactttcatgggcatctcaaagcaatctgttgcccagaaaggcttaagaaccccccacccagcagggccaaacagaaaaagccctgtttgtggctagagttattccaattcaacatggtaacaagtgctgattcaggctgaatagaaattctgtttggcatttatgtatgtcacaatgaattaaaattttaaaaataaaaaatgcaattttttatcaccaagaattatttcaaagtatggggtctaggttgggaaaaaatgacaagaagtagttcctagtgttgaagagtttcagaggtttgaaactattttgttcatgtttttccttcacttggggccaaattcaaagttcaaccacaatccagtttacaaatggcagtgcctgactccctgatggtaaacccttccatataacatatgtaaaaatctgacagtttatacacacaggtgctcaagaattggcccttcccttcaatatttcacaaatgcttttcatctctgagtaatactgttgagtcaacattggaacaactggcaacatgttatccattcaatatctaggtaaagaaaaagacttattgtacatgttagtataaattttgcatcagcatctaaattcacttgagctgttttgtatcaattgaaattctgagccatattggttctataagcctgatacctaatcatgactgtcttcaattgctgaattcattctccacctgctacttgtcatatctattggataagaaaatattctagtactgatcttggaatctggggatgattgagaatcacatagtcatagccagaagggaccttataaataatccagccatctcatatacaattaagctaggtctctccccaaaaaatcaagtgacctacataacatcactaagaagttattatttcttagggggtcctgtggcctccactccaaagccagtgttcaaacagaattgcatgggactctactggtagaagctcctttatctgtccaaagtggaggacctatgttgcaatgcaaagcatagttgagtttatggcaaactgatttaaaataatcttttttatttagtaagttttaattaatagttacctttccttttgccaaaatgaaaaaggtacttccttcctcgccctctctaatgatgtaatctcctttgtcatagtattcctgttgggatgagagagaaagaaaatgtaagagcgggtggagccaagatggcctaataggaacagctccagtatacagctcccagcgtgagcggcgcagaagacgggtgatttctgtatttccatctgaggtaccgggttcatctcactagggagtgccagacagtgggcacaggtcagtgggtgcgcgcaccgtgcgcgagccgaagcagggcgaggcattgcctcactcagcaagcacaaggggtcagggagttccctttcctagtcaaagaaaggggtgatggacagcacctggaaaatcgggtcactctcacccgaatatcgcgcttttgggacggccttaaaaaaacggcgcaccacgagattatatccccgcacctggctcggagggtcctacgcccacggagtcttgctgattgctagcacagcagtctgagatcaaactgcaaggcagcagcgaggctcggggaggggcgcccgccattgcccaggcttgcttaggtaaacaaagcagccaggaagctcaaactgggtggagcccgccacagctcaaggaggcctgcctgcctctgtaggctccacctctgggggcagggcacagacaaacaaaaagacagcagtaacctctgcagatttaaatgtccctgtctgacagctttgaagagagcagtggttctcccagcacgcagctggagatctgagaacgggcagactgcctcctcaagtgggtccctgaccctgacccccgagcagcctaactgggaggcaccccccagcaggggcacactgacacctcacacggcagggtactccaacagacctgcagctgagggtcctgtctgttagaaggaaaactaacaaacagaaaggacatccacagcaaaaacccatctgtacatcaccatcatcaaagaccaaaagtacataaaaccacaaagatggggaaaaaacagagcagaaaaactagaaactctaaaaagcagagcgcctctcctcctccaaaggaacgcagttcctcactagcaacagaacaaagctggacggagaatgactttgacgagctgcgagaagaaggcttcagacgatcaaattactctgagctacgggaggacatttaaaccaaaggcaaagaagttgaaaactttgaaaaaaatttagaagaatgtataggccgggcgcggtggctcacgcctgtaatcccagcactttgggaggccgaggcgggcagatcacgaggtcaggagatcgagaccatcccggctaacacggtgaaaccccgtctctactaaaaatacaaaaaaaaaattagccgggcgtagtggcgggcgcctgtagtcccagctacttgggaggctgaggcaggagaatggcgtgaacccgggaggcggagcttgcagtgagccgagatcccgccactgcactccagcctgggcgacagagcgagactccgtctcaaaaaaaaaaaaaagaagaatgtataactaggataaccaatacagaaaagtgcttaaaggagctgatggagctgaaaaccaaggctcgagaactacgtgaagaatgcagaagcctcaggagccgatgcgatcagctggaagaaagggtatcagcaatggaagatgaaatgaatgaaatgaagcgagaagggaagtttagagaaaaaagataaaaagaaacgagcaaagcctccaagaaatatgggactatgtgaaaagaccaaatctacgtctgattggtgtacctgaaagtgatggggagaacggaaccaagttggaaaacactctgcaggatattatccaggagaacttccccaatctagcaaggcaggccaacattcagattcaggaaatacagagaacgccacaaagatactcctcgagaagagcaacaccaagacacataattgtcagattcaccaaagttgaaatgaaggaaaaaatgttaagggcagccagagagaaaggtcgggttaccctcaaagggaagcccatcagactaacagcagatctctcggcagaaactctacaagccagaagagagtgggggccaatattcaacattcttaaagaaaagaattttcaacccagaatttcatatccagccaaactaagcttcataagtgaaggagaaataaaatcctttacagacaagcaaatgctgagagatttcatcaccaccaggcctgccctaaaagagctcctgaaggaagcactaaacatggaaaggaacaaccggtaccagccactgcaaaatcatgccaaaatgtaaagaccatcgagactaggaagaaactgtatcaactaacgagcaaaataaccagctaacatcataatgacaggatcaaattcacacataacaatgttaactttaaacgtaaatggactaaatgctccaattaaaagacacagactggcaaattggataaagagtcaagaccc

SEQ ID NO: 317249 - DNA, 4001 bp, Homo sapiens
gagtctggatttacatatattgagtttgagatgcttgtgggtcatcatgatgcaaatgtctagcaggtagaagcaaaaaagaaaactcaagggaagagattgctccatagaagacttgaagtaccatttgtagatgagatcactaagggaggtaagaaaggaatgtctctattgttacctatgaacatataggtaatatctgtggatattatttgtgggagaagaggaggagaagcaaaccacaaaggagaaggaacacgtgtaccaataagagatttaggagaagcatcagaaaggccatgcagataagatccttaagaggtgagcaggctgtacctcacatcccacaggcctgtcacagcaaatgagatcagagagaaaagtgctgaatctgatttgtcaaagagtggggatagacactcaactacaagggaccatggaaagagctgacactaagagtagagcctgcaagacgatatcatgattcatgtgagggatttttaaaataatgaaaatttgaaaatgtctgtagctccaggataatgaagcacaggagatatgaaaaacgaaaacatgggagaagaagagataattcataggaaaaatagcctagaggaagcaagacaataagggatcacaggacttgggcaacagccaggcaacatatgccttcactgtgaggtgaattctcattagcctcacttgtaatgacttcatagaactggagttaaggatttcacgtaaaagagaaagatccctgggcatcatcttttcaggtcgtttattcttagtcatacagcgttccaacggagaggatgcactctaattctccatagagaattctctaccatattagctcataccctcctgtgcaaaactaaacaggagtactgaaaacagctagtgtatgttatgtgggatgatcgccttcttcatgagttaaatagaaacttgcaaagaaaagagacaatttctaagaaactctaaatatgggggtgtggtggggtgggggcaggtgtatgttgctctcttccttaaaaaaaaaaaaaaaaagaaggagaagaagaagaaggaaaaagcccctgggaacttggggaacaagatgaagatcaggaaatcaaggcatttgtcccagcgtcacccttcctacctactaattctgcatgcgttgcttttattgtcagctctggcctcagctgcttcgtagttgcaccgtagttcttctcagaactgaacctatttctttttttctcatccccaaagtggctggtttctgggctttgtttgctcttgtttcttcatcaccgagaaatacagaaatatgaaagcgcctcacggtgcccagagtgacaaaaggacacccacacaagtttaccaggactcctaaaagtccttgcctgaggactgtcccctagcaactacccagagctcgacgaagcaaagccgggagcgcaagccctgacagcaccgccaagcccctagctcggagcaacagcctccaccgcttctcctcgctaaacctagagaaccctgaggactccccactggggctgagcccctcccgccctcaacagaacctctaaacacaagtagcctttccctgcctccaggagctcacgaaacgctgccacaccgagcgaatgcaacgcgtacacacgtccacactcgaacagcacaagcaagagaccggctgggtgtggaatagaggcgcacatcgcgcaacgcattcacagcatgcacacgcgcgcaccccgaccccgtccctccccgcgcgccctcacaccccggcgcccaagacccccggcccacgaacctcaccagacagccgggtaactttccaggtgcgcagcttgtcacctcggcgcggccgcccctgcgtctcagcgtcctctcccacgccgccctccccagccgcctgcggcgccggagcccagcgcaggtcagctcagccagccccgccgtgcacacggtgcgcagcgtgggcccggggctgccggctcagtcgctccggctacgtgtgagccgggggcgcgggttagcgcgatgcgggcaggagctgcggcggcgtcggtgctgccgcctggctccgcggcgggggccggtgcagaggagacacgcagggagggagggaagagaggagggaaggaggagggagggggtcagccggggctactgcctggatagttgggcgccggcttccctaaaggtggggtcacccgcgcccgcacgcacactagcccgaacctttactcccgacacagccgcagtctgcactttataccccataccctccatagtgaggcaacttaagtagggcgataacatcgtggttgtaagcatttttgttcatgttattatttctatttcaagtgtgtgggacgaggggagaggaaagttcagggaggtgttcattttttccttcccctccctttcctccatccttccagtctgttttcactgcaggctctctccacttcgccttccctcccagagctcaaacaggcgcacgtaccctggacatgccctcctctgtcacaccaatgcctttctacgaagacatgtgaccccgaagcagctcgtcgacgcgcccctcccggactctggggccataacttacatctagtttgccagttcacgtgatgctgggggcaggggttgaatcgagtttcgagggacagagattataccttccgaatctgcaggtctttgggaagggagctttcttgatcacccaagaagataatgctctctcgtcaccttttgagtacatttttttttcctgaagggtgcaatatggtttcctaaatatatatgtacaccccaccgcattatttgctgtgctctggagttgtgagatctccatgtggctttttccctttccttctgcccccagaggaatttcaccagcaaattcacggaggacaagggcagtttctgtgttgagagatggaaagtatagtgagggtctattcctcactgtgcatctagagaatgttacaaccaactctcttgggtttttaaaccacatggtggcagtggggctcatgtaacatttgtatacactgttacatacataaacttatattaaaaatgaggcccatgtaaaatatgttgaatgagaccattaagtttcagaggaggaggaatatagtcctgtttgtttttgtgctaactggaggaaaatcgcgaaagtacacaaagtaccttttcatgaagctatcccagagtctgtacattttataaagacctcaaaaaaaaaaaaattagaggagaaaggagtgaggaagaattccacaagaaaagagaaaataagtaattgtatgtcactgtaataatggacttttaagttgatgggctgaatttttattagcgatttaatgacaaaaaggagaaaaacagattttcaaagtcttcactttaaaaaaaaatttcagattcaggggtacaagtgcagtcgcattacacggacataacacatagtggtgaggtctgggcttttagcgcacctattaccctaataatgtgcactgtacctaataagttgtaattcctacctcacccacctcccaccctcccacctattggagtccccagtgtctgttattccattctggatactcatgcctgcccattgtttagctgccacttataagagattctgcagtttttgactttgtttctgagtaatttcacttaggataatggcctctagttccatccatgttgctgcaaaagatatgatttcattgtttttgtggctgggtagtattccattgtgtgtgtgtgtgtgtgtgtgtgtgtgtgtgtgtgtgtgtagtacccctgaatcaaaaaaaaattttcccagtttttcaggtgataggtacacagtgtatgtgtgtgtataccaccatagtgtgtgtgtatatattttgtatatatatatatatatatatatgtgtatatatataatataaaaccacatttataaatccaatcaccccttaatggacacgtaggtt

SEQ ID NO: 317250 - DNA, 4001 bp, Homo sapiens
tgagtagctgggactacaggcacatgccaccacgcccagctaattttttatttttatttttttttctgagacagagtttcgctcttgttgcccaggctggagcgcaatggcgtgatctcggctcaccacaacctctgcctcccaggttcaagcaattctcctgcctcagcctctcgagtagctgtgattacaggcatgcaccaccacgcccagctaattttgtacttttagtagagacggggtttctccatgttgaggctggtctcgaactactgacctcaggtgatccacccgtctctgcctcccaaagtgctgggattacaggcgtgagccaccgcgcccggcctaattttttaatttttagtagagacaggttttcaccatattggccaggctggtctcaaactcctgaccttgtgatccacccgcctccgcctcccaaagtgctgggattacaggcctgagccagcacacccagtctaaatatacttttaatacccagtaaacatttttaagagaggctgcgtccctgtttcacagaagaggaaactaagaaacaagtaactgaggaaagatcacttgagttgatccatttttctattgctgcctaccaagagaagcaaactgtatctcaacatatcatctcctcctcaagtaggacagctggtcctgaaatttacactaagtttacatgaactacaaacatctagacgctactgacatttagtgggtagagatcaaggatgctgccaaacatactgcaatgcacaggacacctcccctcccccataacaaagaattatcccattcaaaatgtcaatagtgctgaggttgacaaaccctcagtctaaatgaagcaaagtaattgcaattttaagttaaatcatttttcgtaatttagattctaaaagtacttcaaaaaagaacagcatttcaacagagtaattgttgcaaataatccaataattgaagtttaaagaacgcatcattaaatgataatcactttaggctaattacacactttattcaactagaggcccactatattcctactacacacaatataacaaatccaaaagccctcaagccagggcatgcttaaattagatataaggagaagaggatcacgtgagacctcatttccaattcgagggcctttaaaattttaaacgagatgaaagttttgaaactgagaaatgacaacatttgacttttgttgcaaaaagctagctatgttgacacagactgcaggagagagctcagttgagagccgactgcaacagccggcagatgactgaagctcgaaccagggtagtaaaggggaagatggtgagaactggtaagattctggacatatttcgaaggtgaagacggcaggattttcctctgggctggtcgtaggtgtgaataaacgaaagatgtcaaggttgaacagtaaacattaatagcaaacacccaaccaagcaccctagcccctccgccttttttcttttctttttttttacgaggacgttggatcggccagcaagtgagaaaaaagggccctaaatattaacagcaaccacccacccaggcaccctagcccctccgcttttttttttttctgtttttttttttttttttacgaggacgttggatctgccagcaagtgagaaaaaaggaccctcaccttcacgtcgtgtttcagctccggcgccaggctgagcacgaggaggtagtgggcataggcagtgccgaagtcctggacgcccagacagtgctctgcgctctgcaaggaccgcgacaccagctcgtcccggccggctgccccagcgccacccccggcgtctcggcgggacctgggccgcgagttcgacatggcagtcaccacttgtatggccaaagggaagatattttgtaaacgtaattagaaaactctctcgatgctacacttccagggaccagacaactgctcaaaaaacagcacagcaaagttaccctccgccgcgggtgaactcgccaaccccagcccaggcggaagctccgccccgtcctggccccgcgggcggcgcagaccgtgacgcataccccactattgcgcacctggccagcggcgcacgctacgcgaacgtcagcgcgcccgacgtgggcacgtcactgctgcccattcccgcaggagcgaccactgtgcgtgagcataggagaacgtctgtggcaggacctgtccggtcttgcgccctttttttttcccggctgaaagcagagctttctctccctcttgcactccgggagtgtgtggctttcgactgcaagaccctgttgtacagacccaggcagcgcgaagcgccacccgctcatgagggacggtcaagcatttgtgatgatgcttaagacattttggatcgtgatgcacaaaatttcaagacctgaaagaacctggagataacaaaagcatctcagacgtggtagaggaaatgctttcacaggcatttcaaatcattctcacaaaacctggctaggtggacctttggatcacactcgtcttaatgatggcaaacgtggtatcttgagaagtgacttgctggaggtcacacaaccagctagtggcataggcatggttcaaatccaagttctctgaccacctatctgttcagttataagatgagcttaggggttatttcactgttcgtgtcttatcactgtatagtgtttacattaatacaaagtttttccacattcaagtgtggcctctaagatacagattcgaaactcaaagggaggggagcatagttattacggctgaaaagttatttttgtccccattttcaaattcattaatggataatatcttaaatcgagcattttgcatatcacactaatacattttgagggctcctctaattctcaaaaacacgtcatgcatttttgccttctcttctgatccaattatctgaactacccttttttctgagcactcgcctgtgtaaatcctaatccgtttttcaggttccagctcactacattgtgagctattcttaatcacttttgtgacctttgcacctagcggattatgatgcaaagtaaggactttgattttttcttctttcttttctttcttttcttttttttcttttttttttttttttttttttttttttttttgagacagagcctcactctgtcgccaggctggagtgcagtggtgcgatctcggctcactgcaacctctacctcccaagttcaagcgattctcctgcctcagccttccgagtagctgggattacaggcatgcaccaccacgcccgggtaattttgtctttttagtagagacagggtttctccatgttggtcaggctggtctcaagctcctgacctcaggtgatccgcccgcctcagccccccaaagtgctgggattacaggcatgagccactgcaccaggccaattatttgcattttttcgtggtttatctataacttcaagattttctgtacatagaataggtcatttgaaaaaatggaatgacacaaataacatggaacatctggtcaccttaagaaactggaattggcaacagcctttcatgctaaaaactctcaataaattaggtattgatgggatgtatctcaaaataataagagctatttatgacagacccacagccaatatcatactgaatgggcaaaaactggaagcattccctttgaaaactggcacaagacagggatgccctctctcaccactcctattcaacatagtgttggaagttctggccagggcaaacaggcaggagaaagaaataaagggtattcaattaggaaaagaggaagtcaaattgtccctgtttgcagatgacatgattgtatatttagaaaaccccatcatctcagcccaaaatctccttaagctgataagcaacttcagcaaagtgtcaggatacaaaatcaatgtgcaaaaatcacaggcatttctatacaccaataacagacagagagccaaatcatgagtgaattcccattcaca

SEQ ID NO: 317251 - DNA, 4001 bp, Homo sapiens
cagtcagttaaaggaatattttagtcataatgaatatattttcaggcatcagaaaggcttcctgattttagtttttataaatattttcaataaaaaactattgtacaatcagcaatccttgcattgatatatcatgttgtctttttagaaaatttatcatgaagctccaactgtatgctttcttattccctacagcttttaaacatttagtaagcttaaattatatttttctgacaatttgatagtagtccttttgaaaaagaaataaaaaggaagagatatctctagataagagctagctctcctagatactacctgccctgtgtcctcttcctgcagtccactgtcccttcatgcttagcaaccgctgactagatggttagtcataaatgagaaaggaaaaggaaagtaagagcaagtccataattatcaacagcctgacactgtatttttatatacaggacaaaattcttggtatcaaaactttctttgaaatcatgattaacaataaatataacaagtaaatttagaattgagggaacttactgtgaaacatgaaataagagccaacaggcccaagaagaaagttaatttcattctttaaagttgctcctacaaacaggccaaagattatccacagttagccaaatcgatcaacagtgtttttcagaaaaaattttttaaaacattttaacacttgttatgtaaaatgatgaagaaagaccaacataacctttaaagatgtgtttgatattttggggagaggaagcagcatagatgcacagcaatactgtcatgtttgtgattttttttttaatggtggtactttattttatgaaagataattttcagataattgttgaaagtacattttaaaattaaagtatttttggaaattccttgttgcctttagtggtgactactttggaacataactacttagggtatacttttagtatgtttacttaaaattagtcaaagcttacagatttctatagatttgtgacctaaatattgtcaacgtgacacgactattgtaaaaaataacttcttaatacaattattgtgttattgttattagatctgtctgaagcaaaagaaaccatgtaatgtgtatttttcctttaacatcactctactgaagtattattactttgatatgatttttttccaagttattccaaaagtcaattattgtctatcagtgtgtgaattagaaaaaagatgtttttatcctaatttgtttataattttcaacaatatataagaagcacatggcaccctgggttctgggaaggcaaaattcaagcacataggctgacagattgtcttggggtttatgtggtatctgtcattggcattagccttgaaagtgatgtaagacaggttgacagatcctatagttgtatgtgcgtgtgtctacccccttaaaatagcttttttcttatatgttttcatattagaaagcagtttgacaatacataagaaacctaactcaaacaagaacaacaaaaatgcaaatctaacttaatatacctttttaagactcttctactcatgattgactttagagaccataaaatacagcagtggaaaaagtcaatagattgtgaaattggatgtaaattgtgcaactaatcaatatgaatgttcttgacattttttcaggaattttaagcaattttaccacagacaatgattttttttttaaaaacacatctgagatttttgggtaacgaggctatttccattaaaagccatgaggatgatattcttgagaatatgagcaaaagctagaattccgaagtgaaaattcttacatttatatttctatatacctaccttggtagaagattcttctttggaacaaattactgcttaatcttactcttgccagatactcaatttaggtagccacaatttaaaagtccaagaagagaaagaactttgatagaaaagcctttcttcttaaatacctctgtctggatttttattggagttaagagaaaggttgagagagggtaaagttctgtattgatattctttactgaaacaaagaaataatagttgcagttgccagtttggcagcttcatctatagaactgtgatccaatcactgtcctagcaggccctggggcagcacacagaatgctcaagtacagtggttttcaaacttgactgcacatcacaactatctgggaagctttaaaaaattccacttctcagaccttaccccagaacaatttatcaaaagttatggggcagaagacagacaaagtaatttaattttgttttaaaaattttattaattttatttatgttagttttttccttccaacttttattttaggttcaggggtacctgtgtaggtttgttacatgagcaatttgtgtgtttctggggctagttgtataaattatttcatcacccaggtagtgagcacagtactcaacaggtagttttttgatcctcaccctcctcctgctctacaccatcaagtaggccctggtgtctattgttcccttctgtatgttcccgtatactcaatgtttagctctcatttctaaattagaacttgcagtatttggttttctctccttgaattcgtttgcttaggataatggcttccacctgcatgcacgttgctgcaaaagaacacaagaattaaaaaactccccaagttattgcaaagtgaagctttgtttgggaaccactgttgttaaaggctatagatactggagttttaatgtgtctatacatatgtatcagaactgacatatatatatgtatagtaagagttggtttatttgagaagaagcttatttgggaagaaggaatttaaagaatggaaaaaggaggcagttgaaataaattctttgtcttaattttggaaataacagaagatatctagtggtgggagataattaggaaatagaatccttctagtttcttattttcaatttcatatttatttcccagatgtgtaattttaaagatactgtatacatgcatttgagctacttaaaatgttaaatatatagaaattacttaatacatttttctgaagctaataatgaatatctggactgcttaatggataataaattctccaatatatgttgtattctgtaagtatgtggtgttatcccattatctaaatcagatggataaattcaatgtacacttgtctaccaaagatgggaggtattacacaatctattttcaatttatggcaaaaggatgtagtaaattacacaattttatgtataaaatgaaggcaggtactgagaaatttactcataggaaataaaatctattcatttgagaggaaattaccatatgctagaagatgttatgctttattttctaatagccataatttgttgaatccttaccatgtcctagactatgtgctaatcactttatgtagattagctctcctcatgctcacaacaaacccttgcaatttatgttattattatcagatcactgattagataataaattagagaggagtcacgtaagttgctcaaattcactaaaatagctgggaaaggaattgaccttaaatttgccatatttgagagcttgaacttttcccttcattacgctgctttgtctctcaaatccaattatttgaaccactgaagtaattactatatttttaatagtagcactcattgacgcttgaatgcaactcatcagtaatacatgaaatctatttagggagtagcaaacagaatttagaggatggatagagcagaatagaagtaaatatcagattgcattatatattaatacttttcaggatatattatatggttatacatatgggtgtactgggttattatgtaaaaatatatgttttctgtcagctgcagccaataaaatgtaagagtctttcattataaggtagtttagtgattgtgtgtagcattcaagtcaggtggcctaagctgaaatgtcaactcccctcctattagctgtgttttatatgacc

SEQ ID NO: 317252 - DNA, 4001 bp, Homo sapiens
agggggctctggtcccccttactaactctgccaagatgacagttgtttgaattctccaacccttcttctgctcctctgtcaaaggaggatttcgcatagggttcgcaggctagcgatctaataggtaaagcacctggcacgcagctggaaggctatctggggtctgtctgcttctgctagcatcaatactctgagctcaactccaccggggctcctaggataaccgggacagaaaggacggtgagaaaagaaaaatgagtaacatcacacaagttgaatcatatgaggttgacgatattcacatcttccatccaaaaaaccgacaatttcttatgattcaacccaacatatcgcagcggttgttcgtgtcgcatgagtctcggggggcactcaagaactacgatcgtgcacttgctttcttaacaaagaacagctgccgccctcaggaactccagcaaacctttctccagaaaggtcagtcgccttagcgggctccaggagcaacctgttgcagaatgaagcctggggcgccggcttccccgccctttacctccaaaccacctccaggccaagccccctccaggcctagctcccttctgggcggaagcctctcgcgagctgcgggacacaaaagaatgagcggcggggcgggcgcgggaagccaagagactccaggaattcgcagccgcgcaggggagggggttgccggagtaacttggctgctctgagcgcgtcggcgccagttccccgccgcggcccctgttgggcaccgatcgggggcgatcttgccagagagaaggggttctggagctagttcctccctccgatccgactccctgcccctccagacacgggctttcggggaaactgatcccgagcctctgactttctacagccgtgaagctcctggtctgtccacgctcctctttgttgtccggtcggcgtgttctggcagggtgcgccttgagcaccccagttctccatctagcgatagccgcgggtccccgcgcatgcaagcagaagggccgtggagcgagaggctgggaaggtgcttcaagccaggggtgcatgctttctcccacggacgcggggagatggcctcgctttgtacccccatatccctactcccgctgtggtcggctgcacagtgttggcccatttccgcactcagccagggaagctcagcgcctcacgtccccggggccatccctagagtttcctttaccgcagactcgttcccaagaccctggcgagtctcacctcggtcaccgttctccccgagagcgagtccgaagtctctggggccccggtccagttcgcacactcacctccgactcccgctccggaaccacggccgccggctacccccacccccgcccccatccccagtggatggaaagaagacccaagcggggcgtcgcgggccaccactcagactaaaaagtttgggttggacgggcaccggcaccaccacgctctccccgcagttcctctggcccccagccgctgtccgggcccgcaccacctgctgaggggccagggaggcggcgcagatggctagggtaaggggggcgcagagcgaacccgtccactcctcactgtacacccccagtacagtggaaggagtgcgctcagccccgcgcctggtcagcagatgcctctctcgctccgggatgaggacccagctactcaccgtgcacccggctcccgctcctgctcccgccctagtcaccgctgccgccgcccttcccttagctcgccagaccctggctcgtgaattatttatgacccggcttctgggaccaccgcgacggctttcggagagcccgcctcccactgccggccgcggaggggctcaggcggcgctgcggccggaccctcggacgtggcgggaggcaggagaaaggcccgggtgcccggggggacccgttgcggcttcctctgtcccggacggggacctaggtatggggccgccgtaatggaaaggattccttaaacatactcaccgcggcgggagagctgagagcatggccaggtgccgcgtggggatctgcctcagtcacttaaagatcgcgaaacccgagccctggacgcactctgattggaccggctgagctgcttcgccacgtagccctggggcgcccaccagcacctggacagcatccatttcctgtagaggtgcctgctcaaccccctgcactcccttcttgcaacgcttgcgcctcttttccccccgcagagtcccttacttagaatgcagctaccctcctaaaaactctcctgtctcatcccggccgcattagacccttctgttgcctaatcccaatgcaatttaaaacaaaacaaaacaaaacaaaacaaaacaaaaaacaaaaaaacaatcatttggatccttagtgtgcagcagtaccaatgctagtggctgaagcggttgaaaaacagcataaagccatattcgctcccatgtgtacacacaggcatctgctataacgtgaagccactgcaacttcttttctcactgcctattggtcttcccgctctgtgagttacaactcaacctcggagtcttcaccttgctacttagctgagtggtggaaacctgtcagaagtaatcactcggtgtctaagtgtcctcaccaatttgcacttcactcttattcaccacttcttatcttgaattgagaatactgtactctccggcaggcaaaaaaaagacttagggaagaaatgcaccttcaggatggtgtctagcatacagcaggtgtttaatacatgtttgtgatatggatagacagatgaaaggatggatgcacaagctacaaatgaatgatagacaggaacattaagtcagtacctttttctttttaccccagaatctaacataaaacaggtactggaaaataagcattttttgtttttaatagttagattgatcttgagtgtgtatatttctagacaagaaatgttagttcagaaaacttccaaaaagtacagtaggacatggcaaggttagatggtttggctctgtgtccccatccaaatctcatattgaattataattcactgggagagggacctagtgggaggtgattggattatgagggcggatttctcccttgctgttctcatgatagtgagtgagttctcaggatatctgatgatttaaaagtgtgtggcacttcccctttgctcgctctgtctctccttctgccatgtgaagatgtgcttgctttcccttcttccaccataattgtaagtttcctgaagcctctctggccatgcctacggtacagcctctgaaacccagtctcaggtagttctttatagcaatgtgagatcaaactaatatgggtggaaaacaaatctcttctaatcagggcagatttcccctctgcagcccctgcaggtcagaagtttctggttgaacatctgctggggtcccataaaccttctcctagatagcacttttaggctggagctagcaaaagaggtgatttctcaaaggagtgggtcctgatctccgtcaaagtttggtcccgcctcttttaatcgctgtgactttggctgcttaatatttctctgagcctcagtttcctggtctgcaaaatgaagacaattataactcacagggctcattttcattcctaataatatcaacaacaatagtatcagtagaaaggggtgaagcaagatggtcaaatagaaggtttgaccacccaccccccaccccggctaggaacacaatttaactgctatctacacacacaaaaagcacctttataagaaccaaaaatcaggtgagtaaccacaatacctggttttaatttcatattactgaaagaggcactgaagaagccaggaaagacagttttgatttgccaatgccgccagtcctccatcccccagcagcagcagccttgtggcttgggaaagggagagtgcagtgattgggagactttgaattgaactcagtactgctctgtcatagcagaaagcaaaac

SEQ ID NO: 317253 - DNA, 4001 bp, Homo sapiens
gccaagatgacagttgtttgaattctccaacccttcttctgctcctctgtcaaaggaggatttcgcatagggttcgcaggctagcgatctaataggtaaagcacctggcacgcagctggaaggctatctggggtctgtctgcttctgctagcatcaatactctgagctcaactccaccggggctcctaggataaccgggacagaaaggacggtgagaaaagaaaaatgagtaacatcacacaagttgaatcatatgaggttgacgatattcacatcttccatccaaaaaaccgacaatttcttatgattcaacccaacatatcgcagcggttgttcgtgtcgcatgagtctcggggggcactcaagaactacgatcgtgcacttgctttcttaacaaagaacagctgccgccctcaggaactccagcaaacctttctccagaaaggtcagtcgccttagcgggctccaggagcaacctgttgcagaatgaagcctggggcgccggcttccccgccctttacctccaaaccacctccaggccaagccccctccaggcctagctcccttctgggcggaagcctctcgcgagctgcgggacacaaaagaatgagcggcggggcgggcgcgggaagccaagagactccaggaattcgcagccgcgcaggggagggggttgccggagtaacttggctgctctgagcgcgtcggcgccagttccccgccgcggcccctgttgggcaccgatcgggggcgatcttgccagagagaaggggttctggagctagttcctccctccgatccgactccctgcccctccagacacgggctttcggggaaactgatcccgagcctctgactttctacagccgtgaagctcctggtctgtccacgctcctctttgttgtccggtcggcgtgttctggcagggtgcgccttgagcaccccagttctccatctagcgatagccgcgggtccccgcgcatgcaagcagaagggccgtggagcgagaggctgggaaggtgcttcaagccaggggtgcatgctttctcccacggacgcggggagatggcctcgctttgtacccccatatccctactcccgctgtggtcggctgcacagtgttggcccatttccgcactcagccagggaagctcagcgcctcacgtccccggggccatccctagagtttcctttaccgcagactcgttcccaagaccctggcgagtctcacctcggtcaccgttctccccgagagcgagtccgaagtctctggggccccggtccagttcgcacactcacctccgactcccgctccggaaccacggccgccggctacccccacccccgcccccatccccagtggatggaaagaagacccaagcggggcgtcgcgggccaccactcagactaaaaagtttgggttggacgggcaccggcaccaccacgctctccccgcagttcctctggcccccagccgctgtccgggcccgcaccacctgctgaggggccagggaggcggcgcagatggctagggtaaggggggcgcagagcgaacccgtccactcctcactgtacacccccagtacagtggaaggagtgcgctcagccccgcgcctggtcagcagatgcctctctcgctccgggatgaggacccagctactcaccgtgcacccggctcccgctcctgctcccgccctagtcaccgctgccgccgcccttcccttagctcgccagaccctggctcgtgaattatttatgacccggcttctgggaccaccgcgacggctttcggagagcccgcctcccactgccggccgcggaggggctcaggcggcgctgcggccggaccctcggacgtggcgggaggcaggagaaaggcccgggtgcccggggggacccgttgcggcttcctctgtcccggacggggacctaggtatggggccgccgtaatggaaaggattccttaaacatactcaccgcggcgggagagctgagagcatggccaggtgccgcgtggggatctgcctcagtcacttaaagatcgcgaaacccgagccctggacgcactctgattggaccggctgagctgcttcgccacgtagccctggggcgcccaccagcacctggacagcatccatttcctgtagaggtgcctgctcaaccccctgcactcccttcttgcaacgcttgcgcctcttttccccccgcagagtcccttacttagaatgcagctaccctcctaaaaactctcctgtctcatcccggccgcattagacccttctgttgcctaatcccaatgcaatttaaaacaaaacaaaacaaaacaaaacaaaacaaaaaacaaaaaaacaatcatttggatccttagtgtgcagcagtaccaatgctagtggctgaagcggttgaaaaacagcataaagccatattcgctcccatgtgtacacacaggcatctgctataacgtgaagccactgcaacttcttttctcactgcctattggtcttcccgctctgtgagttacaactcaacctcggagtcttcaccttgctacttagctgagtggtggaaacctgtcagaagtaatcactcggtgtctaagtgtcctcaccaatttgcacttcactcttattcaccacttcttatcttgaattgagaatactgtactctccggcaggcaaaaaaaagacttagggaagaaatgcaccttcaggatggtgtctagcatacagcaggtgtttaatacatgtttgtgatatggatagacagatgaaaggatggatgcacaagctacaaatgaatgatagacaggaacattaagtcagtacctttttctttttaccccagaatctaacataaaacaggtactggaaaataagcattttttgtttttaatagttagattgatcttgagtgtgtatatttctagacaagaaatgttagttcagaaaacttccaaaaagtacagtaggacatggcaaggttagatggtttggctctgtgtccccatccaaatctcatattgaattataattcactgggagagggacctagtgggaggtgattggattatgagggcggatttctcccttgctgttctcatgatagtgagtgagttctcaggatatctgatgatttaaaagtgtgtggcacttcccctttgctcgctctgtctctccttctgccatgtgaagatgtgcttgctttcccttcttccaccataattgtaagtttcctgaagcctctctggccatgcctacggtacagcctctgaaacccagtctcaggtagttctttatagcaatgtgagatcaaactaatatgggtggaaaacaaatctcttctaatcagggcagatttcccctctgcagcccctgcaggtcagaagtttctggttgaacatctgctggggtcccataaaccttctcctagatagcacttttaggctggagctagcaaaagaggtgatttctcaaaggagtgggtcctgatctccgtcaaagtttggtcccgcctcttttaatcgctgtgactttggctgcttaatatttctctgagcctcagtttcctggtctgcaaaatgaagacaattataactcacagggctcattttcattcctaataatatcaacaacaatagtatcagtagaaaggggtgaagcaagatggtcaaatagaaggtttgaccacccaccccccaccccggctaggaacacaatttaactgctatctacacacacaaaaagcacctttataagaaccaaaaatcaggtgagtaaccacaatacctggttttaatttcatattactgaaagaggcactgaagaagccaggaaagacagttttgatttgccaatgccgccagtcctccatcccccagcagcagcagccttgtggcttgggaaagggagagtgcagtgattgggagactttgaattgaactcagtactgctctgtcatagcagaaagcaaaactaggctgaactcagccaatttccctcaga

SEQ ID NO: 317254 - DNA, 4001 bp, Homo sapiens
gtttaaaaggatgaataagacctagtatctgatagcacaacaggatgactatagtcaataataatgtaattgtacattttgaaataactaaaagagtaattggattgtttgtaacacaaagaataaatgtttgaggagatagatacaccattttatatgatgtgattattacacattgcatgtctgtatcaaaatatctcttgtaccccgtgaatatatacacctactaggtaccgacaaaaattaaagagtttttttaaataaaaatgttagtaggttattttattcagtaacacatattaagtctccaaataagccaagagatgtctattcagaagagtgaatttgcatccaatgttaagaaataaactctaattttctacttctgtctttggaatttccaaagttagtatttttaacagcaacataaacagtaagtagcattcgttcaggattctcttcaatgccaataaccattcaaagagatttgttttggtgaactgaaatttaaattagcaaaaattgacaactatacttcaagctgttttaattgccctaagacaaataagtgttaaaaaaccaatacaaatgtattttaatgaaaatatataaactccccataatataaacatgtgatgatattcactaaatacatcctgtctctcttcctccctctctctcacacacaggcatgtacacacaccagtaggactcttacaaacagtagctgaacagctaaggaaaatgataagaaagattacagcgaattctataatcaatgattgtaatcaaatctttgtaactaaaagaacaggcttaggatggacttactgttaagccaatcaaaaatttaggtgccaaaccctagtagcagatatttcccacaggctatttttactttcataatcccttttctatgaacacataccctgaattcagaagagtatggaaaacaacaaacattaagaaggcgaaaatgacaaacagcactgtgtgtgatgaataacagcactatggcatgacagttctggaaagtgccaatcctcttcctcacacccaagctcttagaaatgaagaaaacagctgatcaagtaaacatgtttgtccttaccctaagcaatgtcaaaatttgcatattgtggtgggcagaagagagttaaatttttaagcgatgaggtggccatcagttgctagttattcgtttctcctttgatgacacacaatttgcatttttaccctaactttactctaacttttacctttggtaagtgccttagaataattcattgctctaacccaaacaaagcaaaaccaagcaaaacaaaaggtaaagaagtggaaaaccaacatagcaacatcgtttgcttccatttcttataataacattcctcgcaacctatgtaacctggtacaagtcttcttaacttctgtctaaatgctttctgcttctgtgcaaagcaatcgctaaaatactgaatatattatatattgattgcattgacattaaaaaacaatattgtgggtgcgtttggagataaatcctatctttccctgccatcagcacttaccttctgggaaatcacgcggctgtaccacatagagaaagatatgcactagttcaaagagaatgccaatgggtccagctttatgggagtcttgggtctcataatttgttgcaggcaattcataattccaagccttaggagcatctgtggatgaaggctgccctcctgaaaaggagttcccgcacagccccagcagcaacagggagccgagtacgagggccatagctagcaagatcctccaaacatgaggtagaacttggtgcctcctgcctcagagcttctggaagccttggggaaggcaagcgtgttcctgggcagaagaggagcaggaagcactggatctgctgaatcttcagttttctgtctgaggctggcttgaggcgagggatgcggaagaatgttctccaagggggtcattcactcaaggcaccatccctggcagggagagaaacagcagcagagtcatcaatgcgtgtaaactgcctgcacctggagctgcccggagaggacgctgcaaagctttagagcaaggcctccagcctaatccggatgggtgggtggaaaccaagcacacaacctgctccagagccacagggcaggtgctggcatcaaagccatgactcacagaaggtcccttctcaggagggccagactcagaacacagaccctttatgggttcgggaaatactaaatattgtagagaaagcttgagatcttggaaactaacatttattgagcacttactatcttccaggcactgttctccatgcttcatagatagaaacaaggtcctccttgtttaaggcattattccattttgcagatgaggaaactgacacagagaggattctggtgacttgcccaaggtcacaggtgattaaccatgtggccaagagtcaaacccactagtttgccttcaaagtccaagatctaactatgacatcaagacactgtcccttcagtgccctccctaatgtggggaaaagaaagagagatcagattgttactgtgtctgtgtagaaagaagtagacataggagactccattttgttctgtactaagagaaattcttcagcttgagatgctgttaatctataaccttacccccaaccccgtgctctctgaaacatgtgctgtgtccactcacggttaaatggattaagggctgtgcaagatgtgctttgttaaacagatgcttgaaggcagcatgctcgttaagagtcatcaccactccctaatctcaactacccagggacacaaacattgcggaaggccggaagaccgcagggacctctgcctaggaaagccaggtattgtccaaggtttctccccatgtgatagtctgaaatatggcctcgtgggaagggaaagacctgactgtcccccagcccgacacccgtaaagggtctgtgctgaggagcattagtataagaggaaggcatgcctcttgcagttgagacaagaggaaggcatctgtctcctgcccgtccctgggcaatggaatgtctcggtataaaacccgattgtatgttccatctactgagataggggaaaaccgccttagggctggaggtgggacatgcgggcaacaatgctgctctgtaaggcattgagatgtttatgggtatgcatatctaaagcacagcacttaattctttaccttgtctatgatgcagaaacctttgttcacgtgtttatctgctgaccttctctccactattatcctgtgaccctgccacatccccctctctgagaaacacccaagaatgatcaataaatactaagggaactcagaggccaggatggatcctccgtacgctgaacgctggtcccctgggcccccttatttctttctctatactttgtctctgtgtctttttcttttccaagtctctcgttccacctaacgagaaacacccacaggtgtggaggggcaacccaccccttcaattaaccatgcggccaagagtcaaacccactagtttgccttcaaagtccaagatctaactatgacatcaagacactgtcccttcagtgccctccctctcaggctctagtacgagccactggggccccagcaatccagtacatgcttatatgcttatttcttctccaagtgtgtgttgttctctttgccgctggagatatatcttactctgccttatattctacttatttactcactaatctcatttcaaacatccccctctccacctcaccccgaatccaaagtagaagggcatggcctcaagtctagggaccacaccgtttgaggctggacacatgtgcaacactggaacctgtctttctaataagcttaccaagtaatcctgatggaaatcttcaccctaagtcaccacctctacaactaggggtctcagagatgaaagccagggcagagggagactcttacctaccccttgggagacggagaaa

SEQ ID NO: 317255 - DNA, 4001 bp, Homo sapiens
caatagcagtcattaagtttcactgtaaagaaatcagagagttttaaaatgtaaaatatattttaagataaaaacaaatatacttgcgtgtaaagaaaaaaaagttttacctcaccaatgaaggggaaccgtctctaaaataaagaaaaatatattttaatgcggttatgtatttgaaaacatctgcacctacatttccatattgctgaaaaatttgcaaagcttaataatacttatggttaatttttttgaaatttgagtaactaatatgaatttttttttatcatcgtcatcattatcattacatggttttgacctaaacaatttcctcagggagttttactttggctggatggattttggtttgtaatattcaacatgtacataaatctttatcatctgaaagatcattcagctctcattcatatatctgattttgctattcactttttacctcccaggttttgtctggtgtgtgtgtgtgtgtgtgtgtgcatctgtgtgttaaagtgtggcctttgcgacgggcgcaatggctcacgcctgtaatcccagcactttgggaggccgagggggcggatcacgaggtcaggagatcgaaaccatcctggctaacacggtgaaaccccgtctctactaaagatacaaaaaattagccgggcgtggtggcgggcgcctgtagtcccagctactgggtaggctgagtgaggcaggagaatggcgtgaacccgagaggcggagcttgcagtgagcccaggtcgcgccactgcactccagcctggctacagagcgagactccgtctcaaaaaaaaaaaaaccacaaacatacaacaaaaaaaagagtggtctttgccacctcttcacagtaccagaaggaccatagatccatttgttctccaatgaagcttcaatatggtttgtgaattgaccacagattatgaactacagaataaaaataaaaagtacaggaaaatcatcacttattattttaagaattggagcttcatttatctaattttagggaacaaaaataatagtttaaagtttggacaggatgataataacatcaatagcaaatggtatcaagtagcagttgagtttctaccatacctgaggtactctgctaagcactttatataattaccttataaaatctttaaaacaatgttatggtgtaggtgttattattttctccatttaaaaaaagataatatttagcatagtcactggctaggattaagaatttgccatcagatttgtcttacattagagtttcatctacttatgttacactaaaggccattgcattacactatattacgttacagtccactaaaggtatgatgtgcatttacttctattccatcaagtatccctaatgtctgtacataaatacctccagcaatggcacttcacagccataggaagcccaatccagcattctataatttgaagagataaactctgttaagataatctacgtgggatcctgcttttctataatttttcctcctccagcctcctacatttatgaacttacctcctttccttgctgtttatctattttcagatactacaactttattattttgatttttaaattttccgttgaaaagtctgacactacaaatctcatgtccatctatgtctctctgctgctttattacaaacactatagtactttatcataagcacaaatgcctataaacaattagcaaatggttatacaattgttacaattttggaagtccatttacttaccttccttgcaaaagcaacacatacaatgcaggcccaaaggagaagcttcattttgattgaccctatgaatattaacactataaatttattgttttagaaaatacgcaatgtatttttaaattatatttttcttcttttagagagaaacgaaagaatacatggcttttttagtctgtctaggaagacccttaacagaatagttggccctgctatttaactactgtctgtataccttaacaggaatgtcactaaagccaatataaatatatattagcagataccgttcaacagttaattgacttccaactgaaatgtctaaaagtagatgtcaactcatttagctccccagggacatattttgcaattaatttattttggaggtcttaccaggaaataaaattgcttaaatgtcaccattctatgggtgcttcttaatgttttgtttttatgaattcagtgggagattggtatcacctacttagaaaaatttctaatcttaaacttgatcgtaattttttttctctatttctgaagaatagtggagaaggcatattctcaggtgtgtgtcttgattaggctcagttttcttcagagaacctaaaaccattctccaactgattgattattaaagtgtatggcttcttatttcttcaaagccaaaatatctccacttgtaccgaaaaattgcatatacaaggacacttatagcattatttagaatctcataatgtgaaaaatattaaatcccaacaaaaagttttgttaagaataatcatattaggttcataatatattgctaaatgaatatttaaatattaaatattgcaaagataagccataaagagaataaaatcatgtccttttcagtaacatgaatacagttggaggtcattgtcataagtaaattaataatgcaggaacagaaaaccaaatattcgtgttctcccttataactgggagctaaacattaagtacatgtggacataaagatggcaatatgagacactggggaatactagtggagggaggaaggagaggaagtgggctgaaaaactacctattaggtactatgctcaatacctgggtgaagggatccatccataccccaaacctcagcatcatgcaatatacccatgtaacaaacctgcacatgtagcccctgaatctaaaatagaagttaaaattataaaataagtaaataaatacaaataaataactaaaacagcaaatagaaacaagaataatattcctactctagagacttgtagcactataaaaagagcaccaactttatatatgacaggaaactaatttaaaataaaaaagtagtagataagaacatgagtattggtaaaatatttaatgagttatgaattagaagatcagtttgtttttataattatttgtatatttttctttcattttctgtagtctattttttgtgaagtgagaatgtattgcttatatactatgtatattctagtaatataatgaacttccaagttttttttgataagattgtggattctttcctacctaatccttacaaaatctaggctggaaaaaaatcatcatattcctcgaaacatatttttaatcttggctaagctgcttacctgttcaacatggctttgaccacatactgagtgacctttgctttagtgatctttgatattgtacatcaggttttcactgacacacaatttaataaaaagtgtttcattatccttttccttctttatctttttcttgaaatagcatgttaaatgagacagacttacctgaccctatttttcagttcttcagaagcacatgaggctttatgaacagaactgatctgttttttctagggtttatgtgaattcttgagtccagtctgaatgtagggaaaaaaaaatttctttgctaagtcttgcctcatacagtgttaaagtgagaactcaggtgtgaggtggactagatttatacagactagattgtgtcatcaatctctggaaactatgaaataatataaatatgccatgcatttacaagtatgctattaaagtccatctgactgaaatctggtagaaaaatttttatttttattttatttttgttatggtttgtgcattttctttttatttatttatttatttatttatttatttatttattttatttaagttttagggtacatgtgcacattgtgcaggttagttacatatgtatacatgtgccatgctggtgcgctgcaccca

SEQ ID NO: 317256 - DNA, 4001 bp, Homo sapiens
tatcattttttaactttaaattacttttcttgagtctgtgcttatgtacttaaagagaagttgtatattctctcctacacattcattctctaataattctctgctcttatctatttataaaactaagaataatatgaagatgaaaaaagtcaatgtttgctaaacctaagattttactataatctcttatggtgaataacgagacaatgctagcactctttgtttgacatcacctcaaattttttatagctacattggcattctgttcatgaaacacaagtaaagcgatgacttcattcccgaggataaaggataattgatcttaaccttcctatcacttttccttaactcaaagcactaatgcaattgaaggtactgataaataaaatttctccaggaaatgaatgacattgtgacagataacctccaagttacctccaaaaagtacaaagtacaatatgattcagaatctcaattcaggaaacccttgccccacagtgtgaatggaaagctgccaaaaatattttgttgaaaagaaattcaaactttgaggatattttttcttcctcagtttttaaacaaaaaaaaaaacctaatttcaacaaaatcccaacaattcaaaatgaagcaatgttcaaagctggattattcatttacattaaatttattagtgtgatgcttttattaccacaaacctaaaacattttgccacctttatctcctgatgttaccaactaatcctgataaaacatataaagctaagtaatggctctggaaaactgtgtataactatattaagttgctacttcaccaagatagtagtattcccatctcttttccctttctttttttccagtcactgatgatacttaccatactgagctggagtatgtgaatatggctgattttggccacataattttgccatactttttaaaacagaggtcaacagctaaattaaggcaaaattttaccacatttttaaaaatcggagtctaaagaatggagggaaggttattgattgccacgttaatgtaacatttccctttccagaacaagtaattatgcctctttaatgtaaatatggtaacccactcaacgtaagctaatctagagaacagacgcccaaagcacactgtcacccaatacacgagcgcacacacacacacagtggccagaggacagagcaaattcagaaacccagagctcagcaccttgcatagaactgtcacccctgacaaccttcacacaagcacacctggctggcttagatttgcagcaccagtataccttactggtaacccagctgcagcccaccatcacagcccgcaaacgcaagcccacaaccccacacaccccgtcactttttccaagagacctgtacgccggccccaagcctcactggctccgagcccgtccggagtttccgcggccgccccgaggccactaaccgtgtctgcagtcgcagtagccccagtccaccttgccacgggcgtctccgtagaaacaccagggtctgcccgcgccgtcggggctccgacaaaagttgtggcgctgtcctcgcagctgagcccagctcgctgggggcgaccgctccaggaagggtggcacctccgcccaccgcagacacggggcgccgaagtccgtcacgctgacccatggctcgccggcggggcagccccaggggtgcggccggggcgtgtgcccggcctggagggcgtgcgggcgctgggcagggagcgcccgcggggggcgcgggaagcgcgggagaggcggcggcggacgcgtcctcgggggccgctgctgggtgggaaggtaataggggtagtgcggacccgcagggggcgaatggcggtggctgtggtggagggaatcattgaggacagaatcaaagccgaccacttcggggagcgcccctaacatcagggctagcacgaagcgggcgagcgtcatggtgccagcgctgcggggtctggtccatgctccccagcttctcgggcttggagcggagaagaggagggggcgggggcggggctgccgcgtccctcgaatcccccagccccctcccgcccccgcacgcggaccgccctcgcctccccaaccttgcctcccgccgctggtgccctgccgcgcctcggctcctgtcccctggcggcggccgcgggtggggaaatctggagctcagccgagccccggccggcggagaggaccggaaaagagaaggcgcggacgcagcggggagcggttgggcctgagccccaggtagcggcgcaggcacgagcccgggaactctgccccctgggggcgggcgccggccgcgcaagctgctccggacctacgctcggcccctgccaggcccaccgcagtccgcccgcacggcactgccagctgctgggaccgagcccgagggtgcccgcgcggagcacggtcttggctgccccttgccagcatgcagcaccagcacagcccggcgttggcggctcccaaatctggcaccggcccctgccgtcatctctcctccaacctcgtcgccccgtatcttgcttcctctgttttgaaatctttaccaaagtatggatggatttagatgcagctcttccctgacaactcccaggataaaagttatcaaaacccacgaggaatgttaaagccatttcactgaactatacgctcttcaaggacaagaccacgttttattcagcttgatatcaccgtgcttaacaccgtgccccaataaacattggctgaaattaaaatcctgaaccgactcagggaaaggagcttgagcctttctgcttcctgcctcccactttccagccggtgccctggacaacaccagttgtttggttattattgggattcagtgaggctctcttaataccaaatttcctctctaaccagagaagacttcatccgtcccggtttccatcctatccaaaaagtccacccccctagcacctgcctcgttttttgcagggcaagggacttctgttaagcctattcatttgcctctccagagactctgcctgctgacaattttgaagcttcactgttggctcgacctcagcttagtagggccctttcaacactcctcgcccccctcccgcaggctccaaaaaactgttggcttagaatcttaaaaaaaaaaagttactggagctgtatgttttagtattttgcctttcagttgtttctgactatgctaccaaagtttgacaaggagaaggaagcccgtaaagaaggcaacattttattttctggcatggtcacgtttcgttgtgaaaaagcaatgctgtctcataatataatgtaccctgaagaaaacttgaacaaaattcaaatgtttattgttaaaacctaggtttcaattaggaactgaattaattcactactagctttaaataagccatctttagccgggcgaggtggctcacacctgtaatcccagcagtttgggacgcccaggcaggcggatcacatgaggccaggagttcgagaacagcgtcgccaacatgatgaaacccgcctttactaaaaatacaaaaagccgggggagtgttggcgcacgcctgtaattccagctacttgggaggctgagccaggaaaatcgcttgaacctgggagcagaggttgcagtgagccgagatcgtgccactgcactccagcctgggcgacagagggagacgttgtctcaagaaaaaaaaaaaaaatccatctttaattttgtgggtcgttttattgttttttgtttcactcctattaatgaaatatttgattttactttagagagaattgggtaaaagaaatgatgttaagagtccagggatgtatttgtcaaatctttattcaagttgttttcattccagttgtttttacccattatttttttactaatacttttctggctccaaaagcatagttaaatctatacttgtggaagacaatgaaagataaaatatatatctggagtagtctatttgttcattttagtgagggttggc

SEQ ID NO: 317257 - DNA, 4001 bp, Homo sapiens
ctcaagacgtgttgtagatggccaagatgctgctgcagggtgctggccttggcaggtcagcctatacttgggccacagctttatctgtggatgttccctggtcagtgagaggtggatactgacaacagcacactacatacaagtgtgagctctagctggtagctagcacacagacaggttctcagtgaatatttgcatgactacataaatgaaccaatagacaaatgaaagtggtaagattgactgggcacagtgactcacgcctataaccccagcactttgggaggctgaggtgggtggattgctcaagtccaggagttcaaaaccagcctgggcaacatggccaaacaccgtctctacaaaaaatataaagaaattagcctgacatgatggtgcatgcctgtagtcccagctacttgggaggctgaagcaggaggattgcttgagcccgggaggtggaggatgcggtgagtttagatcatgccactgcactccagcctgggcgagagagtgagaccctgtctgaaaagaaaaggaaaaaaatgtggtgagataggcagggcagaaggaaaccctaggtcacatgggactctcaaactagggatgaccagagataaggcacagaagtagaaaaaggaatgttggagacaggtgctatattagagacttttcttacttttcacaaatcacttcctaaatactagtcagggttttttttttcttcttttgggccacaaacacaacaggtgtggttcaaccacacctgtagtcccagctactagggaggctgagtgggaggattgcttgaacccaggagtctgaggttgcagtgggctatgattgcaccactgcactctaacctgggtgacagagtgagactctgtctcttaaaaaaaaaatgctctatgaagattcaaatttagcttttacttgattcaaggtcaccatcaggaatatgaagtatgttagtttataaatacaatgatgccctcagatgcggttgaggttgcaagctgtttacttttgtgctatttggtttaactgaattggcattttgcagtatttgtgtatctttcttctttgctacctgttaagttttttgctctctcagcataccctttctgttttttggggggacggggtcttactctgtcgctaaggctggagtgcagtggcgctatctcggcttactgcaacctccactttccaggctcaagcacttctcctgcctcagtctattgagtagctgggactacaggtgcccgccaccacgcccggctaatttttgtattttttgtagagatggggtttcaccatgttgcccaggctggtcttgaactcctgatctcaggtgatctgcccgccttggcatcccaaagtgctgggattacaggcgtgagctgctgtgcctggccagtatacccttcctttaaatccctgtggaccagaaaaataaatgaacaagcatatacctgaaatcatagaatagtgtttgctcttccagttccctctgcttgagatgctcttttcctggatcctcttacttaatttagttatccccttcagttctgctcaaatgactccttcttagtgaggccttctttaactacccttctaaagattgcaacactcctgcccctgtacttcagatgcccctttcctttcatagtacttattaccttctaacaagccttataatttacacatttaatatgtgcattgattataagtcccacgaagatagggatcttgtgggtgtgtgtgtgtactgctatttccaatcgggagcattggaatggtgctgggtatatagtagcctctcaggaccttctcaggctgtgctactcataactaacatcccatgggtgaagtgtcacattgttctatgtgatgccctctttagtaaaaatcctctgcctctgccttctcaaccccaccctggcgctcacctgagatccccagcagaaggagcagcgtgaaggcacagccagcagggcccatgtctctgtcctcagagccagtgagcgcttcctgcttcctggactcaggctcccaggaagaggccaatggggagctgccagaactagcttctcctagatggattcctctgcttcaccccctcctctcctttggtcttcacccgctgccagatcctgaagggaccagacttcagaagtgcagctgcaggacccaggggaggaactggggtctgtggcgccccctgctgtcctgggagagcagggtttctggggtttctgcctgtggtgttgaggagtggctggttgagggcactggaagaaacaggaccctgtctctagcaaggagatagaaggtggacaggattctccaaaagcaagaaatggaaaagaggaaatgaacccagtatctggttaatttttctgagtttttttgtttgtttgttttcatttctgttacagtgttagctgcactgcaagtcaagtttcctgggaaacagactctaagacagagatttgtgtgcaggaaatttattttagagtggtctcaggatcagcagctcttgggtgggtagtaggattggttagagggagagttgaactgtgatgcgtttgcaacagaggccacagcctatctcacaagtttctctggagctgaggtggccctcagagactttctgtactgagctaagaaggatgcgttcttaggggtctgcatcattggatgcaggccacctcctaggagggggcattaccttgggtgaggtggctctgttggcagttcttggaataagacttagctgtgaactgtcagcagccaacactcctagctgctaagggaatgaatgcttcagttctaaaggggggtctggatggtacaccacaacatctacctcagaaatcttcactctgccttttgttttctgtgccaattgtttgtagggtgctaggtctgtggaggcagaattcaatgaactattaaaatgttactgctctcttgcaacttaaaatattgggatgcttgaaagaaacatataagcagtttaaaactaataggccaggcacggtggctcatgcctgtaatcccagcactttgggaggccgaggcgggtggatcacctgaggtcaggagtttgagaccatcctggccaacatggtgaaatcccgtctctactaaaaatacaaaaattagctgggtgtagtggcgtgcacctgtagtcacagctactcgggaggctgaggcaggagaatcgcttgaacccgggaggcggaggttgcagtgagccaagatggcgccactgcactccagcctgggcgacagagcgagactccgtctaaaaaaaaaaaaataataataataataataataatagaagtggctgggcgtggtagcttacgcctattatcccagcactttgaaaggctgaacggggaggatcccttgagaccaggagtttgagatcagcctgggcaatacagtgagaccctatatctacaaaaatttaaaaattagcctggtgtagtgatgtgcacctgaagtccccagctactcgggaggctgaggcaggaggatcacttgaagtcagtagttcaaggctacatgagctatgactgtaccactgtgctccagcttgggcgacggaaagaacctgtctcaaataataatggaagaccagaaaatgtagatattttggtaagaactattcagttacaggcaactgaggctcacttaagctagcttaaatcaagaggagattattttaaagctattgttttgagctgaattatgtctcctcaaaaatgtatcttgaggctgggcatggtggctcacgcctgtaatcccagcactctgggaggccgaggcgggtgggtcacgaggtcaggagatcgagaccatcctggctaacacagtgaaaacccgtctctactaaaaaatacaaaaaattagccgggtgtagtggcgagtgcctgtagtcccagccacttgggaggctgaggcaggagaatggcgtgaaccctggaggc

SEQ ID NO: 317258 - DNA, 4001 bp, Homo sapiens
cagcagaaggtaaaggggcacctgagcccatgggcaggctctcatgggaccaccggcaacatctcagccttggagatgagagggcagccttggctgggtcagggagcggggcacatgagtgtgttccggtccagtagagatgctttcaagggcaaagctgtgcggcaccgttgttaagagagaggctttcgggatcaggaatacttggttttgaacttcagctctgctccttcccagcctccctcctcagagcttcagtttttcatttgtgaaatggggatggggaaagcacccacctcatgggcctcgctagcaggctctgggtctctggcagccacggtcacgcgtgttccccagcgtggaggtgcatctctttccatacatgcttctggcagtgttgcacagcgttgcacagcttggcggcctcctggctcctgcaccagaagcttgggcccagggcacactggtcggtgcccagcagtggggtcctggggccgtggcaggcccccaccttcttgcacacagccacggggtccatcatgtccttgagactctcaatgagcacgggctcgtactgggtgacgaagtgcttgcactggatcatatagggcagcggcaggatgctgcagccacccttgaaggccaccaggatgtctcgcttggtgctcttgctctccaagttgtgggaggacaccgtgagcagcctcttgcacccattgcagaagctgccctggttctccgcgtcccactctggggacggcacgatggcataggcatcatggactgcccgggcccgcctccggttgccacacagacggatgaacttgcacaccttctctggggtgattttggccacaagctgcaccaaggaggggctgtaggtgtccaccaagatgatgcactccttcgtgatagaggcaggcattaccgagcacacgcgctccagggcatgggtgatcatgagctcagagctgttggacatgagccagtggtccagcttctgcaccacgttcatgcacacctcacaggtcacaccggccttcatctgcatctcgctctgtttccttggcaaccccagctccagggaggggaccccgtccatggccactacttgagtcaaacgggcaggtgcccctagctcctcacagaatccccccttcctgcagagctcctgcggggggagaagcctcagtgcttggtcagcagggacaaaaaactggaagaggtagttcttgcagaggacggccaggccaggccccaaggactcacactgctcctggatgttcaagtcggccaaggtcaagttggaccggacagcctcctggagtcgggagacctgccgtacacagtcttggcacagagctccttcaggcgcctggcgggggtggaaggtaaggggcccattggccatgaacggagccacagcctcaaaggtgtcctctttggagagtggcctcagggtggccaggtgcctctgcagcggctcacagaggctgagcgctgtgcacacctgtgccggggcactgtccggggccccacggagcatgctcaggatggccgaactgtgggcatccaccatccacttgcatccggctgaagactcctggctggggagccactcacaggtcttcatcaccaaagccaggatgtcagactccgtggcgtcagggttcagcccattgccagcggcggctgctatgtcctggcatacgtcgcagggcagagacttcgcggtgggtttgttccatacggccccttggcagtaccccacagccccgcacctggcagctgtctgcagatcctgacaccacaccgtggagccctttgcacactcctgggggcctgaggtggggctggccctggtggcccccaggaggctgggcaggaggagcagggcacacagcatgctgcccagggactctctggctccagagtacccagcagtggctgctgctataaacctggctctcctgcctggccccagaggaggcacggaagggcggccccacctcctggccactcccacagcctgactcacaccctgtgcccggggattcctggcctcttcgcctttgctcttggagtgcctggaacactatccctcccctcttttcccctggataagataaactcttagcagttttctgagcctagctgatacgtgaatgaagctcggctcctaggaagccctcctggcccctgggctgtgtcccccaccctccccctgctgcagtagttcctggggttcccttccctgcagctcactgtcctctcctgacttgtgtggcctgggtcccctcctggaatgtgagcccccctcacaccccgaggagtctctgcccccattctgggaggtacggaaaggcaccctctgccttatttgctgaagatcgagtgttcccaatgactggccaccccctggatgccactgttttctaacgtggcctcagggccacgtgcccagctggggttctgcccctggctgtgctgtttggggagttagtctctttgagcttcaggtcttaaactgtgaagtgggagagctgtggacctcactgccacaccgcaaaagccacttgcaaactcaggtcctcgagcccagccggtctcttcattctagaaatgtcaatcaaaggctgagtgtgggctggtctgtagtaggcgtagattaaatgtttgttgaaggtacacacacacaaaagaggtttgtttcgtttctgtgtcatctgttatcttatctttttcttcttccttagtttttaaaatagttcttaggcaagagagtcagctgggtgagcacgcacaggcgccttgcgtcgggtcctgttcattaaatggagaaatctggagtcagcctcacctctggcctaattgccaaacagccatggagtgggcaggccagaggtttgatggcagggggctcccctagccccacatgtgggtgtcctcagctcagcttcctgggcttgggtgctctgtaggaacacacttcccagttatgtgggtcgggcagcctggcctgaaattgcaacagccacacatgaggaatgcaatagtgcagggtgcttcccgccagccctcctgctgggtacaggggtcaggaagagaagacggaaaataggatttgctgagttcttgcagtgacttccaaggactctggttgctggggaccagtggaggggacagtcttagggaacaggtgagcctgggtgtgctcagctgcaggatggcagctggccagcacctccaggtcataccccaggtggggctggagacgtgggtgtccttacctggacttggctcagccaagcacgtgttgatacatttctatgggcttatgatgggcctgccattcattcagtccatcgcctgacattcccagggcacccactcgcatcccaccaggactttgggcaccaggctgaagcaaacagaagggcctgccccttggcgtgaacgcagctgtgtgccagacttcctgcgagtctcttgagaccccacccccacggcgctgccttggtctcttgcactgagggggtgcgacccaggaggccagaatgtcctcctcatcctgacatcccttgagcctggcacaacatcccgataatgaaggacttcttggctcggcattgtctttgtatgattgacccacgctgctgtgtttagctgtagagccgacattgtcgtttctgggtagaattccactgggcaggtggaatgccccactgggccctgggtgtgtattaattaggtcagtgcaccatggtggatttgtctactcgacccttgatgggcctttggaacaattccacttgggagccagtagaagtaacgctgccccgaacacttctgtgtatgtcttggatgcacacgtgtcttcccttctctgctgggtcttatggaggagcggcacggattgggcatgcgtcgtgtgtgttgagcaggtactgctggatcgctttccaaagtggttgtgcccgttcccactcccctcagcagca

SEQ ID NO: 317259 - DNA, 4001 bp, Homo sapiens
gtgggacaaatgcaaattcaaagataaacctacataatggtaaagcaagctatcattctctaattgtaaaagtgaaaaacactatgaaatcagtccttttcttaacaactaacctcaaatatttttctgtttttagttctaatttccatcctatcctctccccacacatactcccacaaagcctctagaacatcaagtagaacacaatgttatgaacaaagtataataaacaagattggacgtcagtcagtgcgcctctgtataaatttactaaatcaatatatgtatgaatttactaacaaatgctcctagtgatattaaaacgagaaataatttgtatattggcaccactacaagcagccaatgagcatgaagcaagttttcacctggaccctgccaacacagtcatgaagactttaggaaaatacctaagcttgtttcataatacatgcacttttactcccccccccatcctttagtaaactttctagatataaattttaaaatcttaaaatttataattagttaccagcgcccttcatcccacagatcaggtgtcctacattttgttcaggtcctgccttgaaaacaaacccgattgccccattttctgcgagggagctcagctccaggcagctccctatgaagtcaccgcgtttgttgtttcaaagatgcaattaaatgaaaatgacacaaggctgtcgaacagattagttggaagtgtgcggtggtgtcgatcatatacgtgtatggccaatgaaaactgtattgctgtaaatctcttagtgatatttctccccatcctcctctctccattatattcacaacagaaggaaattaaactttgtaagaattttcttgactttggtttaactttagcttcccagctgtctgctcttacagtatcacgtaatgagcaaagcggtggggctagggggccggagggtagagtgttaactttagcaagcagaagaaaagcaataaaagaccttgcatcagacagtgtctctccctctgccccctcttcctctgcttccccgccatcccacccccttctcgagcccttacacacacattcttctgggcggcctctaaccacaccatctccacaatcatttgcagaaattagaaacagactccgggagcccttcccttaagcacgcacagagcggagctgtgcaagcacgacggggcaatgtcactccctattaccccacaatctcttactccccctgtgggtttcattcccgagaatccggctttcttccgcagaggagatggatctacctaattagcaatggagtttcatctcattcttccccactccagtcaccccacccccactctaacgtacaaaaacacccaccaccaaaaccaaagaaaagttccttctaccagggcaaccgaggagttgggtttagggactggagcgaaagcagagagaggaggaagagaacgagcgcaatgtactttgttttgcacttctgcacatgcagcgcagagcccagggcggctctcgtccttaccggctggtcccgagaccgggtcctgctactggagcgccgggcgagggctgcagggacgcggcgtcggggcgggccgccggcagccgccgcgggcgccgagagccaccaccacttctcccacaagcggctgcgggcgtgggctgaaggagctgtagaaggagcctggggagggggagaagaggagcagcatctcctcctcctcctcctcgcctcggaaacgctccccagcggcgatcccggccgactgcctgacccccgagcgctcaacgcacccccgccgccctactgtgctcgacgcctctccaagagcttcgccaaaaccttctggcgcgggcggctcaactcctgtaggcgactctgaccgctgccgaggcggaccggggagctacggagcacggctcgccagcacgacggtctccaggggccgtgagcatggtgtgtcaccctcgcctcagcgtggccgctggagctactcgcaccactggggctccacctcgggcagccgcgccggctccgcccccccggtcctgtcactcaaccattccccggcactgggaggaccgcagatctcccaccccgagctcccctcgacctcattggcccgcctggcatccagctccacctcctccctagggacgaggtcgccagggagaccagcgccccggttgccatgacaaccagtgccttgggcctggcttttcgcgttcttcggactagccagaggctcaggttggtgaccgagcggcagagttcctagcgcctgcagtgtggtgaactccaacttttaggccaagttgaaaatgcagccgacgacccccacacttctaacttcagaatcaaaactatgaccctagggagtgaggaggagagtgaaaaatgcgtaagtgctggctcctcccttactcttcgctgcctctcagccttgtttctatattctcacggggcgctttggtctttgaaaggaagaggagaatgggggagaggaagagcatggctttgccagctccttgcagcaatatagcaacttagaaatggcggggtcaacgaaaaaagcccggtgagttttcccacggttgtaaagctatcttcaaaagtgtggtgacagcacaacgccaaatgccctagggaaaactgaaattctcatatttttgaaaaaagtttgtaaatacttgccttgttattttatctatgagactaaaataatcccgaagtttgaaaatttaaggaaaaggtttaacatagtcgataacctcccacttttctatatacactgaaatttggccaaggtatatccagacagctgtacccctccttgctgcaagccgaaatatttgagtttcaatagttaaacaagagagtcttgctgaattcatgaacaaataatatcctgtgatttgagttttgaaagttttgggttattctcagaggtataaggtaaactggtccactctggaaagggtacctgaagataaatttagtctgagacccttaatgttgagccctaggtaaatctgaatttcatggctggctccaaagtggagagatctgaggcttatttggcttccccaaaaaaagtcaaagcagcaatcctaggttccctagcccctgaggctgccatacatgtatgatgaatgagggaattaatagtaatgatttatctttggcgagcacttgagttttcattatatcatttactaaatgaataactatgatagatatcttcagtcaaatatgccttacaagtatgcattgaatgtgattactcatagggctaaacacaacggaaaatacacagcaggattttaagctaagtccccgctcccaaggagctaacctggagcctaagaaagaaaactagcactcttgaaacaatttgagaacaattatagctaaaatgtgcagccaaactttgagtaggtagcagctaagagaaagtttgctatgtaaaatgggctggattcctcagtttatggaagaggggaatttacactgggctttgatgaatgcagcaaagatgaggaaagtcagttgaggggaacaacaaaaactaaacagcagcagcagggataagtggtgaaagtaaataacaggccaggctccttggatgggaaacacaagtggatgattggagcccttttctcagttcttcccccatttttaaatgttctggatcatctatcagggaggtaggaaaggcaggttgggaagaacagaaactttcatgaaacatctgtctctgtttgcctctgaaagaaagttcatgtatttattggaaagaaaagcaatatccttaattaatggctgcaatagcttgtggattcacatcagaaagaaggtatagcaagtatagtgttgtaaatttccgcaaaagtagacaaaccacagtgttgttagcttttttccttttctttttcttcttcgtgtttttttttttattaaggccatttcaggtggttgccctcaaggcattttcac

SEQ ID NO: 317260 - DNA, 4001 bp, Homo sapiens
gaggaagcagggttaagacccagggagtctgactccagtaatacttcctgtcttgccatgggatacacctatggttcttgaatccaaaatgcagaaatatgaatcttacaggagaatgaggccctaccatttacagaatgtgatgtcttcctttacagatgaaatttagttcttctggtgaagaggacaatggctgggtaggagcttatgcccacacctaatggaaacttatccttgacctgcgtggctactggcccaagataaagattacttggagcagcccaccacagaatcagctccaagatatgggggaagtacttggacaccatagtgaacaaaacagagatggtccctgccctcatggggcccacagtttatttgggaagacaggcaatgtacaagtaaattctcaaatattttatgatttgtcttgaatttttaaacttaaaccttctccagttttaaaatagcatggaagcaaaaatcaaaatggagtggagcagatcacaaaattgtaactcttctctaaggaccagtatgacagcctaggactgagaccttgcatcttttttggaggtcagttctgacagcatcctttgattgaagagggatttggaaactttggcctgtcatggcctttgatggttcttaaatagccacatctagttggctttttgtggaataacatgttcagagacataaccaccactcactttcagtagaaagagcaaaaccactaacatgtataatgaatagcagctcctggcctaggaaactcactaagtcttggaattcaggaaccagagaggaaaccctgaagcctctcaggtgatctggattgacaccagacatctgtgactctatcaaagctttgtacagaattcaaggcatggacataaaagtgctttaagttgtaagacattagcagaataagatacgggatttcatgaacattatttagccatatagacattttaagataatcagtgttagtcctagctgcaaatatgttccctatttttttttagcattccacaaaattctcattcttttaattatctccctttgctgctaggacctccttaaggctttcatctggttcacactaggctgggaagaaaagatgtagaagttcttggcctggccctggccttttctcctttatcctttgctatttcctgtctcctgtttctctacagaagtaaatcatgttgacatatccccaaagagtacgggctgtagtatggaagaaatatagaaacaagggacagctgagacagatgcacataaagaggaatatgacccactttatatttatgtatttattatgttgttaaacaaataatgctttattaatacaagtacacacaaactccaaagcactaagaaatttaaatatctatgtcatagcaaacagctggcaattcaacatccagggtcgacagaatgcttgaaggagactgcaaacagattgcattcccatggtggagagggcattttcacaggtgaaggggggcccagctgaaacagcttttcaagctctccctcctcatcaaggatcatgagaggcactccactcaaggggaggtgtgcaatctggcgctcttcaggcaggtcaaaactctcaaagtctagaagattgaagggaaagaatttttctatttctggataggcgtcatctgaggcaggaacagaactttttgttttaacagtcttctcggtcatctttttggcagaaaagcttggctgtttttgttttctgggtccattggtctttactgacttttctgtagctctgttgacagtgcccaaagcctttctggtagctttaggtaaggctgatggagcatcgtatgttttgccaaaacgtcgtgttaaaacttgagatatcccatctaatgctttgattgaaggtctagactccagcttcagcacatccttggcagccacacgggtgcctggttctccaatttccttatcaacgtagatcagagtagccattctggattattgccgctctcaacagccacattcatctaagaccgtggtcccactttatatttagatagaatgttaactatagtggaaattggtgtaatatctaatttttgtgcctagcacatcatctgagagttagcatgaactcatataaagagcacaggcctgaggtcagacaaacctgggtaggaatctcgggagtaccactttctgttagctgtaagatttgggcaagttagctaacatccaagccctatttccacatccataaaatggaggtaaaacccaactcttacacattgttaaatggtcaaaaaccacttaggtaaagggcagagcaaccaataaataaatagtttctgccgttattgcattttctaatttataatgtacttttgcatacattatttcacttcttactaacctttaataaatgcaagtcttccattttttactaaagcagcacccctgaagtttctctaaactgcaaaatgctcaaatgtttcatcccgagttatcccttttgccaactctgatctactggtggcagacaatccagcatgcagtggtggggagagccgagaggccctctctgagcaacgtgactactaatggtgcttgcttgggcaggaatactggactatggcaatgactatatacctttgccaacccaaccccaatctagtccaggctattgattcacagcagcaaagggtcacttctgtttctaaggcctagagataagttgagggcacttttgcagtgagccatttcaattcaatgataaatattcttgttgtctaattcattctatgaatctttgacccagtgacatatgtgcgtacgtatttgagcccatatgcaaaaatatacagttgagtcttgaacaatacaggattgagtcgcatggatccacttgttctcagattttcttctgcggctgccacctctgagactgcaagaccaacccctcctcttcctcctcctcctcagcctattcaacgtgaagacaatgagggtgaagacctgtatgatgatctatttctacttaatgaataatgcaatatgttctcttccttatgatttttcttaataacattttcttcagcttactttattgtgagaatacaggatatagtgcataaaacatacgaaatatatgttagtcgactgtgttattggtgaggtcaacggaagactatcggttaagctttttgggagtcaaaggttataggtggattttcgactatgcaggtgattggcgcccctaaccctcacattgttcaagggtcaactgtgcctgtttatttgcataaggccacctcaaatacaaagggccattcaaaggtatcattagaagtcttgctcttaacctgacacagctagctagaaagtgacagagccatgacttggacctggtatatcaactgattgatgtaacctctatatggagcttgtaaattcaagtgccacccagagtcagtgagggaatgtaaatatatgatgtgccagtggaagacaatggggaacggggagactggtggggtagagtgtgtgtgccaatctgcaggcattccaattgaattgtttttcttcaaacactatggtaggcaacttttacaataaagtttgcaggccacctgtctgtaatcctgtctcattataccattagcaggaattattattaaacaacttctttcaactcttccgacacattcattttttattaacagccttctaatagtactctgaattggggcagaaataattaaagtaaaagatgtcatatatgtgtcctaaagaagggacaaataaaggaggtctagaggtgtgaaagcaaatctaatccaggaacactttctggaggaggtggcatttgagctaggagagatggaatgcttaagtaagagaaggagctaggagagacggaatgcttaagtaaaagaagaggaaatctccccaggcaaaagaaacaacaatgaacaaaacagaggaaagcatgg

SEQ ID NO: 317261 - DNA, 4001 bp, Homo sapiens; identical to SEQ ID NO: 317218

SEQ ID NO: 317262 - DNA, 4001 bp, Homo sapiens
tggaaatcagacagatcaggtttgaatcccagctctgccagagtggctttctcactccgatgccgggcagaggttcccaacaaaagaggttgtttgttgatgattaacagggtcagtgtaagaattaaatgaaatggaagatgctaaagctcctggcacaggggatgttcagtccttactcagggtctcttggtctgaagtccccagagataattatctctaccttaagctgtaaacacagcatctattcatcaacatttgttatattattaattaacttgttatcccatgggggatactgaaacaatgaaaagtctccatcatcctagccctccctaagatggcaggaagaagctcggaggggaaagaccaagagccagaggtaaatcagctctccagattctgccaagaccaaggtaaaccaaagtgccaccaccaggagaaagcacagccttcaccctctaacacatgacgctaacaggatctactgccttaaagatattgggggcattaagagtctatgggaactctggtactgggaacacagtgcctggcccttggcagaagtgctgcctctgtcaccaccatgcatctctgaagacctgggaaagcgccctcatcagtgtccccaagcactgagcagatgggtggcaggaagggagtggtgtgactgaattcttcagaagcatattcctgtaccagattctgagcaacaagaaaaccttggtaaatgtacactatttgggtgatggttacactaaaagcccagacttcaccactacacaacatatccatgtaactaaactgtacttttgcccccttcatctataaaaattagatagtttttttttaaagaaaatcctgaaagcctttttctggtcccaggggaactcttgcccaggctgctgtgctgctgctgctaactaagctcccagaacgctgccgctggcagtgtctccaccgggaaattgctgaggcctgctgagcggctgaggtcaagggtctttggccatgtatcagctctgctccgacttgccgcctcctggaaattgacacctgactatgcaaagtagttgaaatagtctttgcagagcaaagaagccgtcagcgtttttccgtgctgagccttcaaactgtcagatccaatggggctaaaagaacaggggtgggtagtaatagtaacattaatagacagcatttaaacagtttttaccaggcgtcaggtaatttatgtgcaacgacaccaattatctcatctaatcgtcccaactctcactgtcagaatctccgttgtacaaatggggaaaccgaggtcctacggcgttaggtaatcaatacgcggtctcatgactagtaaccgggactgggctgtctcattctagagccttccttctacactctctctccgtcctctcacccctgctcccgttcctcccctttggaattctctcccgagtcacgccggactttttgggtctggcggaggcccacggagcacctccttgcacagcaaaggcccagcgccctgggactggcgtgcgcacgcactcggaaacaggaatagacgcgtagacctgtgcgcgcacgtgcaagcaacacgagtcagggggtgcacaggggcccccaccttcctctagactgccccccgccgggttccacacgaaagcccccggccacccccgcggagacccagcagccccagcccgcagcattacccagttgcgggcccgaaaagcctgcacgcatcgagaacccagagcgcccctgccgccgtacaccagcacccggcgcgcctcgcctgcagccgccgccgccgccatcctgctcctgccagcccggctcccgcagctccgaatgcctcgagccggagcgccgcgccccgccccggccggccaaccccgccaagagggaacgcgcggcggccgcgccccgctccgcgcccgctgctgccgcctagcgcgctgccacgctcggggcgccccgccacccggagggactgtaacttcggccaggccctgcccctgggacggggacatcggcgaagcccctcctcccacccgccagcaagtgctgggcctcggggcgtgcagcgagccgggctaagggcgaggagggtggagagcgggtgttttacgagcattaatttgtgaagtgtaagcatgtaaaatatagtatagtacaattttcgaccactgttttggcaattttttatttttaattgtgcatcaaaatagagatttaagtattcccacctgccaaaaaaacagaagaggtcgctccgctcaaggagctgaaagtccaccgccgagacgagacaaaccacactaggtcttatttcttctatctaaccgtaaatttatacccattaatccaaatggcccttttactatatgccacccatcgccagacacagatcctggcattttctcccttgtatattagttatttctgcccatggcctgtatctttaacacagagcctctcatctacagcactactgacattttgggccagataattatttgtgacaggtgctgccctgggtactgtaggatatttacagcatccctggcctgcatatactagaaatcaatagcaaacccctacccctcactcataagaatcaaaaatatctccagatttaacagttgtctcctaggggcaaattcatcactgatagagaaccagagctctaacactctcataaccttcttgatagcagaaccctgtattacatacatctttgtgtcacttcccatccacatataaccttgtacacagcagacacagatgtttgttcagtaaacttgtgccaggtaaagcatgcagaaatatgtcactagagaagaggatgcagccagcagcacattttgttgtcagaagcttcattatcagaaatagaactgctaggaggctggatggagaggagagcaccatctatttagtgctccttatatccaaggcactgcgctaagtgatctgcctgtgctatttcactttactccacacgataatcctatgcagattagaaagctgaggcatgagagtcacagacacttgtctggaagagtgggaatttgaacacaggtcttcaatagctagagttccacttaaccacacctttgttcagcaagacaaaggcttgttgggaatcaagtgtttcccttagagtttttctgaaaacaattgcttaaccctcaaaacaccaaaagttgacacaggtccctcactgacggcagaaatatgactcaatgatatttacgcaagtcctgacttgtcaaagcatgcttaatgttaaaataagaacgtgaactaacattattgatcacttaatgtgccaagcagtcttctgagccttttatatgtattctgttattttttaccagaaaaacatttgctgtttcaaagtcactgggatgaagatgagctgttgtaattcaaagacctgaatttcagccccagcactgacatccagtttttcatgagagaaatggctgaaatcgtgcatctcctgtttaccttaaagggttgctggagcatcagaggtgagcaagcatatggtcaaagcattttgcattttgtacatggtaaagtgccactcatctgtatatatagtaagagacaggatctcactctgttactcagagtggcatgatcatagctcactacagccttgagctcctgggctggagcagtcttccagcctcagcctccagtagctgggactacaaatacacgccatcaggcccaactattttttttttttattttttgtagagataaggtctcactacattgcccaggctcagaaattctcatttttattttcattgtggagtggccactgaagtgagccccagttgcgaggaaggaaactgacatttccattaatgtgtccctctgcttccttgacactctccaagtgagattcctgggacccctattggttaacagtgcaacttcctgaaccccccttcaggcttctgtgaccaactaagaaa

SEQ ID NO: 317263 - DNA, 4001 bp, Homo sapiens
gttgcactgagcaactttaaaatgcccaaatacaattactgcatcagagtgcataagaaagtctctaatccataaatcaaggtcttactttccacattgtgtattactttcaagtcaatgctctgtactcaatgtttaatgcttttttgaaaatatttacattatagattgataagaatcaaggactttaacattctgactgactaacagcaaactcagtttaagctaatgagaaaaaaagcaatgctcacgatctcaaattggtaatggtaggatgaaacaccctccatgagtttaagagaattagtaatgggatagaaatagcagagattgaaggcataatgatctatttctcttacatttctaaccattttgatgtggccacaagaatacacccaaccgtgaaaaaggggaggcccatggtgcaccttaagcactggtgagaatacaacacactactgctcctgggtttacaccagggcattctccagctgtgttcttggaaaagctggatcatctcaagaaatatatctttttttccaacctccacacactgctcccaactcagtgactccacctctcctctgtcattttttttcccccattatacggaaggaggagaatgttatctcttcttttataataggagggcatcagttttctgtgttccttcttcctgcatgacacttaatacagtttttaaaaggactagttcaatatattttttctgcacatgaattatatttgttttatgctcataggtacaagaagctgtctgcaagcaactgggaagtgaggctggagggtgggggaatgaggaaatgagatttttaactttggtttaattatttgaaatatttttatctcacttttagtaagaaaactaggggagaaaaacctggtaatgacgggaaagggagctgaaataagtggcgaggggtgcgacttcctgcctcactgctcgggacctttccgaagcttttccccaacctatgtctctaagccacaaggaggaagcactggaggggaatcagaggcggccaaaagaacttatgtccaggtgaacacaggtggcgaagttctaagaaagagcaccggattcatttgacagagaagtgtaaggaagagacagacgagagagagacagacagacgagagaggagagagagagagagagagagagagagagagagagagagagagagagagagagagagagagatcccctgaaaggcagagggttaagagagaaggagcgaaggagcggggcgcgactcttaccccccagccagttgtcggaaatgttctggagcatggtgacgggaatgcagaagaaggtgatgagcaggtcactgagcgccaaggagcagataaagatgttggtgacggtgcgcatggccttgctgcgggtcaccacgtagaacaccagagcattgccaaagagcgccagggcgaagatgagcacgccggtgagcacgagggccagcttggcgcgtcccggcagctctggggtgtagacgagcggtcgcagccggtacagagcgatgaactgctcccgcgtcaggttgtggtcccgcagcagccgagagaactgctccggggtaatgttaagcgcctgcattgctgtgcgctcccgggacgcggggccaccgcccgctactggctggccatccgcatctgcggggcagcgagggcttcgggggaccagccggaggccgcctcccttcctctactctggagtcagccgcgcgggagggctctaggctgcaccccgggaggttcgggaaaggagagcagctcagggatcaaacccacgataaagaggcgggaagccaaagcactgggagactcgatctcagtgaccaaaaaatgttcgcggttcaaataaagttcttcccttgctcttccctaaggcgaggcgccgccacggtctggggtgctggagcgccacgcgagggtcctggcgcctctggctccccgccttctggccatgcgatgcggacgccggacccgcttggggagcggtggagggtggggctgaactcggtgacgcctccctcacacccagcttcagtggcgccaacgccgcttccccgcaccctcagggcgagggaagacttccctggctcaccaacttgctgccgcccagcgcctttctcagggcatggccccagtcaggtaatgcttgtatgtgaaactgggtattggggggttccacagtttcaagtttctcctcttgcgtaataatgggagccacaactacccaaggcaaatagggcttattttaaattattttctgtattgaaaaataattaagatagttaaaatatagaacttgggaaatggcaaagataatacagaaagatcctgcgtacccacccttcacccagtttctttcattcattacatcttatttaactacggaacaatacaaaaccaggaatttgacacaggtacagtgtttgcatgtttttatctcaagtgtagattcccgtaaccgtcaggatacaaactcttctatcaccacaaaaatctccctggtgctttttatactcacacctagcccctccctccaccatctctaactcctggcaaccactaatatgttctctcttaacttttgtcagaacattacgtaagggaaatcatacaatatgctgccttttgatattgaattttcttcgctcagcctaatgccctttaaatccatccaagttgttgcatgtattaatggctgtttctttttattgctgaggctgtatcaccgtttatttaaccatccacctcttgtagaacattttggttgattaccattttgagctattaaaaataaagctgctataaagaatcatgtacaggtttttgtgtgaacatagttttcctttctataggaaatgccaaaagttttgattattgaatctgtaatgtgtatatttaatttttaaagagattgactacttttcagagtggctgtacaagtctccatctctaccatcaatgcatgagaagttacgtttctccacatccttgccagcatttggttttgctgctttttttttttaagctattctaatagatctgtagtgatatctctttagggccttaatttacatttacctaatggcaagtaatattgaacatctcatgtgcttatttgccgtccttgaatcttctttggtgaaatgtctttccatgtgttttgtccgtttctaattgcatggtttagtttatttgctgttgaaagttctttttatattctacatacaagtcctttgttagtaaacggtttgcaaatatgttcttccagtctgtagcttgttatttatcttcttaacagggactttcacagaacagcttttagttttagtgaagtcatatttatcaatattttcttttatagatagcttttagtgttcagtctaacttcaccaaagcctatttctcaaaaactttctcttaggtatttttctaaaagtgttatagttttacattttatgttttgggctctctattctgttgaattgatctatgtgtctatcctccacattcttgactactgtagctatataataagttttgaaatcaggtagcatgatttctcatacttcattcttatttttcaaaattattgtaactattctaggacctgtgcctattcatatacattttacaatcaacttgtctatgtctacaaaaaaccttgctgggattttgatagaaattgacatatttactaggttgagtttttcaatccatgagaagaatgtctttccataaatttacatctttgatttatttcaaaggcattttacagttttcagcatgtaagtcctgtacatatttttagatttgcacctaagtatttcattttgggcggacatttgtacacggtactgtactgaatttctaatttttggttccatgtgttcattactagtatgcagaaatccaatttatttcgtatgttgatcttgattcctccaatgttgatgaattcactt

SEQ ID NO: 317264 - DNA, 4001 bp, Homo sapiens
acagtttaaagaattatgatagcatataggataaccagcaatttttgtgtctttttacaaatgtattgttatgagttgtcattatcattttaaatgggaaataagatcagttatgaattgaatacagtaaaatttaagagccaaaaccttagacggccttcaaaagaaaatctaaatgatgagaaaactataaaaatctaacaaactttttattgaataaaggtgttagaaacaatgatttatttatagcaattcattcattcgaaaagtttactaagtatacaaaaattaatatactttataaagaaaagttaccccaagttcctttcttcccccaacgtttaaaggtaatcagagcatattgttttcctcagctttaaaaatctgtaacaaaggatccaagaagacaagaaagaaacaaaaaaatacttcaaattttgcatataaaattttacatctttcccaggtgacctcgaaactcaaatgtcagaaccaaaggcagaagcaggtatctgggcagtgccaactgtcagggaggatgcaaagagaagtcgtcaccagagaaaccagggtccgaaatgcaaccagcaacagggaaatgtgaagccttaaacaggaaataaaagcctgggtttctttagactatggttgggataaggaaggggagtacaggggtgataaactttagcaatattcccagaaagtgttggcgcctttgacagaagcatgggaaagaaggcatccgggtagaggctcttcactatttgctggtggagggatcatagacccctctgagatcttatggaccctctccccagagcacgtaccgggcagtatttactccatttcaggagttccacagccttggggtaggagcccctgcctaggagataataagactgacgctgcctgatattctcacgcccgcattcattcattcgaacaggggatcccttttgtcacgcaagcagctctaccctcagcatcctacccgtaacaggagctccataaacacttgttgactgactgcttgtatcgagtgctgagctggaaacagaggtgatgaacaggtatgatattaaaatagcaactagagtgtactgagtggacactgtgctctaaaggttttatgtgtattttcacatttaatatgtattttcacatttctccctttgcggcggcccttttcaatacccatcttacagatgaagcttaaactgattagcaatttgccctccaatgacccgacgactaagtggcagagccccaattctcacccggggaatactgattccagagctacgctcctgggagctcacgatgcagtagaagcatcagaaacggtaaagggggtgggaggggaggagtaagtgtgacccagactacaagtaagaggagctaagatgccttggcaaatccctgccagtcctgagaggcgggaagctgaaaggctggcccgagtcttgcaggagttcgcaatccaggcggggagttaggaagtgactcttttttaagggggagctggacagctctcgtcggccttcaccaagcgcccacttcgtgtccggcctcaggccacacaaccagaagggcccgggcctagaagcccgagggctcggggtaacgaggcgacgccgggcggcggggaggaggccggggaccgccggggttcctgcaggcctgggacggcgggcctgctcgaggactgaccttcccggaggcgccgtcccccagcacgacgattttcagttgccggtcctggctctcctcctcagagtccgacatggtgtcccgggaaccaggcccgcccctcgaggtggggggggaagggaaggatgaaggctccgggggcgggggagaggaggaagggaggtagttgcggcaggacccccgccccggtgtctccgcgccggcaggaggtattcgaggagaatcactcggcaagcgccatcttgcccacctccccgccctctgcgcgcggccccgccccctacgcgcacgtcgggcgcgcgcccccgcctcagagccaacccgcgccgaccggcggccccgcctgacgagccgaaccactcgcggccctggactggtgtgggggacattccggcgggagaggcgaggcgctgcgtttcccttcaggagacagttggctagaagaagaaaagaagtgttcgttcaaattaaggagagaaaacgggagcagagcagctttcaggcgttccatcaaattcccttttctccttccctcttgagaaagtctctgaagggaatggttcagcctgacggggtggagcagtgacgcccgggctacgcgccagggttgcctggcagccaggagttcgaggaccggcggcggggcggggcctgtctccgggcacccgggacgcccgtagcctggcggagagcgccagagagggcccctgaaaaaccggaccagggaagagggtacctcggggcggatgaggggacagctgctaagggccgaggctgctgggaagcctcagtagcggccgtgaatacagtggagctccggcgctgcttatttcggcctaactcttggtttcctcatctgaacaaccccaggctcccatggttcgttcatcagacgctactgatcgccaacctcctggcaccccatctttaccctaaggcagcagttctcataaagtgtggtctagggacctctggaaatcccgatgacctcagaacaattttcataataatacggacaccttgtctgtctttctcacgttccttctctcactagtataccgtttcctggaggatacgctttgtgtacgacgtcatcactggcagctaagggagcttgcgtttgttgtttttaaacatttctcagttttcatttcaatgcagtagtgataggtgtaacccacataaacataagctctttggaggtcacagtaattctttaacattatagagaggccctgagtccaaaaaatttaagaactgctgccctggataatctcagtccaggagcgttaggtaaacggcataaatgaaatttacaatttagtgaggtaaattcaaaaataataatgctgtcctgctatggttgtttcattgttaatcacttaaaatttattgttacctttactactattaggaattatgaagtataattatccccattttgcagatgaagtatcttaagttaacaaaatgcttagcccagaggcagtagtcttggagaccatatgggcattagaacaggaaagcagaacagtgtaaagaaatgcccagacctagaggcatcactggagtttaatctcatgtttactagatatgtgtcctcgagcctcagttagttcacctgtagaacagactactgcctttgtgtaggtttgaaaattaaatgaaataatcggcataaagtagatagcacaatgcctggtgtgtagtaagcactcaatattaaccagtgtaactatcaccctcatcatcatcataattagatgatggtccgtgttggaagtgtcactactttctagccaatttaccttatacaagtttcttatgtagagcctcagtctcttcatctgcagagagggctggcccacaattataggtacccagttaagtattagtacccaattctttccccaatcccgcaccaccattgccaccaccaattttctattcaccagatttattcataagaattagaagaaagaggatatgtacttgttagtgagaagaatctacttccagtgaggacagacttaaccacttcttgtccatgagggcagttaaaatgcaagaaaatttcttttccagtcttccttagatagctatgtgatccaccggactaatgagacagaagacagtgtcctttggaagacatttgtaaaagaaccctccccccaccatttaaaaaaaaggaaaagaaaaaaggagagttacaggggagtcctcctcctcccttcctttgctgtcattattaggtaagaacaggatttttggaactactacactttgttcac

SEQ ID NO: 317265 - DNA, 4001 bp, Homo sapiens
cttctcccaatcttaactcccttggaacttcagaagctccattatttttcaccccaaaggcttctgggccaaacctaattctggtgaaaaatgtttagccttttattctatcttttcttctgcaagtatacaaatctttctaaattccctaatacaaagcaactccaaaaccaccactgagagctcatatgggacatgaaatactaatgtgaaaaattaaaagacagaagcaccaaagaaaggttaatttcttttaacccagcttacttcacctctaccatcattagcagtataacccgttggggtggggggcgatgattagggaactgaaaaataaattgttcttgcctctaagatacgagggtaggaacgtctaaagcaagcctgttctcccaccactccccatccccaccaagagactgagataaagacgatcgctgatttaaagcagtagtataaggcaaggtggttccacctatgttttaaggagtggcatcaacaggtggcatttagtggtggcttgctatgaaggtgtgtctaaggtttataccatcaagaggcctaagccttgtcattgatcctcattccactgttagattccaacccctcagaacttcaaacctgccctggggcctatactaccttctccactattactgtcactcagtgtccccagtcccagggaccaaaaataacgacttaaagggaataaagaattgggcgtgtgtctgaggtggcatcatgagaaatgcttttggcaacctgagtaggaactatcacatatagaatgtttctgcaggaaaatagatttttctaaaatcagtatcataaagaaactactacagcaaaactgtatgcaagagaatacctaagtacttcctcaaaggcaataggctttacttccacaacatctaaggcactgctcgaatgaatgtttaataactattactgattaaatgaattttccattctcgcgcaatttcactgtttttcctccgttcatatttgactgactcccagcacacgacacacacagtaaatgggtcggtagataagccctacactcctgaactcaaagtgtggtccacggactagctgcacctgcatcatcagcgagattattaaatcatagcctgcattttcaaaaacaagatccccaggtaaatcgcatgcacaatgaagtctgagaaacgctgccttagaagtttgcagtattgcaatccttccaatccccaactccaatctcatcagcgtgagaaaaaaatggagcgcacacacaccgtgcacacggccagcgaccagcccacggtggggttgggacacctgtcaccctgtcctccccaacagttccccatccgctcaccttgatgcgctccccatcaatctccaccgctcgttctcggaaatccacccctatcgtggcctcggtgcggtcggggaagcggccagcgcagaagcggtaggtcaggcatgtcttgcccacattggagtcgccgatcacgattatcttgaagatgcgggagcgggcaggaggcaaaaaccctgaggcccctgacactgccccgctggacgaaaagcttgcctcgagcgacgactccatctcctcagccattcccccgacccgccccaaactgaggcggaggaaaggagacacagaaaggctgagagattacgccaccgcaagagcgcgcgcccagccggccagttcggctgcgcaacttcccaggagccaccgcccaccagccccgagcgcgcctgcgcaccttcccgccccgcccttgcccgcacaggtgtggcacccgcccgccccgccgcacggagccgcctgcccgcggccacacgccaggcgtcactcgggctggcgccggtctacctaggcaggcgtgggacctgtcgggggcttcacggcagcgcggaaggccagcctgcagagaggctgggcccagcgccctgactgacccagccccgccacgtccaaggttcccgccctctggaggaagccgcgcaatcactccgggggcggggagagacagacaactgagaggaaggaggtaccacgggcactctctcgcgagagggccgcagagccgcctttgacgggggcgtgtacctggagagcaacggtaaggacggagccgacggctccggcgtcgggtcggttccggcatcgacgtatcgtttggtcgccccagagaggagacaggtttcttcagcttgccgctgaggatgtggcatcggctgcgctcaccgccgccgcctctgtgaactgcgggagttgggacagcggccagggctagatgggtgggacgcgagtcctcgccgaaagcttgccctgtgcggggcgcacttggaggcgagctctgggccgtggcgagttttgcagcctaaggtcttggcaggcgcattgctgtgggctgccggagagcaggctggagttcgagaccgcccaccggagagcaggcgagagttcgaggcctaggtacagcgcatttcgctaggcatccccaagaatatccgcgtgatccttgtggccagagtttgttgagctaatatccccagcccaaacagtagagcacatcacatgtcggccacctgggagcgttgaacctggtagttactaggcgcccctggtggaaataaaactcattatgccctagttatgtcttagtgcctgggtgacgatgatgtagcggttaaagattaactgagcgcacttagaggttgtctttgtctacctaaggaaaatatcaatagattaaacccccaaccttaaagaatctccgtgaatttttctgaggaaacgtgcaatattgtcatacaaaaggccccaaatatgcaaacattgctttttgttaaaagtttgttttgttttgcagtgacatctgtttgagcagatgaatatgccattgggaaagtcaaggactgtcggagaggaggacatggcagaccttaactaaagtgagggggacagtagagcactaaaagttctaggaaaggagatgaactgcttattccatcagatgaaaatatagtcagaacagatgagtagtagaacttaaacatgcccggagttgccaggaatttgcaaaagccttgatataattcctgttgctgtagaaagactttctacagtcactaatatatcaagttatgttcactagaaaaaaagtttacttagtttatagaaatgggctgaaaaatcctaattacttatctgtgaggttattttcatgaaggttaatcatccagaaactattagagagcctcggaatatatttcttctaatctgctctacctatcccattcaaaggagggaatctgaagatttaaggacaaagagcagttgaaaactcagagctgtggttaatgggagaatttcaaggatggtgaaaaaaactaacatcattgcatccctgttttttgtattctggactttttagtttagctcttggtaaactacatcagaaattctttatgctaactctaacacacattttggggtattgctaatttaatctttgaatactgtttttgctgtttcatgattatatgttatgtcctaccagctagattgccaactcttgactactgactggaagtttattgtttattcagcaaataatgaattaagtcagtgaagtgagagatttcgtgtgtaaggattgttaacttgaacatttcaccagttacacacagttcagccctacttaaattttaaaaatcattgttggcacttgacattgttatgaggagttttgtattttcaacttgtattttgagagtgtcctcatgtgactgaagtatgtgctactcttcttaattgaataaccccagaatctccagaattgataattggaggaaattctactgttggaaagaatggatggattatacagccctgttttttgactgttcattttgtccttggagtcactaccacttggcctcaaagtgtgaacatgtaaccctttccttaatactttgctacacagctgagcaga

SEQ ID NO: 317266 - DNA, 4001 bp, Homo sapiens
gttgtaacggaattggattttttccactgaaaaagtacggatttaacatgtaagctaaaatgttaaatggattgtttaaggctcacctggaaacatgggaaaatatattttgcaagccaaacttgaacttacagtccaatatcagatagggttattggacatactgtatatttcctttgaacatacacacacttatctgtgtatgtatgttcaaaggaattttatttcaaagtgtattttatctgtgtatgttcaaagggaacacacataaacgtgtgtatgttcgacggaaatatacagcttgtccaataatctgatataatacctatttaaaaatctactttaagagaaaggcagacacgcataaatgggccacccaatttttacagaaatttgttcagcatatcgagtactcacgttaaaaagaaaaaacaactgaaaataaaattcagagccctagaccttttttgattcataccacctcctccgtcaaccctggcctcttccagatatatggccaaaggtcgggatcaaagcctgaagcatttgctgttccagaaaactctatggacaccattcccaggtttagatacttcttgaagattctgagttgcaccacctaactctgaacgtgttgagcactgtattaacagatgaaaggaccacattcatctcaagctttaaataactcgcacagaaggggtgggaaaagtcccagctgacagatgccaagggagcaaattttaaaaagaggaaattatgacagacaggagtggaagcaaactggggaacttagtacaagtcgctactattaaaagaaactttgagctcttaattacatgacagcattcatcagacgtttctgtgattactgaatgtaacagttaagcaatagatgatgtaaaaaaattaggtcaaatgtatatatcgttttataaaacatatttgctcttaaatctctcatccaaaccaatctcttcagattaactataaatacaaaggaactaaaatcagattatgcagattagacaggaggaagctgggaaagaataactaccatgtaagttcggtaacaacgttacagggcgcagtttcctgctacagaagacggacgaaggaatccagaaaataggctgggcacgggaatattgcacactgtagtcacccagcactaattcaacagctagcggctctatcctgcctcacgttcctcgtggcctctgacaagtcatcctttcaacctatgaggctgtccgctctcccccttggaaaataatttccgtgcaggttgtaagatctccctcacaaactacttgcttccacttccccgcccgggatgaggagtctccacgacggggaaaggtcgcactgacagagaaggaagttacacgaagtggtagtggtcggacccgagcctcgagctcagtacacgcgggggaaaaggaagcgggcggcctctggagaaacggggatggagctgcagatgcgagcccgcgaggcaggctccgtggtgcccgggcaccggcaggaagaatggaggaggggaggcgaggctgcgaggtgccggggagccgggcggcggtccggcccgcggccgaccccaccccagcccgcgctcgggaccctcccagccccggcacccggcgtgcgttccgcgtgcgccgactctccccggaggaacagccaccgtctcacacccggggactggagaaatccggcaactttgcgcgagaaatgcttcccaccctgcagcacgccgagaaagaaaaaaatgtcaggcgatgacggcggaggaaggatgacttacccatgttgctccccgagggtgaggaaccggcggggcgaggcgaaggtctgtggtgcgggcggcgcggctctgtgtcctccctctacctccgtctctcccgcagccagggagggacccgcggggggcggccgccggggaggagcagctggtgctgctgcaggcggcgcggccgcggcggggacgagcggcggggggcggggcggggcggggcggggcgggactggcgggcgcagcctgcggcgggcgcggctccgagcgggcgggcggcggaggcgcgggagccggcctgaagagctccggccccgactcgcagcccacgagcgccccgccctccccaccgagcatgctcagtgccttttccacccctccctctgtggcgagcgaggctaagcgtgcgggtgggcgtgtgtttgcagaccggctgcagccgcggcagaggatcttcatggcggccgcctgagaggcggagggcgggcccggagaaaacagggaatggggatattgagcccgatctgctagcagaggactcaccgctgccttgctttcccaccctgacccaccaacccctcacccggaacccgggcttgccttctttacgggacgaccgggccgcacaggccggaattaaccggagaagaggctgggccgccgcagagccgggaggggtggtgggaagccagagctgacgaagttggaaaggacgtgtaggcgactaggcctgcgcctcttggggacacctgaggacgcccgctgggcagctggctgaggaggggccgccgggagggcgctcgatagcaggcgtgtcattgggacacttaaggctgctctagctgtggccagcttagaaacaaaggtcccggcagcgaggagagcgcccgccccaggatttcctcgaagagtgtgtcgttctccctcccggaggagcgcggccttccgttccccggagggctctggaaaggccctttaaccggggtgccgtcgggctccatcctgctgtgaaagcgggaggaactacgttccccaggcttgaaaataagcgtcctgctgggttggctgcggcactgccaaagctaacccggcggaggtcctttgatcccggggccaccgcccgctcccaccaccacctcggcctcggggagaacctgagcagggctctcccactgagggcgtcctcccgactgggcatgcacgtgaggccggggctggcttcggtcctcttccctggggtaggaggctggaggaaaccgatttctctgcaccctaatcttgccctggctcctcctgagtggggtgaggaatctggtcgctctccaaggctacagcgaccggagtccttcaggggacactgtgcagtcagcagtacaacctgttggagaaagatggctgaatcgaggtgtctttcccctgtcaactttcactcggtcaatccaatgttgagaaagggctttttttgtttgtttgttaattagtcgcctattctcacagtcatcagtttctgcttggtgactagtatttcgagcacacaaatcagaagcgaccctgtaatttgttaagcaaagagcagattttatgtgatttttctacagcaagaaacgataattaaaaaggtttggtaaaacaggaaaatacaatttaactgctgaagtcaaatatatgggacttttctgatgcatgagactatcaggcacctcactcttaggatgttcttcttgtttgcctcttaaaataatcgcactacattagttccctagggctgccgtaacataccacaaattgggtgacttaaaacaacaaattattatctcacaattctggaggccagaagtttgaaatcaaggtgtaggcagggctgtactccctctgagggcactggggagggatctcgtccatgcctctcctagcttctggtagtttcttggcatatggtagcgtaactccaatctgaacatggctgttctcccagtgtgcttgtgtgttcaaatttccctttttaataagaacagcagtcataacggattaggggcgaaccatcctccagtatgacctcatggacgttaattatatctgcaatgaccctatttccaaatcaggtcacattctaagggactaagggttaggacttctacatatgaatagggccagcctggccaacatgacgaaaccccatctctaactaaaaatacaaaaaattagc

SEQ ID NO: 317267 - DNA, 4001 bp, Homo sapiens
taaatagagatggatttcactatgttgcccatagtagcaaacttctggccttaagcaatccttccacctctgcctctcaaagtgctcggattataggcgtgagccaccacacccagccatcaattttctttgttcattaaatttatattattattcatttaaacacccccacacacaaacatacacacactttaagaaaagacatatgaaaaaggtaagtaaaaagcctggggtttaatttttgtttctaaggttcctcaagcatagctgaactaacactcttacttttacctggaaaatcatgactacagaagagtttaatttcaaaggccccgttaagaaaatcaaactacaatggaacttctttacaacaacctttcctactagtgaaattaagtttagggctggtctttttctggatctgatccaaagagagttaattagtgaagtaccacgaggacctcatggtaacgggctgggctctcggtgcagcgtcataacatgcttccaacacagccgctgccttaagcgcagctcgcatggctcattcctgaggtgagacagtgcgcaaagaatcacttagtctaagaacatctcttggatttagttagtaattttgttcctaacaatgaacaaaaccaaattgtactcatgaacctcagcatctaaatattctacattcatggccttctatctataaacttacaaagcctcagcgacttatttccacttttaaagtttaccatcttatcttctttagaatacatgaaagacaattcctatactttaataacctgctagatgctaggatgtagaagtaggcatttcaaaaatacctagactactatacaggctgtctaaatttatgcgtttgcattttcacgattgaatatatttatgtatgtatcaatcatgtgaatttgtgtgatgccagaaaactcccaacatggtgatataaaagtagcaccatgagaactcacattcctgaaacaggaggctctgacttggtgttaggcatagaaaagtctttctcggtagctgcccatgggatttcagcatgacaaacacatagctgactcatgggatcaattataaagaagcaataattttttgtggcattaaaaaaagctgtgtttccataagtgatgaatacatgttaagaaatcagatgagtcccactgatcgctttattaccaaatcaataaccaaagctctccctcctacactcaaacctacatgcgaattcctcactatagattcccgttctcaataacctttctgatgatttctcattaaattcaactacaaaaacatttttttgaaaactattcaagtactaagtcgaagctgaactgtcaagctttagtttctaaatataaaaattagctgcccaatatttctcagtattagtgattttgctttaaataaattgctggtcttgcttcaaatttttaaaaattacaacattggaagaacaagccagctttaatgcaccctcccctcctctccaagcagactactataccttctacaaaaactgttttccctgaagagaaagagcaacaattcccattttaaagcagttctctatgacgtgctatcaaagcacaagcagcatttgcgatacttactgagtgtttctcctgctggcccataactccatggttagctgggattgctagtggtttcataatgaagaaacatatgctgaactgaatttacacatcatgtaccaatctctcacgatggcaagtcaccctctacagcattaaattaaaagaaaaaggaaaaaaaaaaagggaggagggaaaaccaagctgcagcttaaagtgtcactactggtaagcttaaaaacccttcacacttgtagaccagaaaaggaatccgaacaacagtgttcgtctccatttttataacattgaaactctaaccatcctaggctatgacaagactgagaaaacctcacacagctctcagtcttccaagagaacaagatcatttctgagattgaagaacaagaggcaaaagaaaaggagaggaaaaaaaaaaaaaaaagaaaaaagctaaaatggctgactgcacacagactcccctcaaaaaggcttaacacagaattatattagtcagggtggtataagaaccaggctctagcattcagccaagcattgttaatacccttgtttcatctgcaatcacacatacagaaccctccaaccaagagaaaaaaagaaaatgaaagaaagaaaaaaatcagggcagagcgtgtgaatcgggaactcctccctagctgctaatgatgctgacagagtggtgaccagtgatctctgtcccactccactaaccaagtttgcacaattaatcttggcagcatgacactgatggacatttaatttaatgatgtctgtccctcacactcaacacaagcatgcctgctagcaagagagccactaacagaaacacagcacatgcacacacacaatctcaaaaatcatgagtctgaatgcaatacaccaatataattacattattgtgcttactttggaggaccatggctgcaggcagttggcatagcaacgcacaaggaaagccatttcctggatagaaagcttccttttctaaataaaaaattcctcttaggaaacaaacggcattgctgcttcctgcagaaagcaagacactgtagtctgtctcttaacctgcaaggctcacactcaatgcagttctagtgatgtaagtggatttctctctcaccctccctctccctatacacactgaaatattcagctcaaatggtacacacattccttaagactcgccccctcctctacttaaccatttcactcattaaggtagcaatggacaattcagataaagtaacaagctcttgcctgtattctatcagcagctgtaggttaagcaagtctcagagggatggaatccattgattgctgactccaaataatatcactgaagacagggtgggaaaacggagcaaggacttacttgaacagctttgaactaaaatatgatttttttcaccaaggtgaagataaaggaatcaatgtgacctctatcccatcctcaaatattgctgtgctatagtaaacaagtatctatcaaaaatttataaaatgcatacttgacaagctttgtatacatttagatgatgtgattttcacaaacacccatacacacacatacacacacacagatgcacatattgccttgcaaataatataaaaaattaacctacccaggttttttttttaaaaaaccaaaccaaacttcagaggtagagagttgaaataaaatgcggatacattattctattataaactcttaatttcatgtacatatgtaggtatttgaaagactgcattatacttgacaaagaataaggacattttaattctgaaacactgtcagcttttcacaatcaggtttatctatcaatggcacatgtaatagaaaatagacacagaaaatgtagcatttttaataattgactttggaactgtcagtgcttgctgacttgtgtttcttgactactgccaaagactgtacccaccctattctctttccttctttctcctcatatctaaaggcaaccattcccaccacatcactcttttggatccttctccccatccccccaaccccttttcttacattacccattatccttcttttgccacatatgcttaacctctgccccacaaccggagtcctccccaccagcttttaaatgtgcaggtctctcctatctcaaaaacaaaacaaaaacagaatcattctccagaccaggtattttcctcttcctccacttcccaaccaaatctctcaacaatctgttttggttttcaccattcctcatcccatggaatacttacatgatgaaccatagtgatcctgttatgccatttctacatctaagagtttccttaacatctctgtccatgatcaatccatcacaacatctgtttattacattctctaatttt

SEQ ID NO: 317268 - DNA, 4001 bp, Homo sapiens
aatgttgcccacctccaagaaaacaaaggattgacccgacatgcagtggaagaatgccaacaagaaacttgttaatcagtggctgatctcatcttcaccagaaaatctgcttgagaggcataatataacgctgtttgtaaaccctgatatctgtcaaaagtgccctaaggtcctcctctctagctccaccactgcccctcacttaaaaaaataaaattacctttaatgatagggtttaacaagctgccttctttttttctgttatgaaaacctcaacagcaaataatttttatttctttttattaaagaaagcaactctatatttgttctaaatctcatgggaccagttattttcacccaaacggccaaccaggtatatacgctgcttaactgtaaacctccttgtttcttagcagaggcttatcgccatggtccaactatgttttaaattaaggcatagccatcacatgccaagctctagctactgttttcacgaggaaagggcaattattcaccccatctgagtgtgactgtgccagacatcattcaagagtgcaccaccctgatccctagactcttcccctttatgcacccagttcagagaccctcccttcggccattagaccatctgagctaaatatagatctacacacaccagcagttcctgaccgtcgtcacatggtgctgacgaaggactccttggagacgcgttcggcccaaacacatacacaaatttgtgtgcatattcatctatatacaccatatccaccgaattcatcagggaggatggacacatctacattccgaagagaaaatcgccgtctagacaatctccttgtgttatctgccacacttgtgccaccctcggcagtgtcagaggattaagctacgttgcttttgcctgaactgcgccgatttggttggggcaagacagcaagcagtattgaaatggtacgtccatacacacacacaaaggcgcgcgcaccccagcccccgtctcgcccttttccctggtgcagcacttaagttgttttcacagctcccttagaaagaacctcccttaagctgactgcccgcgaggctcctagatacctctagctcatctgagattccccaggcaggtgacccgaggcgactcaactgagctctggcaaaagcaaggcgactcagtgtctcccaagtttgccaggtgaacaccgaaggatgacagcacatcaccttgtcggtggcgagtatgtgacttctgttcccttgtcccttcctacgagtcagactttagattacatggcactgacaacaaaaataaacagctccccctacacacacacgcacacaaaactggtcaagaagtggaagaatcaacctaggtatgcacacgaaggaaagaagggatgaaaaaaatgatggacgcgattacaactcaagacaaatcctcaaaaaccacctatctcgagacagaaggcctggctgcaggatcagggagaaagagggaaggcacaacccaacccaacccaagcctggccctgcccgggtcccagcggctcggcctcgcacctgttggggccgcggcagtcccaggtacccgcagcggccgggcaggggccctcccccggtcccgggctgtaactcggctcttggcgcccgcgttcgcgctcactcgcctcgggatctcccgccgcctcggagcgcacccggcagccggtgaagtctctgagccccgctcgctccccgcgcggcccagggatctccagggagagcgcagcgcgcagtagggtccggagttcccgctccgggctgtggtcccccagccgggagaacaacccagccagggaacaacctacctgcaggtgaactccgagtcctcggcctcccggctgcgtgccgcgcgcccacaaatgcgaccaaaggacagggagctaaagcgcgcgggaagaagaaaaacaaaatctgtctaaccagtcgggttccttgtttatactgaaactacggcagccgccgccgcgcacgccccccttggctcaggcgcctgcctcccgctgccagccccgccccgccccggcaggcgcgggccaatcaccgcgcagctcaccgcccacgccgccgccacccggcccggcaggcaagtcccagtgggccccagactcccgcagcgcgtcagcctgggtgccctcccacgcggcagaggcccgcggagcccagcgcagcggtgtttaacagcgttggtcaggctggctccgactgtgcgcgtttcctcttgagtgcacctgccccgggctgttgtgcagtcgtgagtgtgtgtgtgttcattcacgtgtatactatctgtaaataccggcccgactcgttacacagtatttattaacataattgtgagctaaaggttactgtccatgtaactttcagaagagagcggagaggaaccacagaacatttgcttagcaaataacacatagatcctggtgctaagcactgtgcaaaacgctgggggcacacttggcaaagtaggctggtctctgccattgtgaaacttacatagtctagtggaggacagacattcagcaaataatcacccaaacaaaatgtagaattacagctgctagaagttgcacggagaggaacctgttccgtgaaacatgattccggaggcaaagcagggaggctagtcctcagtgagggctgtgttgtcatggtaaccacgtactcactccatcatgggatatttgataactatttcagaaaaaaggtaaaaacctccgtacttcactttgtacacataaaaggaggccagagggaaataatgatggaaacaagggaagaaagagacctatgaaaagaaaaaatttacagaattaggagactcttaccaactgtatttccttgagtaagtgatacagcttttctgagcttcagttttctcatatataaaacaacactattcatacctgtcctatactgttataattaagattactgagggggaggaatccttttccctcctgctccatgggtccctccccctctccttcctggggtggagtcattttgacgctcactttgtctattcttagcggattcctctttcattttcttcatttatgcctccttttacttttcttcctctttatgatactccttccctcctttgtgtaaataggactcctctgattcagtaattcactctaacctacttgagcctttgacttaaccatagcttctctgcagtttaaatgagaagccataaggccaagggaacttggtgggccagccatgcagagtgaaacacagaggctgggtggccctgccctgctgttgtggttgtactggttggttgatttttcaagctcagtttttgcatcccgattctgtaacaaacgagccatatgacattgggccagtcacttacacccttgacattactgatcctgtagccagaaattaagagttgcaggggattgctggcaagatggctgaataggaacagctccagtctgcagctcgtagcgagattcacacagaaagcatgtgacttctgcatttccaactgaggtacccagttcatctcactgggactggttggacagtgggtgcagcccacggggagtgagctgaagcacggtggggcatcgcctcacccgagaagtgcaaggggttggggaattttctcctctacccaagggaaaccatgagggactgagcctgaggaactccagcacagatactgtgcttgtgccagttttcgcaacccacaaaccaggagattccttccagtgcctaccccaccagggccctgggtttcaagcacaaaactgggtggccatttgggcagacaccgaactagctacaggagttctttttttttccataccccagtggcgcctggaacaccagcgagacagaaccgttcactctcctagaaagggttgctgaagccagggagccaagtggtctggctcagccggtcccaccccaatggagcccagcaaactaagatccactggctt

SEQ ID NO: 317269 - DNA, 4001 bp, Homo sapiens
ttttttaaaaaacaacagcaattttaaccctatgttagatttattaaaaccagggcaaagtttgcaagtttttgaaaacttatttatctagttttaaacaaagtttccatttttagagtactcccttgatgcaaattatcttgctcagcctatgtgaggtttctgttttcttgagtacttgattcattctttgactgtaactttgtattttggccgttagatataatggcttgctagacaaatactgttagtaaacacacagccaatgttatcagttggaataaaaatgtgatataattataatcaactctacatcaaatcagaaggctgccatgtcttatcttgggatagcttatacagctcatttcaaataatcccctataggtactcatatggtctacagagttaagcaatttgctaacagagcataggcagaaagctcttaagcctccccagtggctattcttaatcataaggattgaaaaatgtgtcctctcatttattcgggaattctcctcctaaaattctaccatccagttgtttgtctttgttaagaaggaggaactttaggtttacaactgctctcctttggcctttgctttaaaaggtcacctctgaaaggcagccagcagagaaggagaggggtgggggaaggagctagggactccttttttttttttttacgacttttgcaggagtgttttgaagggagaggttcttgactacaaagggtgcttccaactggggtcactatagttaaaacataccaaggggaatactttcaggcacttgataaaatgatgaatgggcttggaatggaatgaggccagatggtagttatgggaggggggcgccatggagggctggggactggggaaagttttaagtggcgggatcctcaggctcggactgtcactgaaagaacctccctgggaagcgctggaaaatgggaaccgcagtcctcctgcaatgggacagaatttttctcaaatgcattgtctcacctgcatttctttcatagtcaccgatgaatcgtttggtgaggaaccggaccaccagtgctgcacgtcagaaaaaagaacgtcaaagtgttaaccttggaagttagattgttctccaccccaccccctgcctggaaaacagttctcccaaagaaagccatagatggccaccaagtgaaattcctaccctgtagctccttgacccttctttccagacaaaaaggagggggctagaaggcatcgtgaattatggctctgtgcagctggaaggctcactgggcccaccccctcctctgagcccggctgagccacacctaagccttccagtagacccatgtcttcctaaccttcaagacctcccaggggggctagcttcactaactcccctttctgtgccaggcattgccagaggctcaaacaccccaaagttctgatggcggcggtgccggtggtccccagaaagctgcctggccattcttgatccttgtttcccccgtctgtggaagcaggcgggtggcgtagacaacggctaagcccactcccaaggggcagcggctccctgcgcggggacggagagcggtcgggctgcagctcccaccgctccccacgccttgttcagcctcaactcccgtcaggggtcgtccaagaccagacccagggctaagcgcgacgactcaccggtcttgcccacgccgctggcgcccaccacggcgatcttgaccaggcggcggccggcggcgcccacacagcagtcggaggccgcggcgttgcccggcgcggggtactcggcgatggtgcacatgttctgaatgaggcgcatcgcctcggctgcggcgcaccgcgcgggaagggactgagggactggagaatgctagcgctgcgcgggagcgggcgggaggacccgactgcggggctccgcggtaagaaataacaacaataaataagtgcaggtacgggcggggtggggccgagcgccgaggttccgcagggctcaggctccagacccagactgcactcgcgcggcgcgccggctgttttctccgcggccggccccgccccctctccccacagccaatcccggggcgccctacacgaggccccgcccccggcgccgctccgcgcgcgcgacgcccccggaggcgcctggagtcagtgcggagccccgtgaggcgcggggagaagaggcagcgggcggaggggagcagcgggtggtccgaggcggcgcagcccagggtgggcgcctggtaggtcctgccgcgcgagcatggggcagctgctgtggctgcggggccaggaagagagcgcagcctccacagagccattccggaccgctgcctccgccggctccacagcccacgcgcgcactcgctgcagccccaacctagggcgtctgctctgggcgggccgggagcggtgtttgctccccggcttagtgccgcccgccctgatttggagcgattgcactggcttgggtacatcccagctcatagattcagctacagttggcaatcatccgcaaagactccagcctaagacctttagacccccgtaaaatgtgacatttgaagcaaaaatatcatccacgttttatcctagacccacgttctctggctcttgtcgacggcgcaagctaacgcaaacacacatggtcggacgcatgcacagcacgcctagaagcggatcaagaagtaattatagaacaagctttccagcgcctcactcagtcacacctccttcaagagctgtgaaatggaaagaaaacagttactccagctgcgacgtctgaaggggccccgcacttcgtccctggtcataagacaccgcaagagtttagttaagtggcttgataccaaggaagaggtgggccctgcactcctaaaatcccaagctccggccccttacagtctcatctgagaaacacatcttcaacggcaggccaaattcctcctgcgagcaacattctgtagctgcagctgatggcaagatgtcaccagcggctgatggcaaaatgtcaccagagtcgcgggttaaccaccccatccgctatccaaggccctctccccgctaccctttcaaccttgtcccagaggcttttatgttggggtatggcaacaaactctgtggctttgtgtacccacccacattaaaggctaaaatgtgaaataaaccagtgcccttatccgcacatgtcagtcatctaatttgaccccctcttccagccagaacttaattgaccaggtatttgacagaattttatgatcctcagccagttcagactctgagatgaacctcttgtctacagaggtttaggtgtttgcaggaatgcaaggagaaatagaaaggtaatctcaaggtagcaagttttctaggatgggccacgtaattagaaagacacacaaccttacaataaacataataaaaggctgacttctagggagatcactagaacgaaacagccatttgagtcagaaagaaaaagcatttccaatatgcaccatgtctttctgcatggtttaaatcagacttgaatgtcacttctataaaatcaaactttgcaagactgtaattacaggtaaccatgtacttttaaaatctttcccctccaaaaagcctgctattctatcatgcttacatggtaaaataatgatgtaggctaaagtactagtttaacatacacacacacacacacacacacacacacacacagagacatgacaaaagctgtcaaggggaattttgctttgaatcatttagtttcttgggcttgattttcattaccataagcccatacaaaacccgtgatttttctgtctgcaacgcaaaggcttgatttggtgttcttattttagatctaaatgatctggctatgctttaaagaacacagaaaagagagaagcaagagaaagatgtaaaaaagaaaagagagctattcaaattccaaatacctagcatatagcccatctccactccacctacctctccttctgggacattcataga

SEQ ID NO: 317270 - DNA, 4001 bp, Homo sapiens
taattcaatttgattcctttataagtttttagctaaactgtactaaacacaatcagaccccagagggaaataacatagtaaacttcagttaggttgggtttagaattctatccacaattctccagtcaatatctaattgtaagcacactgaagaatttcaactctgcaatttgaaaaaagaatccattaaaacaccaatgatattaagttagagtatactgcaaactctttgactgctttatttaataaaataacaagataaaaatgaagtcaatggaaattactagtcatagacactaagttggtcccctcaagaaaattagcaacattaataactaacaacattgacaaaagtgccctttaagtgaaacttcataaaataaagccactttcctgtaatttaagcttaagaggtagagactgacaaaatacaagtattattccttcatgtctcttgtccatcaacacaaattaaaaacagcacttcaatacaaacaattcaatatgtgctgaaatataaagacatggattatatggtctaaattgatgaaagttattcaaaagcagtctcctttataaaacccaaatggcatgaattccacaatatgagattgtgtgtaactctcttactctaaaattctattttctttttaggaataacagattaatgtaaatgtgaatttttcaaaagaaaactgattgagtagcaaatatgtctgaatttgccaccacatactctatctgaaaaatggaaagaagccaggtcatttcgttgctacccagagagatgatcctagcacacctgtcacctgcttgcctgtcctggatccagtctccgggaaccagttcaattccagcatcctaatacacactgtctggtctccctagttcagcttgccctccctgataacggcccctttggcagagcagcttattcttaatgctaacagtaggtatcacttacagaacacttgctgactgttcagttcccatcaaagaaagccttatgtggcagatcctttgatgatgcttgttttacagacaaacgtttggggcttaggttaagaaacttgagagggggcaaactaataagtggcaaagccgagctttgaacctaccactcttctgcttcagaattcatatccttaactcatgcactcccatttaattatttatgtttattatttcattgtttggtgagcgcttatattgaaaattcattttttttttggtggggggcatgctttctgtcactttgcagaaacaaataaaagttgagctgaaccctcaattaagttctttccagtgcgatgattcaacacaatattctaaccataaggatactcagaggaaggagtatgccatccagaagtctagtatctttgtaaggcacgatttttgccaggcacaattacaggtgaagggctcattgaactaaagggaggaggggtcctatggtcacatttacctccaagcccttctctgcaccctttccctcccttctttcccctctctccctcccaccctacaagcttaccttggttaggaaagcatattctgagaaaatcaaaaggaaaaggcatgtgtgcgattcaggctgctatgacacacacacacttaactttgttgcctatggattctgctttctaataacttgccctcaacatgaccccagggagtggattagaaagtttttttccccatccccattttttacctgttattcacactgtgagcaggaggacccttttcaccatcgttgttcggctgaacttgcttcgcggtttgttctcggctgggtcaggaactctggtagagggaaaccagtgccctgtctctgccgggctgggactccgcgagtcactcacctgtaggggaggtccgaggcccgcgcgggcgcaggggcggcgcctgtctcctcccagagcatggctcagctgggcgcttgcagtgcccccgacgcgatcagcgatcctggagccccaggagctgttaattatttctccttttcgccacagcagggaagtgtcaagaaacctgagccactccctgtgcctcagtgcatgttgggagtgtttactttcttaggaacagctgataggtacactcctttgctctctgccacacttcttgagaaatgaatggacattctagttaacgctttaaccacgggatttgactgatgttaatctctattctctagtccacccagactgtaggtaattggcctgtgagaaatgacaccaaccaagactgaacgccattattcacgtctttctttttaagatttttcttttccaatttgagatttgttaactttcttttccttgttattttgctaacacatttccctgctagcactttttttcacccagagcagcgtttcgcgcttcagggtgcaccaggaccacctatgtattctgctaaacccaggtaccatcaactgtgagactctgatttagtaggccatgcatacacttcgggtatttatattttttataagctccacagaagaaactggtagacatcaaagtttgaaaatgaacataatgaaacaaaacagaggagataaataataatttagtcattatctactgaattggatttgggggctttgttttatccaatatctccaatttcaaaaggacaccaaaaaggcttagaaactgttaaatgacagatgctgtggaaatatgaagtacatttacacacacacacacacacacacacacacagatttttaaggatcattgttattttactggtttcctatgtaaagcaactattcataatttttaaacataataggttattttacaagtgtaaacctgagagccctcaaaagaaattcaatctgattcctgcaaaaagttcagcaggcagagttaatttctagtatctttcgtgttcaaacgccagacaaacagaatgactctagatgttcaggttgcatgtttgtcatagcactttaagtaagatcctatatgttcaaaaggtgaggcaggccaggtgcagtgactcacgcctgtaatctcagcactttgggagaccaaggctggtggatcacttgagcccaggagttcaagaccagcctggacaacatggcaaaaccctgtctctgcaaaaaaaaaaaaaaaaattagcccggcattgtggggcatgcctatagtcccagctactcgggaggctgaggtgggaggatcacttgagcctgggaagtcgaggctgcagagagccaagattgcaccactgcactccagcctgattcaaaaaaaaaaaagaaaaaatattaggcagtttatctatttaatctgtggtgtgcggagaccaggaactatcagatttatcattatttgagcaaatggttttattggatcacaatcaaagattttacaatcttatgtaaggacagatgtgacttagtattacttgcagatattaattcgatcatcatgttggctccataactctctggtatgtggctgctggtatggactgacctttgaatgatgactagcaggacctagagtagttacagctctcggttccaggatatcttgctcaaatccatgctccacctccattgtctgtgcttgaagtgggtcatttgcttattgtcagcatcagggcaacattcttttgcatcttttacctgcaagcattggatttgggggctttgttttttgccaatatctccaatttcaaaaggactccaaaaaggcttagaaactgttaaatggcagatgctgtggaaacttttactctgatgactgctttccaactggttttctaaagaaaagtaaagttagaggcttagtgacttcgttttttagtgttttatctgtttgtaaatatgtaatttttatttgataatataaaaagtatataattgcacatatgcaatgtggaaaatctgaaaaacacagaaatgtagaggacaaaaagcacctataattccatctctcaagtataatcatcataaacaatttgttgaatgtctt

SEQ ID NO: 317271 - DNA, 4001 bp, Homo sapiens
agagggaaataacatagtaaacttcagttaggttgggtttagaattctatccacaattctccagtcaatatctaattgtaagcacactgaagaatttcaactctgcaatttgaaaaaagaatccattaaaacaccaatgatattaagttagagtatactgcaaactctttgactgctttatttaataaaataacaagataaaaatgaagtcaatggaaattactagtcatagacactaagttggtcccctcaagaaaattagcaacattaataactaacaacattgacaaaagtgccctttaagtgaaacttcataaaataaagccactttcctgtaatttaagcttaagaggtagagactgacaaaatacaagtattattccttcatgtctcttgtccatcaacacaaattaaaaacagcacttcaatacaaacaattcaatatgtgctgaaatataaagacatggattatatggtctaaattgatgaaagttattcaaaagcagtctcctttataaaacccaaatggcatgaattccacaatatgagattgtgtgtaactctcttactctaaaattctattttctttttaggaataacagattaatgtaaatgtgaatttttcaaaagaaaactgattgagtagcaaatatgtctgaatttgccaccacatactctatctgaaaaatggaaagaagccaggtcatttcgttgctacccagagagatgatcctagcacacctgtcacctgcttgcctgtcctggatccagtctccgggaaccagttcaattccagcatcctaatacacactgtctggtctccctagttcagcttgccctccctgataacggcccctttggcagagcagcttattcttaatgctaacagtaggtatcacttacagaacacttgctgactgttcagttcccatcaaagaaagccttatgtggcagatcctttgatgatgcttgttttacagacaaacgtttggggcttaggttaagaaacttgagagggggcaaactaataagtggcaaagccgagctttgaacctaccactcttctgcttcagaattcatatccttaactcatgcactcccatttaattatttatgtttattatttcattgtttggtgagcgcttatattgaaaattcattttttttttggtggggggcatgctttctgtcactttgcagaaacaaataaaagttgagctgaaccctcaattaagttctttccagtgcgatgattcaacacaatattctaaccataaggatactcagaggaaggagtatgccatccagaagtctagtatctttgtaaggcacgatttttgccaggcacaattacaggtgaagggctcattgaactaaagggaggaggggtcctatggtcacatttacctccaagcccttctctgcaccctttccctcccttctttcccctctctccctcccaccctacaagcttaccttggttaggaaagcatattctgagaaaatcaaaaggaaaaggcatgtgtgcgattcaggctgctatgacacacacacacttaactttgttgcctatggattctgctttctaataacttgccctcaacatgaccccagggagtggattagaaagtttttttccccatccccattttttacctgttattcacactgtgagcaggaggacccttttcaccatcgttgttcggctgaacttgcttcgcggtttgttctcggctgggtcaggaactctggtagagggaaaccagtgccctgtctctgccgggctgggactccgcgagtcactcacctgtaggggaggtccgaggcccgcgcgggcgcaggggcggcgcctgtctcctcccagagcatggctcagctgggcgcttgcagtgcccccgacgcgatcagcgatcctggagccccaggagctgttaattatttctccttttcgccacagcagggaagtgtcaagaaacctgagccactccctgtgcctcagtgcatgttgggagtgtttactttcttaggaacagctgataggtacactcctttgctctctgccacacttcttgagaaatgaatggacattctagttaacgctttaaccacgggatttgactgatgttaatctctattctctagtccacccagactgtaggtaattggcctgtgagaaatgacaccaaccaagactgaacgccattattcacgtctttctttttaagatttttcttttccaatttgagatttgttaactttcttttccttgttattttgctaacacatttccctgctagcactttttttcacccagagcagcgtttcgcgcttcagggtgcaccaggaccacctatgtattctgctaaacccaggtaccatcaactgtgagactctgatttagtaggccatgcatacacttcgggtatttatattttttataagctccacagaagaaactggtagacatcaaagtttgaaaatgaacataatgaaacaaaacagaggagataaataataatttagtcattatctactgaattggatttgggggctttgttttatccaatatctccaatttcaaaaggacaccaaaaaggcttagaaactgttaaatgacagatgctgtggaaatatgaagtacatttacacacacacacacacacacacacacacagatttttaaggatcattgttattttactggtttcctatgtaaagcaactattcataatttttaaacataataggttattttacaagtgtaaacctgagagccctcaaaagaaattcaatctgattcctgcaaaaagttcagcaggcagagttaatttctagtatctttcgtgttcaaacgccagacaaacagaatgactctagatgttcaggttgcatgtttgtcatagcactttaagtaagatcctatatgttcaaaaggtgaggcaggccaggtgcagtgactcacgcctgtaatctcagcactttgggagaccaaggctggtggatcacttgagcccaggagttcaagaccagcctggacaacatggcaaaaccctgtctctgcaaaaaaaaaaaaaaaaattagcccggcattgtggggcatgcctatagtcccagctactcgggaggctgaggtgggaggatcacttgagcctgggaagtcgaggctgcagagagccaagattgcaccactgcactccagcctgattcaaaaaaaaaaaagaaaaaatattaggcagtttatctatttaatctgtggtgtgcggagaccaggaactatcagatttatcattatttgagcaaatggttttattggatcacaatcaaagattttacaatcttatgtaaggacagatgtgacttagtattacttgcagatattaattcgatcatcatgttggctccataactctctggtatgtggctgctggtatggactgacctttgaatgatgactagcaggacctagagtagttacagctctcggttccaggatatcttgctcaaatccatgctccacctccattgtctgtgcttgaagtgggtcatttgcttattgtcagcatcagggcaacattcttttgcatcttttacctgcaagcattggatttgggggctttgttttttgccaatatctccaatttcaaaaggactccaaaaaggcttagaaactgttaaatggcagatgctgtggaaacttttactctgatgactgctttccaactggttttctaaagaaaagtaaagttagaggcttagtgacttcgttttttagtgttttatctgtttgtaaatatgtaatttttatttgataatataaaaagtatataattgcacatatgcaatgtggaaaatctgaaaaacacagaaatgtagaggacaaaaagcacctataattccatctctcaagtataatcatcataaacaatttgttgaatgtctttattgacttattttccctgtggctgtttatcaaaatgctattacatttggtttgttggttt

SEQ ID NO: 317272 - DNA, 4001 bp, Homo sapiens
atgtattatatttggcaataatattcaagtacattactccaacctcttaagtgaaaatcagcaatcaaagcagtgccttaagcagaaagcattaatatttagtgattgcaggcagcactgtcatctttatgtctataaagatgcaaacaaattttattaacaatgcaaacaaatgcagacagatgcaaacaaagtttaaagtagaatgttttaaacgtgtgccctgaaaacaagtctattattagacccccataaggagattcaattctgaaaagatccaaatggaagtctgtcaaactgtatatacatcgtggtgattcttgaaacgaaaatatcttcccattatttaaataagcaaaattctacagacccttgaacatgtcctttatatgttattctccttatacacgcaacatatcctgcttcctggttataacgccattctcaaacacaaaatcaggccaatttttaagagaagccaagacttaaaaagctcggcggcgatggctcacgcctgtaatcccagcacttggggaggccgaagcgggtggatcatgaggtccagagatcgagaccatcctggccaacatggtgaaaccctgtctctactaatacaaaaatcagctgtgcgtggtggcgcgcgcctgtagtcccagctactcccgagagtttgaggcaggagaatcgcttgaacccggtaggcggaagttgcagtcagccgagatcctgccactgctctcccgcctgggagacagagcgagactccgtctcaaaacaaaacaaaaaacaaaacaaaaaaactccttatgatatttcctctttgatatttgcctatattaggattaccacataacataaaggttacggggaatttatcaagaatgtaaagacagttaaagcttaaagaacttaaatattacctaagctaaatttacataggagaaaactggtgcccaaataaatcaagcagcttcgcaatatctcagaatatcaacgccaggattaaatgccgctggttctgtggtttttccagcagctccaaagaaacatttttaaattaggggtttaaaaactaccagatgttaggaaacaaaggcggtgccacgacgtgtgctgccgtccgtgtgtcgggggagaggcgagctatcttccctgtgcacccgcggcctcccactgcccacagcccagcacacacgaggtactcggggaagaaacagggagacaaaggcaaagtaaagttcgaggctcagtcccggctagaactccacgcaaacgactaggagcccgctaaagctcacccagcctgaattcaattctgaaaccagactgctgaatctcacccagccgtcgggacgccccagacggcgtccaaagcctccaggggacgcgcggaccctacaacggccaggcagcggcccgggcctgcagcggtcgttggtcgtcggcgtaagcgtgtcaggaaaataacacgaaatgcagcacaggtgggaagcggccggaaggcagcgggggagagcggaaataaggcggagagcgcagggcgccgcggggcggaagaggccgccagacgccccaaagagactggccgctgggccctcaccatgcagcgcctgggtgacggcgagggcgccttctggccggatgctgccggggcaggaagcagcgtctcggacacttgccctcccactgctcgacggggctggggaaggacgagggtgaaccccgcagccaccgccgccagcccccactgtgtattcggcgtgagagtgagccgggcactatccagccgttagcagtggtctggtagtgaccccgtttcccctttcccctcctcaccccttcgggtcttcaaatgttggtcctaaatcccggggcccaacgaccaaaaaccgccgccaccgtttaggggaccagtcggtcagagcgagggggggtcgtcgcagggggagggtagcccaccgggaccgctcgcgctggtcctcgtgtctccactcgtttcccagcgcgcagcgcgcgcggtggcctaagcagccccacgaggagtggtgcctcatccaatcagggattagcttcggggcggggcgaggaggagagagtggggctaaagtttaaatgaggctcttgggctagtcaaagtgcttggagtgacaggcatttcgagcaattggggtgaagagagcgatttttagggtgtgggtgggcacggaataataaatgaaggtcctaggtgcattgtttaggtgtttgaagacgagggctgcagtgtgaaattccgcacttaagggaaaacatagatgcatcgtaatggttctttttcttgtttgatgtagttttcttgtaaactgctagtttggcgcaaaacaaccacatatatccggtggacctttgaaattaagggctagggggaggtgggttataaagctaaaagatggatttgcaaataggactagaagtataaagtataagtggtttaaatgacaatgactaagaaaatgggttagatgaggagaactagcgataggcttgacgctaccactaatcagcttgcagggacatttggcagaggcgaactgccgaactgggttctatgctcttgtaaaaccaactttcacagatagggttgtttggcattcggtatgcataacttcagttttgcttcctttgaagacagctcgaaattaaatgcagacaaggaaagaaaaaaccacctttaggaaccaactatttatgtatagataatattagattcatggaatattagacaataaagaacctagctcatgttgattctctaattaacaaggaacttcatgcccagaatattcaccgagtaacacagatctccttattcccaacctcaaggtgatttcttccacattaactcctaatgtattttctccatatattcaaggaactaatgaatgtctaccaatttaaattttgttaaagtatatttttaatttttaaatatactacaacagtgaggaattagcagggactttggagccagacagaccctgtttaaagtggggattgtgagaataaaataatatatgatattaccaaatattgagccagatgccagaaacaatcctaaggacttttcatattttcatttaattctcacagtaactttggtaaagttactagccctactttgcagacggggaaacagatgcagaaaccttaagtagtttgggcaaagtcatatagcaagtaagtggctccagtttgaaacctacagacataattgctatactatactgtctcaaaatacgtccagaaacaagtagaaaacttggcatagtacttgatgcacactggaagctcaacaaatattttttgtaagccgtctgccctttagtcaatgaatacaagtgtcattttatataagatgtatgcattcaaaataaagcaactagaaaacctagactgatagatctagttggctttgtttgacatgtcaccaattctgtacctcgggaactgtgattgttatattgattactattttttgctgctcttttatttctccagaaaaagattctcctcattcttcattttcatgtcggtaccttctcaattcctagtaattaattctaaatacatgtgtttaaggttaaattatctgaaatgaggttaggcatattagtggcaatttaaaacaagtaatttctaggaatggctgtaagatccttaaggagtcactaggtggagatgttgtgaggtacaaagattgttcttggaaatagcctggaaggttgttgaacattgctggttttcttgtttccctttttgtcttttttctccccaagtataaagaaaaccaaatagacaagggcttctcaataggcattacagtcagaccatagaaccttgccatagatgagacagtgttgtttaaagacccttcccatacttaacattgtatgtcattttggttagattttgtctaagtttttattatcctaaagtttattaataggtatacttttcaaatg

SEQ ID NO: 317273 - DNA, 4001 bp, Homo sapiens
taaaatgagaaataacattcggcattaatatgcaaatctggacaatttttacagcaattacttgatttgtagtcacaaactctacttaaactgacatgtcttccttctcctaacaataaaataacaccattaaacctgagacttaatttcagtccataaactgggtttgttctcgttattaataattcttgtttcataatatatccagtaatgcatatattttaagtgttgatatgtattatatttggcaataatattcaagtacattactccaacctcttaagtgaaaatcagcaatcaaagcagtgccttaagcagaaagcattaatatttagtgattgcaggcagcactgtcatctttatgtctataaagatgcaaacaaattttattaacaatgcaaacaaatgcagacagatgcaaacaaagtttaaagtagaatgttttaaacgtgtgccctgaaaacaagtctattattagacccccataaggagattcaattctgaaaagatccaaatggaagtctgtcaaactgtatatacatcgtggtgattcttgaaacgaaaatatcttcccattatttaaataagcaaaattctacagacccttgaacatgtcctttatatgttattctccttatacacgcaacatatcctgcttcctggttataacgccattctcaaacacaaaatcaggccaatttttaagagaagccaagacttaaaaagctcggcggcgatggctcacgcctgtaatcccagcacttggggaggccgaagcgggtggatcatgaggtccagagatcgagaccatcctggccaacatggtgaaaccctgtctctactaatacaaaaatcagctgtgcgtggtggcgcgcgcctgtagtcccagctactcccgagagtttgaggcaggagaatcgcttgaacccggtaggcggaagttgcagtcagccgagatcctgccactgctctcccgcctgggagacagagcgagactccgtctcaaaacaaaacaaaaaacaaaacaaaaaaactccttatgatatttcctctttgatatttgcctatattaggattaccacataacataaaggttacggggaatttatcaagaatgtaaagacagttaaagcttaaagaacttaaatattacctaagctaaatttacataggagaaaactggtgcccaaataaatcaagcagcttcgcaatatctcagaatatcaacgccaggattaaatgccgctggttctgtggtttttccagcagctccaaagaaacatttttaaattaggggtttaaaaactaccagatgttaggaaacaaaggcggtgccacgacgtgtgctgccgtccgtgtgtcgggggagaggcgagctatcttccctgtgcacccgcggcctcccactgcccacagcccagcacacacgaggtactcggggaagaaacagggagacaaaggcaaagtaaagttcgaggctcagtcccggctagaactccacgcaaacgactaggagcccgctaaagctcacccagcctgaattcaattctgaaaccagactgctgaatctcacccagccgtcgggacgccccagacggcgtccaaagcctccaggggacgcgcggaccctacaacggccaggcagcggcccgggcctgcagcggtcgttggtcgtcggcgtaagcgtgtcaggaaaataacacgaaatgcagcacaggtgggaagcggccggaaggcagcgggggagagcggaaataaggcggagagcgcagggcgccgcggggcggaagaggccgccagacgccccaaagagactggccgctgggccctcaccatgcagcgcctgggtgacggcgagggcgccttctggccggatgctgccggggcaggaagcagcgtctcggacacttgccctcccactgctcgacggggctggggaaggacgagggtgaaccccgcagccaccgccgccagcccccactgtgtattcggcgtgagagtgagccgggcactatccagccgttagcagtggtctggtagtgaccccgtttcccctttcccctcctcaccccttcgggtcttcaaatgttggtcctaaatcccggggcccaacgaccaaaaaccgccgccaccgtttaggggaccagtcggtcagagcgagggggggtcgtcgcagggggagggtagcccaccgggaccgctcgcgctggtcctcgtgtctccactcgtttcccagcgcgcagcgcgcgcggtggcctaagcagccccacgaggagtggtgcctcatccaatcagggattagcttcggggcggggcgaggaggagagagtggggctaaagtttaaatgaggctcttgggctagtcaaagtgcttggagtgacaggcatttcgagcaattggggtgaagagagcgatttttagggtgtgggtgggcacggaataataaatgaaggtcctaggtgcattgtttaggtgtttgaagacgagggctgcagtgtgaaattccgcacttaagggaaaacatagatgcatcgtaatggttctttttcttgtttgatgtagttttcttgtaaactgctagtttggcgcaaaacaaccacatatatccggtggacctttgaaattaagggctagggggaggtgggttataaagctaaaagatggatttgcaaataggactagaagtataaagtataagtggtttaaatgacaatgactaagaaaatgggttagatgaggagaactagcgataggcttgacgctaccactaatcagcttgcagggacatttggcagaggcgaactgccgaactgggttctatgctcttgtaaaaccaactttcacagatagggttgtttggcattcggtatgcataacttcagttttgcttcctttgaagacagctcgaaattaaatgcagacaaggaaagaaaaaaccacctttaggaaccaactatttatgtatagataatattagattcatggaatattagacaataaagaacctagctcatgttgattctctaattaacaaggaacttcatgcccagaatattcaccgagtaacacagatctccttattcccaacctcaaggtgatttcttccacattaactcctaatgtattttctccatatattcaaggaactaatgaatgtctaccaatttaaattttgttaaagtatatttttaatttttaaatatactacaacagtgaggaattagcagggactttggagccagacagaccctgtttaaagtggggattgtgagaataaaataatatatgatattaccaaatattgagccagatgccagaaacaatcctaaggacttttcatattttcatttaattctcacagtaactttggtaaagttactagccctactttgcagacggggaaacagatgcagaaaccttaagtagtttgggcaaagtcatatagcaagtaagtggctccagtttgaaacctacagacataattgctatactatactgtctcaaaatacgtccagaaacaagtagaaaacttggcatagtacttgatgcacactggaagctcaacaaatattttttgtaagccgtctgccctttagtcaatgaatacaagtgtcattttatataagatgtatgcattcaaaataaagcaactagaaaacctagactgatagatctagttggctttgtttgacatgtcaccaattctgtacctcgggaactgtgattgttatattgattactattttttgctgctcttttatttctccagaaaaagattctcctcattcttcattttcatgtcggtaccttctcaattcctagtaattaattctaaatacatgtgtttaaggttaaattatctgaaatgaggttaggcatattagtggcaatttaaaacaagtaatttctaggaatggctgtaagatccttaaggagtcactaggtggagatgttgtgaggtacaaagattgttcttggaaatagcctggaaggttgttga

SEQ ID NO: 317274 - DNA, 4001 bp, Homo sapiens
atatgttgactattaaaaatatagagattggtaaaaaaaatgatgatgatgaattctcaatcctacaaacttctgtaaacgcaaaaaccaagaggaagataataaatctttaataattgattgatattcagaatatcttgatctaattaatttaaagcatggcctacctagccaggtaaaggacggcacagctaggcttatttcttcatttgacacatactgaaagttaataatgaagctaggtgcttgggaaatttctgagaccccatccttccagcatgcaataattaagtcaaagaggccaacagtgtgtatatcagaacaaggtgaagggtaaagcagaccagaaaaaaatattaaaaaccaaaccatctcctcctttctttttttccttctgttttcctttcagactgggttgattttagttccctccaagacttcaagtcattgatctaacaaagatcattgtttaaattaatagcaacacaaactcccacaaagtgatctcttcttatgctctaggttgagtactttggtttatctagaggttgtgtgttacgccgctgaccacctttcaccttttagaatcggcacctgcaattctcaaatgctctggatctaattgccaaccttttgagctcaaaacttcggcaactccttcatgttgggttgtcaaccctttgctttccctcccctgagaaattcgtatgaccttgccttaaaacttttaaagaatacattttaaaatctatattcctgctaaagaaaacagtgagtcattaaaataccaccagataaaaaaaaaaggtttgatttttagttcaggtcggtaatggcctgtaagtaccttgaagatggtatcttcctatcacttatgccttgggacagtacccaagagtggctgaacttttacctaattaaaaaatgagtcatttatttgaaaaattccacttccatttattttatctgatttcttaaatatccggtcaactgctaatttgtcagatgtcataattcgtcagtcctacccttttctacaggctgaatttttaatttgaaacaactacacctctaccgagtgttactttcagacgtaaattactgcaggaagacccccctctgccttggttaacacttaaatgagatgcctcctgtccaggacgcttcctcagtctcactgtaataatctgagtctaaagtcacctgtgcttctgggcggtccaatcatgtattttcaagagtgaaaaaaaaaaatcagtttcttttatgggaaaagattcatcactacaggaaacacgatgggactgactgtatatgattatctgccttcccagaggttgacccttttaaaaccgttttataaaccctttatttcccactaaatataccaagagacagaagatgagtgatagcatgagggataagagctaaagagagaagaataagaaaaaaatatacacttcaaaaattgggacccaaatgtaagattaagggacaatagttagaaggactaccaaaaaccaccttacctttccttgttaagtttttggagccgcccacttcagaaattaacaccattcacagcccaggagcaacttaacacagctaggaagtcacctacaacatcttctcgtccgccttctttttaatgtaaaaccaaaataaggagtgtccagcgactccccaccgcgccgcttaaagcaacagagcgttttaggcttaactcccaggctctgggaattccagtgggtcagaattgcttaaccttggagacttgcagagagaaagtctccaggaggaccgctccccaaaccctggtttctctctatcccaagctgcacattccacagtggaaagcgggagcggcgacccgaaggcagcgaagttctctcgggctcagctcccgaggccgggagcgcgcggcggttccacccgcagagcggcgccgcgtcccggctgcgtggggcgctgcgcacgggagcgctcagcgtctagtctgcgggcccttcccggttccctccctctctcctcccgccgcccgccccctgccgaggccatccgcctcacagtagcaaggttgtctctcgtctactcccttcccttaaactcaccaaaccagatttttactcccaacaccggcaacttcccgtaaatctgccctgaaattttatcctgctggctgagcctcccctggctaaaggccagtgccacattcctgttgttttttaggagcgcagatacctttgctgaaggttcaaagaaaatcggccttgatggcagagattgggggacttgaccagacggacttctctccccgccccaaaagtcacatgcctttcagacacccagaagtggcacctgctccacctgggggcatctgtccgagtcagacgctcggcccccttcgggctgctccgagaaacccagccagaaccacgttggagaaattaggaacctgctgctgaatttcaagccgatcggaaccgccccgctccccttcttccccccataaacaagtcgctggacgaggtgggatctctgcgacccccgcgtgcccggggagagctcccggggcgagctcccggggcgtccttacctggggccgagcatggcttggccgcgcgcaggcaggagcgtcacgcggacggggccctgacctttgccggggccttcgcagcagggcctggggcctgggcgctgctcgttcagaagtggctcattttagtgcgctctgacctagagttacggagggtttctagaaagggaacaaaaaaacactgcatttagaaacagcagccaagccctcgcttcaccttgcctgctctctggggagttggctcgaacccccaccccatcccaattcccaagaaacccagatgtccgcaatccgcgccccaccccctccgccttacctgtttatacaagagttaaggagcctcccgcatttcagtggagcgctaagcctgtttgtaggcgcggaatgggccaacaggaatcgaattctgtgactaaacaaactagaagaggaagcaggcaccaccaggaacctaaaacagagttgtgatttcgggttgcagtgtcattcagctgaggggaaagaaaaaaataccgggctactttagtgaaagaatgttccaaaaatggttctttgctggttgagttaacacatgcaaagagcttagaacggtgcctagcacacagtgttagctgccgttattgttgttgttattcttcttattattatttacattatggcttttttctgaagaagagtgtgtggtcagagttagacatgggctgtagcaccagcattgccactcaccagctgtgaggccatgagcaagatatttaatctctcccagcctcagtttctggaagattctaacgatgggatttttacaaacagtttatattcattgctgacagtcttgaatacaatgggaaataaagtccctgtaaagggtagccaactgaatttcatctcacttaaaagttacaagattgacaacagaaatggagataaatttgcctgcattccatgaagctcactaacgggaaggaaattcagggcccagcaatcacccatctgctatgcttaattctcatttgtattttggcacttgacctggtgtcttaccctgggatagttacttatcccagactgggccggacaaataatgacccttgccgtttgaaaagcagtatgaaagagagggaaatgattttgaaactcctcataaatattaaaaagtgattattgaaggctaaaatgttatcagtgcctccaccctttatcctccatttaacttcacatttaaagaaagaaatcataatccctttccattagtgaggccctttctactttatggagcactttcacccttcttactttatgtgatccttacaaaatgatcctatgagctattttgtccccattttgcagatgaagacactgagatcacacaggttaagtgtaagtccaaggtggtgaggccaggact

SEQ ID NO: 317275 - DNA, 4001 bp, Homo sapiens
cttccaaagtgctgaggttacaggtgtgagccaccgcacccagcctaacctgacctttaatttgctgttatcttgtctaaatttaacagaattgggggtggggtggggggagaaagtttaaaagtattttcatgaaaccagaaccaccatttagcaaaacctttaaatggaatgaattcccgagctcacagaagtgcaaattgcaaggttacacattgcctcccagaaacacaggacctggttctgaactctttgctaaaggattctgattcagcccactgtaaaatctcaagcacaagtaggttttccacttactctccattacacacatgtccctctagcaaaaccaaaaacagcatttgatggaagctaaagattacaattatccggggactccgagccactaaaaaatagagtttgcaaagaaatcccttttgcccccgtcttcccctcaccatccctgccccttccgcagaagggaacccaaatcgtatgcaatttgaaatttttaatatgaatatactaaagtaggaagcacgtacctgctaagcacctggcgctctctttccctgcttgctctctcctcccacactctggcaacggaatgcccttcaaaaaccatggctcagtgcttttggtaaatgttttacgagacactaaacaggcttgtgtcccaccctcagagcaaacaccactgagggaacacaatataatggtcgaaaagatatcatgtaatgtacaataatgaaaatgaacaagcaggctctatttccacacttccccttaagggggaaagcaatgtcaaactttcaggtggtgggggcggagttgccggaaaggctcatagaaataaaccttgacgctggaagcgttagagcgatttttttaaaggtggcataacgataagctcattgttctaatcctcaaacaagtcttggcttgctgagctgaaaaactgtcaaaggcaagagttaataaagggtggagttcaccggcgaatatgtagacgcagtagcatctccacattgaccacatattcctatttatcagagaaaatgcaactcaaaaagtgctcataaaccatcctccacaataaccaaaggtacttcccattttccatatccttcaagttattcacagttaagacccaactctgctccaaaccagaagttttgcattccattcaagttaacaattacaactgaaggataacagaaacttgctggcaccaaactattagaatgtcaggtgcctcctggtaccaccagggttaatgagataaagagagggtgcccagggatgatctatctgcctggttttacagaaactacctatagagattgctagagtcttgggcccatgcaagcagcacgcactcatcggctactggaggactgagtgggacatctaagacatgaaaaagcagaattacttagctacagtcaagcccactcgctaaaaagagaccaagaccgtctagagaagaagccagaattggctttggttgcagaatcacacccacaggcaggataggcaaataagataacccattctctgtccccacccactcctccaatccccaagagagtgctcagaattttgcatttcctacctttaaaatatctgctggggtggaaacaaaacaaagcaaaacaaaactgaacctagaattgagatcatgtgttttctacactccagctgtgtgaccttgagggagtaacttaacctccctgagcccgtctcctcatctataaagtacaaatgtctagaaacacagaagttatttccaagaactgacagctctccagctccaggagcctagaaaatggcacagagcagttcttgacagttttaaaatgtcagaagggttgttgtcattttttggtctcctaccttatgtggatgggttccatcttattttcaatgtcctcctgttgcagaagcttccggttagtcctgggactaaagggcaattgacctcactcctcctgggtctgactgactaatctgttagggtgggtaccataaatgaccgttttatctgcctgcccggggcgtggcaacagggcctccccgccccccagccctgcctgtcagctccttttgctttcacaacatttctcgtcttgccctctatcacagtgagctgacccgcctcctaacgcctcatccgggcctccctttttctcttttttccctctcttcctctctcctttcttgccttgcttccctgagaggaacataatgggtgttgggggagggcgatgattctctttttcttttctttctttttttttttttttttgagacggattctcgctctgtcacccaggctggagtgcagtggcacaatctcggctcactgcaacctccgctcccaagttcaagcgattctcctgccccagcctcccaagtagctgggattacaggcacctgacaccatgcctggctaatttttgtatttttagtagagacagggtttcaccatgttggccaggctggtctcgaactcctgacttcaggtgatccgcccgccttggcctcccaaagtgctgggattacaggcatgagccaccatgcctggccctcatcattctatttctccttctactattttatgtgacatatcacacaacccagtgcatggtttacacaggtattattattattctcgagattcagagatgcagaaagatccaaaaacagcccaaggtcactgagccattgctgacaggccaggggctgaggtggcctttcctgacagcccaggatttcccttaagccactgacctccaaaagcacctcctctcagagccgtaaggccccacctggtctaacctgctctccccgccacctgtggcatagtttcctctcagatccctctcctcatcttccttcctccctcagcacgggccagccccttattctaatgttagggtttatctcacttgacctcttgtcccttgcgtgcccttctttatgcaaacccaagaggagtaaatcccctgcatgctagggattaattactcctatcacagaagtctttcccatgagcacccctcttgggtcacctgtctcattccactctgcattagggtatttgcgtgtcctcaaatgccatccctccctccctccccaccttccttccttccctccttccttccttccttctttcttttttcatggagtctcgccctcttgcccaggctggagtgcagtggcacaatctcagctcactgcaacctccacctcccagattcaagagattctcctgccccagcctcctgcgtagctgggattatagtcatgcaccaccacacctggctaatttctttgtagttttagtagagacagggtttcaccatgttggtcaggctggtcttgaattcctgatctcaaatgatccacccgcttcggcctcccaaagtgctgggattacaggcataagccactgtgcccgaccctcaactcctttctagatcaccagaacactcacctctgcaccccctggcatggagtccaatgccttactgttcagaaatatacttaaattttgataaaaaaaagtttgaagacacaaaatctgaatccaaaacagtgtttcaaaggcatatattctacgtacagtcagccctcagtgtctgtgggttccgcatccctgaagtcaaccaaccacagatcaagaatattcaaaaatctcatgtaccccataaatatatatactactatgtgcccacaaaaaattaaaaatgtaaaaatgtgaaaaggacggctgtgtctgtactaaacacatagacttctttttcttgtcattattccctaaacaatacagcataacaactacttactagcatttccattggattaggtattctaagtcatctagagatgactcaaagtatatgggaagatatgtgtaggtcatatgcaaatactgcaccattttatatagaggactcgagcatccaaaatctggggggcctgcaaccaattccccatgg

SEQ ID NO: 317276 - DNA, 4001 bp, Homo sapiens
ggtgatccaggaccatacagaaaggtgagaggggacccacaggagaaagacaatggaagaacaattaaggcagaaatctggtgcccgggctgtggcaggtcactgggctaacgacaagagtgtggcacaacaaaggggcacgggaggaaggacagcggaggggaggagatggagaggggatgcgggacgccacgggtcggacaaagcgcccaaggcggcgaaacaaagggccgggggtagagagtcgcagcgggtagcggtgaaagacaaagcgcccggggccgggggcactagcggggcgaagcggcgacaacggccgcgaggaacaaagatgcacggggcccccaggcagagcccgctggaggcgcgcgggaggcacggcgcccgagggccccgcgcgccctgccgcactcacgcccgcacccgccggcctcgccgccgccgccgccgcccgccctcacgcgctggagcctgagccacggcagcgcagagcggcagcgcacggccacacgccgccgccgccgcgctcggcgcacgcgacgccgcccccgcgggcccccgaacgccaagcgcgccgcggcccccgaacccgctgcccgccgtgagctgccagacgcccgcaactttcccggttcccggcgctccgattccctcagacttaccctgtcacaacaggcgccatcttccacaaactctcgccaaaactccaaccctcgcgagattccccccgacgccttccctggtccctctcccccgccccttccctttttcctcactcctcgattccacccagcccccgcgctccctttcccctcgccgccgccgcgaagagccagacgcctcgcgccgcccgcagagtaggggatcctgctcgctgccttccctggaaacctacccaggcgatggagcatgcgcaggcggctcctccgcgggcgagccctccgtgtggtccatggggagcgctccggttatccgggttttaggacgcgctttgagggacgtacgtggagactgaggaaaaccggaggggattactacggggacgaggaatggaggggtcaggaggcggggccgaggagaagggaggaggggtcctgggaaaatgggctgcgtttcacaggcctagatgaaacacctcctcaatgggtgttttccaagcggcttcccgctcactctgggttcccagctattttcattcattcaaacgttccctgggcgcctcctttatgctaatctcggcgtttggtgcaggagcgccagagatgtctggggttcgggcaagtgacacgtcggggactgtcttcattcattacacccccccatgctaatgaggaggcccttccagagctcctcaagcggaaaacttttgcagttgagctctctcgccttagcgttctccttgggtgtgaaatgaggtcaagccaaggcctctagcaaagacacccctaatggccacctcgcagacacacgccagagcgcggagtagttctctccagaagggaaaactgccttggaattgagagccacattctcccacctccgagtctgcccagaggacccgatcaaagctcttgccgctcgcgtgctgcatggcctctctaagaccccatcgcagccaccaccgtgtgtgagcccaggtgtgtgttgagaccactactgcacagggaaccgggccacccgagggcctggcacagccgaggacgctgccggctgcccgaatcgcgcttcaggcggcctgatcccggaagcccccgggcaaacctggccccaccgggcatggaacagcagggtgaagggcccgaatcccgccccctcctcctacctgcagccccccatctttcccctcctttgctctttcctttcctagagattcccagatccagcactgcctcccgcagggagccccaaaacccggagaactggaattcgccgcccgaaacctgttgaaggcgctgcaggattggcgcggcccgcgcgagcggcactgcgcatgtacccaatgcgggcagtccagtctcacgctacacctccttcccaccgccttccactactcggctcagacacaacacggccgtgggaaatttcctaaacctcgcgagaacgtgcccctgttgcctaagctttcgccccaaatctcgcggagccaaggcaggacaggtgtttgcctagaccagctccgggcgccgttcgtgcagcgcgtgcccgggaggcgggcggcgggcggcgggcgcgggcggggtgggaagggagcggcttgccgcggaggcggggcgggaaggcgcgtggctgggagcacggggcggagggcggcgggggaggagacccgcgtctcgcacacaacacgcacacgccctgtgacgctggatggaagacgaggggtggggagcctcgaacggaggaaggggaagccaggaggttggaagtcgctgccggtacggagagtgagaggtcaggctctagggcaggaggagccccaggccgatctcccggggaggtttcctgtcgccctccacaagcctggtactttcctaaaacgtgttagacaccgcgccccccgcctccgggagctgacagacagcctccagagtcgggtttgagtcatgccttgagtcacctagtctggccactacttcgcttactttgaaacaagttctgattccttagctactctactttagcaattggtttctttttttttttttttttttttttttgagacggagtcttgctctgtcgcctaggctagagtgcagtggcgcgatctcggctcactgcaagctccgcctcctggattcacgccattctcctgccgcagcctcctgagtagctggaactacaggcgcccgccaccacgcccggctaattttttctattttttagtagacggagttttaccatgttagtcaggatggtctcgatctcctgacctcgtgatccgcccgcctcggcctcccaaagtgctgggattacacgtgtgagccaccgcgcctggcagcaattggttgttttctttctaatctacccgctggccctgtgagctgggtagaaaaataaataaataaataaataaacagctctgcgctctcgccttgttgccttgtatagattcttgctcccgtttaaggacacgatttttaaaatttcttgtcagtctcttcttagccttttgaagtaatcttacaaatcagtttctgttttttcctcccactaatatggcttttttgctttccgtcacctttccgtatttttattgcaatattccattttacgtatggctgcggcaggtgctatagtgactactgttttaaatgcagcccttccttttggatcattcatccaatgagttcctgattacgtaaattcttcaatcagccacgtttcagattggccctgatgtggtttctataccagccttagcctggcattatctaggaaccagtgtcttcctgctcacgtcacagccccgcaaatgtagagttgaattgaattttgatatttggaggacagtgagttctctaataggaaaccctggtttttaagttgttttcaaggttttaggggtgtgtgtgtgtgtgtgtgtgcgtgtgtgtgtgtttgtgtttgcctattgattatatacacaaaaaaacagacttaaaaccatttggtgcaatatctcagtgcaagtctggcttggaacaggatagctcaggaggaggacaaagcccttggggcacatattccttggagctgtcatcccaagaaggtatttcagtcatggcctagtccagaccactgatctaatttggaatcatggccttctgagagccccagcgaccttgggaagccatggtaaccacaaagggaataacagctccccctttttgccctaaaacatgctccatctgcagccctcccccatctcaggaaaggacaactccattcttccacttatgtcaagaaccttggagtccttgcctcctttctcacacccaagatacaattggacggaaaatcctatt

SEQ ID NO: 317277 - DNA, 4001 bp, Homo sapiens
ccacccccattcacacaaccccaagcttttagcattaccaaaacaataagaactcgaaacacttcaagggttctttaacactaggaagtgtctttaaaataatctcactacaggctattacgtgtgtgtgtgtatatatatatataatatacatattatacgtatactttttaactgcatttgattaatatcttccacaaagatcttagaagcagtattcatcgaccagaaactgcactcttcggtgctgtcctcatttcaaccccaatgatgggacagaagggttgtcacgcatctacagggcagcaaaaagcacataactgtaaactatctaatgattaagaaaaaataaaacatttatataaaattcccaagcggaatgcctctccttttccttatgaggcagaagttactgataaattctaaatccagatttctagaaaatgctgaaattctccgccccaacactcacaagtttttaacatggaaattcactcaactcctactcacacgccaaatgaatatccattgtggctatctgaaactattctcaaacactaacagaaaaacacatatatacatcttgagcctccttctaaccgtcctacgataccctccaatcatcctcaggcagcctagattgcaaagcttcgacagacagctgcccttggcctacgccgtcaggaaccaggaggggggcgggggccggggggcgcaagaaccaccaagagaccagatctttttccaaggctactgtttccaagcaaaacaacccacggcactaaaaagacggcgatgaaaattggagacgctttaatcccgagagaaaggggtggcgataggggggcgggagggtacaagaaatcccgagaaaaagaggtgcggaggagaaaactaagtatcccatgcatctttcagacccacaaaacaacaaaccgtagagtcttgtgtgcacttagaagcagcagatggagtccccggggctgagacagttcagcagacgtacaccgtgggttgtggataaatcaaccgatgacgggagaggaagggggtgccgagagaataagcccgtggatgggggagacaaagcctcggggggtgatccaggaccatacagaaaggtgagaggggacccacaggagaaagacaatggaagaacaattaaggcagaaatctggtgcccgggctgtggcaggtcactgggctaacgacaagagtgtggcacaacaaaggggcacgggaggaaggacagcggaggggaggagatggagaggggatgcgggacgccacgggtcggacaaagcgcccaaggcggcgaaacaaagggccgggggtagagagtcgcagcgggtagcggtgaaagacaaagcgcccggggccgggggcactagcggggcgaagcggcgacaacggccgcgaggaacaaagatgcacggggcccccaggcagagcccgctggaggcgcgcgggaggcacggcgcccgagggccccgcgcgccctgccgcactcacgcccgcacccgccggcctcgccgccgccgccgccgcccgccctcacgcgctggagcctgagccacggcagcgcagagcggcagcgcacggccacacgccgccgccgccgcgctcggcgcacgcgacgccgcccccgcgggcccccgaacgccaagcgcgccgcggcccccgaacccgctgcccgccgtgagctgccagacgcccgcaactttcccggttcccggcgctccgattccctcagacttaccctgtcacaacaggcgccatcttccacaaactctcgccaaaactccaaccctcgcgagattccccccgacgccttccctggtccctctcccccgccccttccctttttcctcactcctcgattccacccagcccccgcgctccctttcccctcgccgccgccgcgaagagccagacgcctcgcgccgcccgcagagtaggggatcctgctcgctgccttccctggaaacctacccaggcgatggagcatgcgcaggcggctcctccgcgggcgagccctccgtgtggtccatggggagcgctccggttatccgggttttaggacgcgctttgagggacgtacgtggagactgaggaaaaccggaggggattactacggggacgaggaatggaggggtcaggaggcggggccgaggagaagggaggaggggtcctgggaaaatgggctgcgtttcacaggcctagatgaaacacctcctcaatgggtgttttccaagcggcttcccgctcactctgggttcccagctattttcattcattcaaacgttccctgggcgcctcctttatgctaatctcggcgtttggtgcaggagcgccagagatgtctggggttcgggcaagtgacacgtcggggactgtcttcattcattacacccccccatgctaatgaggaggcccttccagagctcctcaagcggaaaacttttgcagttgagctctctcgccttagcgttctccttgggtgtgaaatgaggtcaagccaaggcctctagcaaagacacccctaatggccacctcgcagacacacgccagagcgcggagtagttctctccagaagggaaaactgccttggaattgagagccacattctcccacctccgagtctgcccagaggacccgatcaaagctcttgccgctcgcgtgctgcatggcctctctaagaccccatcgcagccaccaccgtgtgtgagcccaggtgtgtgttgagaccactactgcacagggaaccgggccacccgagggcctggcacagccgaggacgctgccggctgcccgaatcgcgcttcaggcggcctgatcccggaagcccccgggcaaacctggccccaccgggcatggaacagcagggtgaagggcccgaatcccgccccctcctcctacctgcagccccccatctttcccctcctttgctctttcctttcctagagattcccagatccagcactgcctcccgcagggagccccaaaacccggagaactggaattcgccgcccgaaacctgttgaaggcgctgcaggattggcgcggcccgcgcgagcggcactgcgcatgtacccaatgcgggcagtccagtctcacgctacacctccttcccaccgccttccactactcggctcagacacaacacggccgtgggaaatttcctaaacctcgcgagaacgtgcccctgttgcctaagctttcgccccaaatctcgcggagccaaggcaggacaggtgtttgcctagaccagctccgggcgccgttcgtgcagcgcgtgcccgggaggcgggcggcgggcggcgggcgcgggcggggtgggaagggagcggcttgccgcggaggcggggcgggaaggcgcgtggctgggagcacggggcggagggcggcgggggaggagacccgcgtctcgcacacaacacgcacacgccctgtgacgctggatggaagacgaggggtggggagcctcgaacggaggaaggggaagccaggaggttggaagtcgctgccggtacggagagtgagaggtcaggctctagggcaggaggagccccaggccgatctcccggggaggtttcctgtcgccctccacaagcctggtactttcctaaaacgtgttagacaccgcgccccccgcctccgggagctgacagacagcctccagagtcgggtttgagtcatgccttgagtcacctagtctggccactacttcgcttactttgaaacaagttctgattccttagctactctactttagcaattggtttctttttttttttttttttttttttttgagacggagtcttgctctgtcgcctaggctagagtgcagtggcgcgatctcggctcactgcaagctccgcctcctggattcacgccattctcctgccgcagcctcctgagtagctggaactacaggcgcccgccaccacgcccggctaattttttctattttttagtagacggagttttaccatgttagt

SEQ ID NO: 317278 - DNA, 4001 bp, Homo sapiens
gacagtctatgtttctaaggccaactccttcacttgtgcactggatttcatcccctttggctactcagggacaatgcccttacagttttctcactctctcctgcattataaaacgttctcactctattgtatcatttcctagaatatacaaacatgctgtaatacttcctctcttaaagaggaaaaaatatggtgccagatctcccagcaaccacatcttttttttgctcccctttacagctaaaccccaagaataccctataagtgctattttcaattccactcctcccattctttcctaaattcactctaatcctgatctctccactaaaactcctcttgtcaagatcaccagtgacctcttccttgccaaatccaaagggcaattctcagttatcttactcaaacagctgcatttgacccagctgaccacatcctccttgaaatacttcacttggcctctggtatttaaggggggggggggggcgggggaaggcaaaaactgtttgacacctagggcgaagtatcttagtgctatgatacacagatctaattgtgtggtttatggggggcaccaagatgttaaattccgttttagacctcaagtttgaaagaataataatacatctcagtagaaattgaatcataaggatagcattcaatttccttacacaacacttggtggatgaccaacatttttaaggagcttcatccagttcagtggagcaatgttcgtcaagccatgacctatagaaaagagtttaggatgcacgtacaggcctgagacttgaacttgcttctaataatgaggcagtgaccagcaaggctgacttgtgaagtgaaagaacaaaaaataataatactcagattgacgatgatagtaacagtcatggtggtatatatttactactcatttacttcagggaatgcgccctgttaaacactatacacgccctttagtatataatcctcatacacttttatgaaacaggcgcgatcatctccattttacatacggggtagagaggagctagctaaaatcagttattaaagaggagagctaagatttggggatagggcggttgaggttccaaagctcaagttttctaagcaaaatttttgtactgtttcttgcaaggaaaatcaggaaacttcaattgaatacgtgccaatttaaaaaaaaatacagattaagaagttttctcagagtaacaatacatgcttattaggcactttcctatgcataatttcctatttaatggcaattacatgattgtcttcttttttgggacacacgttttctcctacgtctgaacatgtgcactgcctttaacatgaagctggcaggctataaaactttaccacaggagctgaaatcgtattcgggttctccacttgcttatttccattatctccacttccattatttcatcacacacctgaacggaaaaccccagtacaggcccggggctgcctcagtctacttcggcagcaaaagacgaataagcccactggcagagaccactgtgcaagcctaatcacttcccaagaagggttttgctttaaaggtacgaagcaggtaggaaaggtggggcttatcgccttgccaaaaacgttctcctcaagaagaacccagttccaggtggaaaaggtatcctgaaaatcaggttaacctcaaacttaaatccaagcctaaccacctgcccagcccgccccagcccaacctgacggaagcttgtcagggaagagtccatagaaggcgtcacctttaggagacatcctctgtcatagtgctcgcagccccgctgacctcgctcttgaccgctggcgccatcttcccgggccgtcgccgccatctcctccacctcccctcacattccaccgatccttcccccaggataaaaaccacgcccagagaagctgcgcctctctagcacacccctcccagccccagcggccactagcgacaatatggctcctaagcacgtgacccggggcagacggatttccggttcccggggctacgaggcggaagcgaaggcagacgcagtctccgtcgttgacgttagtcgcagtcttcgctgctaacggtaataactcttaggttgcctgttttcccccaatcgctacccgcccaaatctcagggcgtagttcggcgcgaggttggcggcagcggcgcggagacgctggttggccccagaggaaaggacgctcactgggcgcatcgttacctgtgacgggtcctccctctctccctccggtggcggggagcctggagaaaggggcggagctcggcccgggccctgggctcagcgggtcccgcgcgctgctcttggacgccagggtgctcgctggcacctcgaagtgcttcttgcttcctccctttcccgtttacttgctgttctttcaaaatatgtactgacattcactattgccagtcaccagctaaaccgtgaggacaaaaagtaaggaaaaatagacacactccaccatgacctcatggaactaacaagactggtggaggaggaagacattaataagagcaatcactgcaataaatgtaagattacaacctggagaagtgctaggaagaagtgtgtgtcctgtgagagctaatattagagcagctctgacaatctgagtgtcagtgagggaaggcttccctggggaagcgatgcaagccgagggctgaaagatgggtaggagttagtgtgcaaaaggctttgtggcacaaagaacatggtacctgttagaaggtggaaggaaaatgtacaagccaacaaaattgaaatcatactcggggtacacagctaaatatgtttctccttattaaagagtcaaggccctggaaaatgatgtaagcaaagctgcaggtgttagaagaagatatttgtctttagctttctatcctgattttgtgtttcctaaaacaccgggaaagggaaaatattccccttcagctttccggttactaactcttaacattctaattttctttcagttttgttatgagttgctaaaatggtgaaatgctgctccgccattggatgtgcttctcgctgcttgccaaattcgaagttaaaaggactgacatttcacgtgtaagattttgctgtagttaagccaaatactttggccatgttataaaaagcaaaagacagttctacttaagtcttcaattttgaactttagttcccgagtcctttttaaataacctttttgttaaatttgaagtgacaatgtgatacctttacatgtttataatttagtttaaaagttttaagatatcagagactttaagatatcagagactggtttacaaaaaataccataaggctaacttttgctaatattattactttgtattttatcacaccgccaaagaaattcaatgttgtttacatgtagtttacaatctgaatgaaggagctttgctcgaatatattgccctctctatttagaagtagatcaagcataggttatagagaaaaaatacaaattacaagttaagaccaagggatctttagctgtgttgcaaataaatcaaaatgattttagtttcatattttagccattctcttgacagccatgaaggagtaagtgaaggagtaataagatttaatagttgttcacttgttaaaggtttattttgctgcttttgtgccaggcactgtcctatgtgttagagaaagatctcctagctattttgttagatataataaatcaaaactgagcatatatatcctaccttattttagaaaaatttgaaccagcttgaaaattgagtaagatatggctattaggccttcatatctctcaaaatagctctgatctccagaactccacactgcagctattctctgcattcattcactaagcatctgtagacctgctatgtattaaatgctgtactaagcaattttctggtgctgacagaagaatggaattacaaggggccctttttatcgaggataaattctggatatcatttcagatagga

SEQ ID NO: 317279 - DNA, 4001 bp, Homo sapiens
agatgagagctttcatcagtcacattctagtcctgagacctgggtgttgctcagaggtcaaaccaaacacacacccactctagggatggatttctcctgctgatgatggctaattacatgcatcatgtgctgaatttttaataattttactcccagattaaactcttccccagattctgttgcaactgactctaaccctctaatgaatgtctccaacctcacatccaagtggaacctgattatgcacctatgtgtcccagcaatcaaacgcaggatgaaaatcaaaatgaaccagcagggcatggtggctcatgcctgtaataccagcactttgggaggccgaggcaggaggatcacttgaggtcgggagttcgagaccagcctggccaatatggcaaaaccccatctctactaaaaatacaaaaattagccgggcatggtggcacatgcctgtaatcccagctgctcagaaggctgaggcaggagaatcacttgaaccagagagctggaggttgcagtgagccgaggttgtgccactgcactccagtctgggtgacaaaatgagcccctgtatcaaaataaggaaaagaaaaaaaaaattgtcccatccagtaaaacatgtcactagctgccatttccccaggtggatggctaacggaaatacgggcctgctaaaaagactcaggagacaatattatccatctccttcccttccaacctgctctggtttctatgaaaaagtgaaggccaaactgctaagtcagtgtaaaagttgtaagcgactgaaatgttctcaggaggaagagtttatggatgtttatggaggagacagtcactgttgaaaggcttccagttgcttattatttgggcctgaggaggaaccaccgctgaaatcaagcttggaagagcttgctgacgtcagattcccagctgtagtaaccccaaatggccaagtaagtatgttttttttttaactgcagctgttaggtggcaattaagaggggaagcggtggtaaggaatccctagtgtctgtaattataaaagcaaggatgtgacataggacttccataaaacttacacctcctcttaagattgatttcaattaaaaactgcttcatcgttggtgacactttagcatctctgttggtggcttcctgccctgaccacacaaggttcctttcgtgacgacaggaatcaacaaaaagaagaaaaaaatgtaagtttaccaacgcgccttccctttttccgagcctgatttatacaggatatatgggaagaaatgtggactccttgacctgttacaagaatccatcaaccacccaaataaatggaaacgtggaaagagattcaaagtcctccaggttttaggatattttaaggtatttaaaagggagaaggaggcgccgacagcgcacccggtgctctgtgtcacgatcttccgctcgcggcgcctttgaggacaagggcggcgggaaacgggtccgcggggttccgaggcgagcggccgtggaggaagcgcccccgaagaaggcctggtccctacgccccgcactgcccagcgctggggaacacagatcctcggaggaggccccagggagggaaggcgggagcggggcccgcgggaggggagggacgggagccgttgccacgcaccgcgccctgcccggaccgccgcgggacagccagttgttcagtgccgggatcccgcggctgtgccagaaagcaggacgccgcggggctgccgtcccgacccctcgcttccttccgcgctcccgggaccgggctcagcacccggcgccccggctacgaccggacactcacccggagccaccagcggcgaactcacggcgcctcccacgaagacagcagcggctaggacggcggaccccgggagtgcccgcggagccatcgccgcgtcgcttcgccctcctcccccagggcgccgcgtcccgcgctcgggaaggcagagccgctccggagccggcgggctgatcgagtggctgggctgggccccagggagcggcgaaccccgccccgccattgccccgccccacgccacacccacctcggctcggtcccgcctctccccgcgcgccccgggctccacctaagccggcacgaggtccactcatggctccgcccccgactccccgcccacctcagcctgatcccgcctctccctgccattcccgcttcctttccaaaccccgcagcagcctcagcggcgtagctaggccatggacacgccctctttctccacccacctcagcttggccccgcctctccctaccgagccccggactccacctaagaaggcacgtggcccatccatggccccgcccttttccccacccacagctcagcccgacccctcctctcccgcttcctttccaaacccagcagcagccttggcggcgcagttaggctatagccccgcccttgcgccctgcccaccgtggcccggccgtgcctctacttgccaggcccgcttcctttccaagccgggccgggattacgcgggagcccggggcggggggagggtcgcccgggtgcaacctccctcggtcgctgggactaggcgggcgtgggaagagaaagagggagcgcgccccgagaagcactggacagtcagaagcggccagcactggagtgagcacaggcttttttcgctgttggcatgtctatccactagcattcccctcggttgcagatctagggagtgatgctgtgctggatgtcacgttctgttgtttggaaattagcagaaaagataacttaaatttcttcctctgtttgtttgcatttaagctgctcctattggggaaaatacctctatgcattttcaggaacaacttgccttttttttttaatcgtgtgcttgtattgcaccttgcgcatactcccgcaaagtaggtctttcaatgcccagacgcttattatctcctcacatcctcacatcagctctgcgaggtgactattagaggccagggagtaaacccacgatgtctgggccaccatgataaattgtaattatctcattgtcattgtgtttgctcgctgctgtgccctcagcgcctggatggaggacagacagcacacgctaagaggtcagaagtgttttctgaagttgaatcatcttcacaagcattaataggactcagaggctctctctgaatagttcctttttactgccctgtagagactgttgttactgggccatcaagcatttgcttgaaggaaattagggcaggacttgagcaaatactcaacaccagcaagaagagggggtgcatggaggctgtgggttttcacaggatgggtctcatccttgaggtgactgataacctctagttttcagaggactatttattctctcaccgagtcctccacgcagtctgctggactattattacaaacattgcattgatgtgggaattgccagtgacagaagctcaggccactacagtacagatggctgaggctgaaggatggagcccctgccctttgaagcccaaggagggcactgcgcgtcctgcgctcagttggcagcgcatcctacagtctggcagtcttagcaggcagcctttgctagttttatatcaacataaacattgagaatgtgtgcggaggaaagcgatccatgtggatttctaactaaaacaggagagaatcccggacctagaaattaaactataaattagaagttgtagccagaaccagctataaaatttgcagggcacaatgcaaaatgaaaaggcagggccttctgttcaaaaatcgttaagaatttcaagatggcaacaacacaacattaaatcgattgtggagccctcctaaacacacagttgcacaggtcacacacttataaagccagctctggttttgtaagttagaatgtaacaaaatgcttgaatcaagaaatctaatcaaaatgtaaaatgtcatttcaaaattgaatcatgtttcactcttttcccacagattggacttagtattaaaa

SEQ ID NO: 317280 - DNA, 4001 bp, Homo sapiens
ccttctccttcttcactatctgaaaagttgttatccccaaccggcatcagttctgccatctgtctttcttcaccgaccaggtaatcacagcagctgccatttacttccccagttaaggccacatttgccagcataataagctgaggtgcggccagttcagctttggaaaggtcatgcaagtcatacatgtcgttaggcagggccattccaatgttgccactgctggtaaacagccctcctcctccagaagactgccccattacctgggtggccataactgtattctgaattaaaaacaaaacaaaacaagagcaccagtttaaacactactgttactggcttaaaaccacatcgctgtaattcttcataacttaaaaattttccagtatgatctttataactcagtaaacttcatcgcctattaaaaacaaatctttaaaatagttgttaattcccaatagtctactgcaatcaccaaaaaaaaatttctactatccctataaaacaattctaccaattgtttgcacaactcattcatcattcagccactggcatgtggtgcctcctcaagcacttttaattgttctggtggggataaaaagtaaccttcatttttactgttaaaattattttaaaaattcaaaacatgagtagtaaattattgtcctcccaacttttccccccttcaacagttcaatggtctgaatcagaaagcccagaaatccacaagccattcagtgcatttattaagtacacaaacacatctggaaagtacaagcctgtaataattgttcaacttaattggatttcgcatgaactcaactaactccaaaagaataaactactgtgaaaaagtagcagtcagccccttaatttttcgacaactccacaggcttaaaagaaaaaacatttatggaccccttttcttgtgaaaaaggaagtttgatttattcaaaacttcacaaataaaaattaataagcttatttttctgcaggctgaagttccacaacactgaattccaagcttttcaatacgaataaaatcatcgtgcaactcaactcgacaatcagcaactttcttgcattgtgcttgacttggcctacttgcctagtggaagccattacaagatcaccttcttcaaaacaagttgggctttctagatgctacgttacttctcaatctaaaaggtgccattctcaaacgaagtgttcactcgcaaattaaaaaaagtaagaagttctaagaaaataaagttaaaccgaaaatacaaaaagtaacccgcttcacccaagtgtataaacacaaaccggtttagttctacgtaccaacaaaagttggaagcaaatgccatcacagaaaacagagggcgaaggctgtcccggggctgaacagcccaagctattgggtaatttggcccaacatcgacttttctaattgctccctaacccctaactgccaccccaaatggaattttaacgattgttaggaagaccgtccaggcacagcccgaaagcccaacgtgctgcacgaattcctccgtgctgctgccaccagcgcctgcctcggcggcggcattcctaactgaaataggcattcggccattttctcaaaataccaaacacaaagcagctctttgcaaactcgggcgctctcgcttcctctcgcctcggcccgctcactgcacacatttacacaccaactcgcgggagtcgccccgacactcgtcctgagccttttcctgcgctctccaacactaaaacgggggaggggatcaagctcgaggcgctgtttggccggaaccagtcctccccgagtccaggcagccccctccccagccctagggcccccgtcccgggagaggacggaaagttaccgcgcagccggcgtccgggcttctccgaccgcccccgggcccctccgaccgccccggggctcgcccaacgcccagggccggggaggctccgcgggcgccctcgcgaggcgtcgggctccgagcgccggagggggcccccacacgggccagccgccacccccgcgccccggaagtttgcgaacttcactcccccacggcgcccggcaggacgcgcgccccagccccgccagctccagcggtcgggtggccggacgcgggggccagcggcgccggacggctgaagcgcagaaatcgctgtccagccccgcaggcggaaccgcccgggccccggggctgactcaacccgcccggccgcactcaacggcgccttccggcgacagggagaggccctgggggagggggccaggagggccgcgggccggcgcggggctgcggtgggacccgggggcaggaggaggaagcagaggaagtttcaggactacgggcccgagcagctccgctccttggcctcaaaggacctgactcggtggagcgtccgggccagcgcggaggcggcgtcccagcctccagtggggagggggtccaggcgacgcgctgctcccaacaaacgcccccagcccccgggcggctgctgtgtaacccgatcctgctcggccgccagcccccgcccggcggggccgccgccgccggagccacagtatctgcaaatcagccctggacagcgcctgactccgcgtccttccgcgccctccccgtcccgccactgccgccgcccgggcggccctcccccaccctgaccgagcccccagcccagcgccccacttaccggccttcctcggtgaggaggggcgggcgaccctgagtcgccgctccttctccgactacttttctttgttgctggagtttcgggggagaggtgggggagggtggtaaagttgggtgctggggccgtcgtggaccaagaaggcccaggagtggggctgcagagggtgctcaggcctccgggcctcgccctgccgtctcggctgcggcagccgccgccagggtctggggccccgggcctcggcggcgctcgctccgctgctgcgccgcgagctcgcggcagccgcacattccaacacaggacgctgcgccgcgcacccagtccgcgccgccgccgccgccaccgcccgcgggacacgccccctccgacgcccgcgcgcgcccgcgagacacgccccctccgacgcccgcgcgcgtggccgctaggcgcgccccgcccctctaccaagcaaggagtgccccagtctccagctcgcctgggggcgcgtctagggggagccgcccgtaatcctcccggcccctcactcctgcccttaggtcagaaaagaggcgggccccactccctttctcgatttctattacaaacaaacaacaaaagttccccccagccctggcgtgcatgcatgagaatagagctgttaaaagaagaatccgcaggctttgacgggtctctttagagctattgtcaccggcctctcaagtctaaagcgctccaagatacccttcagatctcttcaagtctccacccatagctgtccttgactaattaagcttcgttttaagcgtctgcggtaaaaaaaaaaaaaaaaaaaaaaagtcttccaaatttcaaactaccggagggggaatgcagtcagtttgggagaagtgagaagaaaacgtttcaggaaggaggttatggactcagaaagcgtgagcgtgaggactgaggggacagatccctagacgtggcaggtagcaggtcattgctgagcccggaaagcacgactgcaggggaggaattaccctcagatgacagaagaaaaggtggtgaggacggggaggctgcctggggccacggtgtgtcggagtaaccgggctcacgtctatgaagcgggataaccaagcggaatgcctagcccatagtcatgtgctaacaaaaacaaaaacaacaaaaaagaacagagagagagtaattccaccccctttcacacctgaaagagcttctcagtctgcctttgataccttcctaaacgtcagtcgtaagtcacacctgtcctcagaagcatagtggctccccatgactacaagcttaaagcttaaacc

SEQ ID NO: 317281 - DNA, 4001 bp, Homo sapiens
ataaaatcatcgtgcaactcaactcgacaatcagcaactttcttgcattgtgcttgacttggcctacttgcctagtggaagccattacaagatcaccttcttcaaaacaagttgggctttctagatgctacgttacttctcaatctaaaaggtgccattctcaaacgaagtgttcactcgcaaattaaaaaaagtaagaagttctaagaaaataaagttaaaccgaaaatacaaaaagtaacccgcttcacccaagtgtataaacacaaaccggtttagttctacgtaccaacaaaagttggaagcaaatgccatcacagaaaacagagggcgaaggctgtcccggggctgaacagcccaagctattgggtaatttggcccaacatcgacttttctaattgctccctaacccctaactgccaccccaaatggaattttaacgattgttaggaagaccgtccaggcacagcccgaaagcccaacgtgctgcacgaattcctccgtgctgctgccaccagcgcctgcctcggcggcggcattcctaactgaaataggcattcggccattttctcaaaataccaaacacaaagcagctctttgcaaactcgggcgctctcgcttcctctcgcctcggcccgctcactgcacacatttacacaccaactcgcgggagtcgccccgacactcgtcctgagccttttcctgcgctctccaacactaaaacgggggaggggatcaagctcgaggcgctgtttggccggaaccagtcctccccgagtccaggcagccccctccccagccctagggcccccgtcccgggagaggacggaaagttaccgcgcagccggcgtccgggcttctccgaccgcccccgggcccctccgaccgccccggggctcgcccaacgcccagggccggggaggctccgcgggcgccctcgcgaggcgtcgggctccgagcgccggagggggcccccacacgggccagccgccacccccgcgccccggaagtttgcgaacttcactcccccacggcgcccggcaggacgcgcgccccagccccgccagctccagcggtcgggtggccggacgcgggggccagcggcgccggacggctgaagcgcagaaatcgctgtccagccccgcaggcggaaccgcccgggccccggggctgactcaacccgcccggccgcactcaacggcgccttccggcgacagggagaggccctgggggagggggccaggagggccgcgggccggcgcggggctgcggtgggacccgggggcaggaggaggaagcagaggaagtttcaggactacgggcccgagcagctccgctccttggcctcaaaggacctgactcggtggagcgtccgggccagcgcggaggcggcgtcccagcctccagtggggagggggtccaggcgacgcgctgctcccaacaaacgcccccagcccccgggcggctgctgtgtaacccgatcctgctcggccgccagcccccgcccggcggggccgccgccgccggagccacagtatctgcaaatcagccctggacagcgcctgactccgcgtccttccgcgccctccccgtcccgccactgccgccgcccgggcggccctcccccaccctgaccgagcccccagcccagcgccccacttaccggccttcctcggtgaggaggggcgggcgaccctgagtcgccgctccttctccgactacttttctttgttgctggagtttcgggggagaggtgggggagggtggtaaagttgggtgctggggccgtcgtggaccaagaaggcccaggagtggggctgcagagggtgctcaggcctccgggcctcgccctgccgtctcggctgcggcagccgccgccagggtctggggccccgggcctcggcggcgctcgctccgctgctgcgccgcgagctcgcggcagccgcacattccaacacaggacgctgcgccgcgcacccagtccgcgccgccgccgccgccaccgcccgcgggacacgccccctccgacgcccgcgcgcgcccgcgagacacgccccctccgacgcccgcgcgcgtggccgctaggcgcgccccgcccctctaccaagcaaggagtgccccagtctccagctcgcctgggggcgcgtctagggggagccgcccgtaatcctcccggcccctcactcctgcccttaggtcagaaaagaggcgggccccactccctttctcgatttctattacaaacaaacaacaaaagttccccccagccctggcgtgcatgcatgagaatagagctgttaaaagaagaatccgcaggctttgacgggtctctttagagctattgtcaccggcctctcaagtctaaagcgctccaagatacccttcagatctcttcaagtctccacccatagctgtccttgactaattaagcttcgttttaagcgtctgcggtaaaaaaaaaaaaaaaaaaaaaaagtcttccaaatttcaaactaccggagggggaatgcagtcagtttgggagaagtgagaagaaaacgtttcaggaaggaggttatggactcagaaagcgtgagcgtgaggactgaggggacagatccctagacgtggcaggtagcaggtcattgctgagcccggaaagcacgactgcaggggaggaattaccctcagatgacagaagaaaaggtggtgaggacggggaggctgcctggggccacggtgtgtcggagtaaccgggctcacgtctatgaagcgggataaccaagcggaatgcctagcccatagtcatgtgctaacaaaaacaaaaacaacaaaaaagaacagagagagagtaattccaccccctttcacacctgaaagagcttctcagtctgcctttgataccttcctaaacgtcagtcgtaagtcacacctgtcctcagaagcatagtggctccccatgactacaagcttaaagcttaaaccccttagtgtggcgttcaagcccctacttaacttgacctagataagtctgactattgcttggtattacaacataagtagcaagtgctatgggggtttgccagtaggaagatggatcccaagaggttctagaaacttttcacagtagatgtattcagtctgaccttggagaatgaggaaaacttcaacaggtggaaagtagggcaaggaacactctacacagtgaaaagggcaagctcaaaatcccaaagcagttgttaagacatcccagcttctcctcagggtacctcacttccttctctttgaagttcctttatttgtttctcttagggcagggcttccagactcttcatttcctggtatacccacgtaggacctctgtttccctctatctggacaatatattactaattaatgcagtctccgatgcaagatgaaatgaagaccctaaggtgctcgaccaccaaaagtttcaatgaggcaatttcaaatgtaacacctctccatgaatcaaacctgaaaagtattcattttcattgaaccaaagagacaggaaggaagggagggagggagggaggaaaggaagatcgacatttttaggactggtacaaacttttctatatatattttatttgtttaactaaaatcaagtttgaggtcacatggcttttttagatgctgtagcccagggtacaattcaggcctctaccaaggttgtcaaagacataaacttgttttctttcccttttttaggtccaaaaaggcaaaaatgaaatgtctcttgttaaacttactaaatgtccttcatttcctcaatctgactgcttactggaaatgtcttattaattgcaaatttattcccacatattgtgatgcaaatagaagaatggcgaatgggcagctgcattcatttaaaattagcagaggcccttgttcaagggatggcatattcagagtgacccaaattatcatgacatgaaggccacaggtcaaattcataggccaaattacaaatcaattgaaaattttcttgagggaag

SEQ ID NO: 317282 - DNA, 4001 bp, Homo sapiens
aaattaaatatcagtataatacaaaattcttatctacctcataggatgtttacccactaacaacaaaactgaccaatttgacctatttcttttctgagaagaggtctattttttatctgcaccatgaacaggagtactaaagaaagaaaagaaccaaaagtaaaagcacctgaatgatcaaaagttgaccacacaagctatgttcaccataaatgacagaggaatctaccatgcctcttaaaatctatgtaactttccatagagtcctttctgagaaaatagatcactggtagctgtgtagttgcctaacatgccaggcaccagaaccagaacggaagctttacctatacatcttgcttaatccccaaaacaatcactatggcagctattattttcccctcttttacagataaggaaacagaggcttaaagagattaaacttaagctatttacttgcccaagaccacgtaactattaaactagactatactaacatagtaatataactataaattaatatataaaccattaaactaaaatattaccacgttcttcatcttcaagactccaagtctcaagcttccaaaataccacagtgctttggcctccaaaatgtaatgatgatcattatagggaagtagtataacatggtggtcagaaacaccaagattctaattctagttcaaccacctactagttatatgatacactgtttaaattccaaaaaggtgcttgcaccatctgtaaaactgcatcgatgtgggttgaaatgaaaaaaaaaaaaaaaaaaaaaaaccatggaaaaccaacagttcacatattgacctaaagaagatgcttggtacaaggtagctactatcattactgttgcccttttttgagaagaaacacaaaggcctgcaacgtttcccagtgtggcataaaattttcaccgcccccccccagaatgttgtcactgtgacacgttgaccaatgattgaaaaaaattatatcggattgttaagtatcttctagcttaatgaacattttaaatggtcctttaaaaatatttcaaacacagagccatatccattgccataccatcaggaatgtctgctttgctggctgcataatcatttcactttcaatttgtttgaacattttatccagaattatgcagtgaggcttgggtttttttcagattttaaacatcaggtggtaagaggatgacagctgtcaaatgtcttgcatctgtttctattcgctgtacttctttttcctagtaagccatgttatccttttgactcctatgaactcatctaaacaaaataaaatatcctctccatgccctcggtctcaacaccgctcaggtgatcgttaatgacgagcggagatgagacgagctgagctgttaatgataaaagtttaaggccctacacaacatattccctaagaaagaaaagtttgttacattcttctccctcgtgacccaaagcttgaaatccacgctttaggcagtactcaaactgaggttcgggcaacgccgaacaagaaaataactttaccaatgcgtcccaaaaccaccatccttcctctcttcctttctcccttcccccaagagtggggggcggggggaaagtgcaagtacacgtagcaacaaaatccctgcgcgctggctgccgcccagagccagagcccgcgatgcaatgaaagttttgcgtccagtgcccggtgtgcggccccttctctgcctttgctagcctccggaaccacccaccgccatcctcccccaccctgcataccaggagtgcccggtccacaccaggcctgcaaagcccccccagaccccgagccgcacggcctcccccagcggctcaccatcgcagccccaggatgaaggcgctggctggctggcgggtgggccggttgaggaatctgttatcgaggctcaggatccattcgcgccaacaacttctcccgcgaagtgcaagaaggcgaagacagtggcgcgcggtgatgacgtcaggaggcgcgagctttgcttccgtcccgcccagaggcgggaggtgcgacgcctgcccaggtgctgccccgagggcaggcgggccgctgacatcgagaggaaccacggtgctttggtgtgagctcggtttttggcgggggcgctaaagtagggggatccgatattggtttccttggcaggcggggtacccaagtacctcccggttacacgtctggacaatgcacttccctatagtaactttgaaaagtttttactaccaactttagtaagataaatgttttagctgtgcgttttacatattatgtataaatatctattctgtaataaggtttcatcaagaggccggacgcggtggctcacccctctaatcccagcactttgggaggccgaggcgggtgggtcacctgaggtcaggagttcgagaccacctgaccaatgtggtgaaaccccgtctctactaaaaatacaaaaattagccagggggtggtgacgtgtgcctgtagtcccagctactcgggagactgagacaggagaattgcttgaacccaggaggcagtggtgcagtgagccgagatcgagctactgccctttagcctgggcgacagagcgaaactccgcctcaaaaaaaagaaaagataccgaaagctttggggtaaaccagttgtatatgaatagattagcaattgaatcacggaatacaatgaaacatttgcgtacgatttcaagagaaagattagaccataaagagttcaatggagaaagcagtatctccagctttggctctagctacacttttgaaattctcacccatccaccccctgttgggtcttgcgctttatgacaccaacatttctatggcgaaagatagaacagcctggaatacaacagaggctgagcattgacagcttgtatttattaaacgcctattgttgtacgtgcagctctggactagcctagctcattttatccccatgatgacactgactactcttatcccgaatttacagacagactgttacttattaacagggcctcactgcactgttccctctgaagccaggatgctaggtctccagccccaccacctgctatttatgtgaccaagggcaagttactgtgcctcggttttgtcttagcagacatatcacacaaatttttgcccataattttagaggacctacaccaatttataatgttcattgtgttataaatcaataaatgagtaaataagacataaaaagttgtacgtgtcttttatattacattcctcttaacttttgcttttttttttttttggcatttgaagccttccttgagtttaaatgagacttaagtcaggagactgtaacttctttgtgagattgttttctttaggaatatttatttacatgaaaatactctatctcagaaatataccagatctaaaatgactgcatatgctttgaaactcctcccttgaacctggactggcctatgactgatttgatcaaagaatacaatggaagtgatactatgccaactccagacctaagctttaagaagactggcagctcctgtcttgctctcttggagcaccatgtaaagccagggaggtggtcatctgagaccagccttatagccatctccaccaggcaccatgcatgtaaatgaagccatctcagatcccatccagcaactgatggaatttcactagctttgttgaccccattcaacacctgggagagcagaaaaatcactcagtcaaggcctgtccaaatttcctgacccacagtagcgtgaacataattaaatgattgctctgttaaggtaataagtattggagtggtttcttataaaggaatagatatccagaatggaaatatttttgaagacccaaaataggactgagcatggtggcacatgcctataatcccagcactttgagaggccttgtctcaggaaaaaaaaacaaaaacaaaaaaaaagtgaaaccaatcagaaaagatttccctgctgatcc

SEQ ID NO: 317283 - DNA, 4001 bp, Homo sapiens
agcacgtctcattgttcccttggagccatatttcaaggaatgcttgatgctaccatgtttgcttcttcaaacagtgccctaagaaagaaaaacgaacagctcattattaaagagcccatctttctccaccactcactggtattagctaaacacaaaaagataattcataataaaaaccaccacagaaagagcctctaagtgtctatagataataaatcttcaagtcaggctaagaaacttcctttcggagtagaaaatgtctcccacaactgctaccttgttaccacacaagttcctgccaggcccacctgccacgggtgtgaggatgcaggactgcttcccagcactgcttccacaccctgtttggatggaaagagccccttgctactcaaagtgtggtccgtggactggcagcccgtctgaaaggcagactctcgggctccacacagaagaaacacacccaaacccacgtttcacaggatggcagagtccaagcgtgagaagcaaggcctgctacaggcttcaggttcaaaggcacctgcagaacactgagtctaaccccttagttgatcataaatcccctgacatagagttttccctcaggagaggggtcacctaatattccatgaccctcccacattaatttattttgaatatactgtgtgggggaaaacgtattagcctgaaacaacctcgatcaatactgcagaggccactcaacaggctagataaaaaccaccacctaaaaaagcagaaatgtcatattaactcaattcttccagggggtataaaagtattggttgtcattgagaacaaacttgtcagtggtccgcggatcacccccaggccagtgattccctaggattcccaggacttggcacaaaggtgctctcacagctgagattcattacagcgaaaggattccacacaaaatcagcaagggcagaggtccatggggcgatgtcccaaagaaaccaggcttgagcttccagaatcctctcccagcggggtcacgcaggacgcacttaactccctacacagtgagccgtgacaacgcatgtgcagtgtcgtcaccagggaagcccactagagactcggtgccagggtttttactgggggctgggcacatgggcaccctctgcctgcttcgtgcccagactctggactcccagaagaaaggaaggttctcagcacaaaccttgttccccacacaagcagctaagcacagggagcccctcttcattgagggtggtgggcaccgtcctgacaccagcggggggccagccttgcacacaggcctctcaggatggtctcgggcctgctgtgtagtctcttctgcaagactctttaaagatcactttaaaaagcaatacagtaagtgattgtgttgtgaagacacaaaatagaatagagggtatgtttttttaaagaaataattgttttaggccaggtgcggtggctcacgcctataatcccagcgctttgggaggccgaggcaggtggaccacgaggtcaggagatcaagaccatcctggctaacacggtgaaaccttgtctctaccaaaaatacaaaaaaaattagctgggcatggtggcggacgcccgtagtcccagctactcgggaggctgaggcaggagaatggcatgaactcgggaggtggagcttgcagtgagccgagatcgtgccactgcactccagcctgggtgacaaagcgagactctgtctcaaaaaataaaataaaataaaataaataattgttttaaagttaataacttctaatagaaaagatttttgtgtcttgggataaagtttccagcaataggatcataaacagatttgaagtaatttacacacataaaagctacagaactagatagagtggaaaggctattactaggtgactccaaaagtggcttcagtgatgacaaaacacggacacagaacatgcgtacttagtaaaattatgttttgatggaaaagagtaaaaaatgaatataaattacattactcaatatctaagtagtactgtattaataatttaaatattaggactgggcatttaactatttaaaatcattaaaaaatgaatttaaaaaataaaataattaaaattattttataattttttaataattaaaaattattaaaaatcatcattaaaaaataaataaataaatgtaaaagttggccaagaaacacgtctggggatcgatcttcttaagaggtgtgacaggctggctgatggcccctgatacacccacatcctcactcccaagcttttggatggctcctcccatccacgtgaccacgtgaaggctctagagatggggagagtgtggggtgcgcctgtgtgagcctggggtcagagccagaggggacggccacatgaggaaggatgcggagactgcagggattcaaggatgggtctcgagcccaggcagacgggcaggcggtcacctccagaagccggaaaggtgaaggaagcagacttaaagtcaccagaggaaccagctctgccacacctgccatcagccaggtcacactgactgcagacacgaggcccccgaaaacgcaggagaatgaatgtgtgttgtcttaagccccccagtttgcagtaatttctttcagcaaccccaggaaacaaatacaagggggaatcactttgtcacgggtgaggggagagggaaagcaggacatgcgtgaaacggtctcactaaagcacgctcagaaaagcatctgtcacacaacaaaggtgctgctgttcccggcaagtgccagctatcactgtgaacagccccaggacagcaggtcatgaagccttgatggcttcctcggggaacagaacacctctcggctttctcttccaaacaggaatagatgctgcctcaatgaaagacatgacttcccagtttattcgcaccatccgcctcacactgtgtgacataatgatggacaatgtcttctatgcagtccacccaatttttctactagactcttactgtcatgggcctctgcttattaaaaagaaatggtttgtaactcatgtaagtaatatcttattatctataatcacgtttctttgtttttattttttagagacagggtctcactccattgcccagactggagtgcagtggcacagtcattgctcggtgcagcctcaaactcactcctgggctcaagccataccaagcacacccccatactcggctaactatttttttttttttggagaaaactgtattgagatattttaagtcacgtatctaatataaaaccagtttgcattgtttcagcttgtcttccttggaacctgtggttgcccttcacctccttctggcaatttaaattgctctgatttcggcagaatattccccggacatcaggaccatctccacattcatcccagtctttgagacagctcccggagatcagcttcctggtcaagcacaagaatctcagcagcaccgtgatcttcctctctctcctggccaggtaagaccccgactttcaggtggtggttcctcttgctgaggctgctcatcactgggctcaagcacaggcccagttagctcaggaggctgcacataccgtcttggtctaagcctacatgctgatcttccttgccaactcatatttcaaacggctgcttctcagtagtgggtaaagagtccagaacgcaggaacgcaaccctcacaccctcacaggtccacagtgttcaccacgtgggcaaaggggccaaggagaagacacccagtgaaccttggctaatgttttaatttttctgtagacgaggtctcactatgttgcccagactagtctcaaacttctgacctcaagcaatcctcccaccttggcctcccaaaataatcacataagttcagcttatagtttaattttttttaaaactgtatcaattaatagtaaagctagcagaacagacagtgaaatttagaagaccatggggtactggattccagctgaacttccattacacca

SEQ ID NO: 317284 - DNA, 4001 bp, Homo sapiens
ctggccagccagagcctccattctctccaagtggaaatcccggcagctcccccgcgtgctctttgaatggagtcgggcaacagctcctagaaaggcgggggcatcctccccctcaagatgaggggagctggagacacacggaactccaaaagagcgctgctgcggacacggacggcggcaccccagcattccctgaccctcccattttttagaacaactacctgaagcttagaaggagaagcaattctgccgaccccagaggctttccagcccctcgtctgctggccaggacccagccaggcagagctgcagcagagacgcccacccacccgctgtgcctctgactgcgagagggggagccgctcacttctgatgcctgacgaccacatcagccagattccaatacactcccgtgaacaacttatctgccagtgtaagcatttgcaagagcttcaaaaggaagtccaaatcatgtaaacagatacttacaaaggcaggtttttaatgactttactcggaataaaaaaacaaaattttctacaccttgcctggatatacactgagatgaaagtgctgcctacaaataagtacaaatggctaactgattaactggcccattaaacccacgacagctccaaaattcactttccgacgcaggatatgaaacagaggttacaggaacacattccccctgccccaagacagccagaggcggcccgcggcaggcacgccccaaagaagaccagagctgctccccgagcctcacgcagcttcaccttccaagcagctttccacgtgcacagaaagccggttgatttcatcaggctcatgctggccctgcccagcagacccatgtctatttcccacttaaaaggaaggacgcggctcattttcctgttcccaacccctccatgcccctcatctctaaactagtagtttgtccttcgcttctctacagaagactttaattagatattagaaaaacattaagattatacaattcccagaaaagaatgaattcgaaatcagtgcccagtaattactaagacttctgtacataatttaaatttatttttatctttgcaccaacacagccttaagaggaaaatagaaattatttttatttcatctcaaatcttttaaaaagccattttagagtaacttcaacttcataagcttatatagtaatcaccaatatgatctatagtagctatctatatgcacaatagccaaatcaactcatcatatttagaaatgttaagctaccatcatttaaagagcctaagattttaatgtatttatctagcctaaaattaatatttcaacaaaatcaattcactcacatctttcaaatctatgagaattaccacggtaaaggaaaaacatctgacgctttccgtaagttctgacttaaaacctggcagcttgggctcccgaggggttgaggccggcggccgggtgtgtcgggcccgggacgtgctgcggtcccagagcctgggctgagcccccgcagcactcgctttgagctgtggtgcagacacatgaaaaccatttccaaagcttatccttacaagcatttgcaggtcccacagctgccactcgctaaaacaggatagccagggtgccacgctttcctaccactgattaaatgaaaagaaaaagccggaactacttacctgctggtcattagaaacatgggtttcgtttgacaactctttccccaaattcattgtaaggcaccgagccacactaggcacccgggtctaagacacaccattcaacaccgcagcttgtgcgtgtgagaaaagtttaaaggcatttccgatgaagttccctctcgctcccttcgtaacccatggcaacaggacactgcaggaagctgtggcttgccagggtttcagactctatctcaattgtctcatccaaagaaagaagcgccgtttacataaatcacgctgtgagatcatttttaaactatttcctctaccaaatcagaagaataaaacttcggccgacaggggtaatttctcagtcagtaaaacagctgcagagaatttgttttttttagcatcgtggtgcagttcacaaccttaattacagctgccaatgaatctattctaagcctccacatgcaccagcttactgggtggcagccagcgggatctggcacacgcctaaagccctctcagtgctatctgtattccgtgatctgctctgcccaccctccaaatatatgaaacaaccagaaagcgagtgaaccatgatggatcctggctctaaaaaggaaggaggaaagaaaaagaaaactatttgtaaagcctagggatcactgcaaaatcatctgttaattttctagagatttaggggtaaactgctcatcccaaagtgcttccctgctgtcaaaatcatgcagcatgggccacctagagtctcgtcctaatgggctctaggagtcctaaccctgaaacgttaggttgagggaagcttcgccattagacctggggaagcttcttgccaggaactgcaaactcaatgcccacagggccaccaggctaggtccatggctctggggtctggggttgggctgccagctgggaaggaactgtgccagctctgcttctgcctttctgtggaggaacatgagcattccccgcacgagagtgttcagtgagcagaacccacagcactggacacacacttcgtttcagaaatgcacaatggctgcttgcagaatgcgcagcagctcaagcttccttagaaggcttttctcaggagctgtgcacgtaacaaaagtgtgggggagtctgcaggggcggggggcaggcgcccagccacacccccagcaagcagaggaatcaccccaaggcagccacacctccctctgcacagctgctcctcgctgaaaggggtgccacctccacttctgtcaccagcccaggaaggggctcccgcccaagctaccgggacccccggtcagccccataggtctggagtggcctcagaagccctgttcctcgacagggccccgcctctacctaccatggccccacccacttcccctgggctctgggccagagggtctacattaggtacgacaggcatggcaggcagtatgacagaaggcggagcacgtatagaccagaccacatcaccattcctgggctaagccacatctctcagacaaaaccagcatcctcgtcccctgccttcccgtcagcatccaccccaccacacacacacaggcaccccccaacacacacaggcaccccccaacacacacaggcacccccaacacacacaggcacccccacacacacaggcaccccccctacacacacatgcaccccacacacgtaccacacacacacatgtacccccccacacacaggtacccacacacacacaggcacacacacaggcaccccacacacacacacatgcaccccacacacgtaccccacacacacacgtaccccacacacacacaggcacccacacacacacaggcacctcacacacaggcacccccacacacaaaggcaccccacacacacacaggcacccacacacacacaggcactcacacacacacaggcaccccacacacacaggcacccacacacaggcacgcacacacacaggtgcacacacacacaggcacacacacaggcacactttcagagaaagcaatctgaaggttctggaacaacagcaaggggttctggggtggctgggtgagcccctgacgctgacctgcccgttaacctcattggcttctgaggggcctgcactactgacagtttacagagctttggaggagacagtggtctccaggcgggagcagaggacaacagcatcctggccccccagggcccccagaccctgggaacagccaccagcgcctgagaaccgaaggcagcctgggcatgcgtggggccttctgctgaggggttatcacctaagtgctaaactgatttcacctcagttctttcagacagaaa

SEQ ID NO: 317285 - DNA, 4001 bp, Homo sapiens
actgactctctaaacaacgtccagaaaaagaacagaagcatacccgtgccatctcatttagacatgcaaagaaagtagcacatatttcatggaatttggggactggcttttgaggaatagagacttgcttatcattcatcaaccaactcgttctcccaagaggaaggccactttaattcctggataattgaagggcctccttaaaatgaagaaaccagaggtggaggtcttactggtaccccgagccacacgaacctttctctgcataaatgatgtcctaagggaagacagtagagggcaaatggaggcccacagccaggcacagggatgcagaaagcagccccaagtgggaagaggccacgctcgacaagctccctctcacatggaattctgctggtgccgtgagagccgaggaagcgcagccgcagggcagaaggagaccaaggactattgaatggggtcacttctccccagtgcctgcaaggtcctcgcttttgtgtccacaccctaactgtctaatctgatttcctgcaatgtgtaaaacaaactgtcttctcttctccagtgtctcttcaactggccttatcatctccaggtcagtctcgcctttgtgcctttgcccacaaggtcctcccagtctgaaatcacctgccccttctccttctaccgacacttcgcattcttccaaagcccagatcttcctgacaactccagtttgcccccaggccccctccatggaattcacagaactcttcaagcctgtgctgccccactcatcactgaattctcatcttgcattgcttcctaaattttacttcttatcacaactaccagattatagggtccttcaaagtagagatttttaaaatatttctcttatatcctccacggcaccagcttagaaccaataaggggacaccaactacttgttgcctgcttgaatacgtcaatggcaactttcatttagtaaagcacctaaaaccggtgatttcccaaactttgtttagttacaactcaggctactgactggtacctcgtagcatatctccaaatcaaaccacctcagaagaaagattaaatttaattaaaaaatacatgttatacatcatagagcacttttgggaaatggtcattaacattggcaataggtgaaaaacacaagctagaaattccagattgaaatctacatcatttagacttcggttctgtttcttttctgaactagacaactttaaaattcatatttgcacaacttagagcatctttagatttacttcatcaaaccttgggtagtatttaaactacccatacagttgagctcagccacagtcacaagcatatgcattctctagaatatctggaaaaccaaaaagccaactattgtaacttttcatgtttcaaaaatcttgttaggactgtggtgaggggcagtgaatatcaaagcaacactcacccccccgacccccgtccccctgtaaattgattctacaccttacagcaggtagctcagagtcattacgatgtttggcctagagtaaaagctaaataaaattagaaaaatttcttttgacaccaaagaaatacttttaaggaagcaaaatccttacctgttgcagaatgccgaagaaatgtcttgacagtaaaatgactgactccggaaatcaaatttgttcaacaaaagcaggtgaaaacaaaagcggcccaagccttttcactgtggttgatttcctcataggatcaacctctccctcgttcccgagaatattaactgattcacactggaagaactgaaaatacaacagttgggctggcagggagtccaccccaagatggttgggttagtgtgtgtggggcagcaggagcaatccgaatgtgacaaaagagattagcaagttcctgtgcctaagtcaatttcctgtagccggcttctccgcagagggggtttcatttgtgtgggtttaggggggtgtgtgtgcacgtgcgtttctctccattagaatatgaaacttccccagatcagaggcagaataaggcctttgccgcaccgctgggtttgcgtttaatttatcccccaccctactccgagactatgtttctctcccccttagccccattttcctccagcaaagccctacgtaaaactgaagaaaggaagactgaagagtccaaatgattcctcatggaagtaaaattaccaaaaaaaaaaaaaaaaaaagtccatgccactgaccaatcttggttaatttgagcttaggaaacaacaccttagaactttccccccatcagcttggggaaaacaagaggtggattgtctgcttcgctttgctgcattaaaaactatcaaatattttgcaaagaacagaggcaggcttagtgagagttcgagcagccccctgccgtgcgttcacccctgtatggacgagcacctgggctgggagttacctggcgatgagttgttttttcagactcctcagagtttcattatttgcctaaaaacacaagtttacttgttttgtcctaatgggcaatccaggtgtagagaccatctgcaactacttaggttatggctaaacgcctaacccaacaaattgaacttttgtgatgtggtcacaaccgcctgtgccccaaatccctgaataactaactgttgatgctactgctcacggtgatagcttggtcaaaatacctgccgaccgtaaggataaagtcaactccatgccttttattttattttatcagtgcatcggccccacactcaaagatttgagtttaattgagctgggttgggaccggacatcaatattattttaaacccctctgattattctaaagtactgctgccactctaatggatgagaaggaggaaagaacattccacgtagaggcaaatagtatgtgcaaaggccctgaggtgggaaagaggttggcatgttcaaagaagtgaaagcagatgactgtgcttgcagcatagttgtagagggaatcaatggtacaaggtgagcattcttatcaatagacacccaattaccaagttcacaagacttccacatgaacccatgtgtcaatttgttaatgcacagtaagaactcaatctgccagctgagatcctcgagccttctgaagagcacattatctcctagaaaatcctctgtgggaggccaggtgcagtggcggtggctcacacctgtaatgccagcactttaggaggctgagcggggagcattgcttgaacctaggagttcgggaccagcctgggcaacgtagtgagatcccatctctacaaaaattagctgggcaaccacacctgtagtcccagctactcaggagtccgaggcaggaggattgcttgaacccatgaggttgaggttgcagtgagctgtgatccaccaccacactccagcctggggacacagcaagaccctgtctcgaaaaaagagagagagggacagacagaaggagggaagggaaggaaaaggaagagaaggggagggaaggaaggaaggaaggaaggaaggaaggaaggaaggaaggaaggaaggaaggaaggaaggaaaagaaagaaaggaaagaaagggaaaatcctctgtggaaagccagatcaccatggtgatgttatcagctgagcagaacataagcttgtggatattttctttatctacttctggttttgttcatcaaaggatttagagcatctggcaaaaatacttacaccttagcaaaatgaaacaattaaaaacaagaaatttgaaaatgaggccaagagaagtgaagacaaaaatgacactaaaactgggggtgaggttaattacagagaatgtatgccacgtggttctatgctcttcagcaactggtatgaagcaggaaatatcaccacacagaaagctcattgcccgcgggagaaacataaacacatagctcagaatcatgaggtcttcctggctccccagtgctgagattaaagagaaactttgccccctggattcccatagagaagacaacac

SEQ ID NO: 317286 - DNA, 4001 bp, Homo sapiens
tccccagtgctgagattaaagagaaactttgccccctggattcccatagagaagacaacacggctgaagtgaaacaccatgtttagactccacgcagccagccacaagtccgtgaggtggttccttacgctgttcctccatatatgctgattgcatctcaccgaagagtttactaaaagcaactccagggtgtgcggcagggagagtgcagcaggagattagtaagaatgtgccaccccacagcaccactttgatgttccagttttatccagagatgaaaaatgacttcatgggccgggcgcagtggctcacgcctataatccccacactttgggaggccgaggcaggcgaattgtttgagcccaggagtccaagaccagcctgagcaacatagcgacacccagtctctaaaataatactaataataacaatgacaataggccgagtgctgtggctcacgcctataatcccaaaactttgggaggccgaggagggcagatcgcttgaggtcaggagttcgagaccagcctggccaacatggtgaaaccccgtctcttctaaaaatacaaaaattagccaggcacggtagctcatgcctgtaatcccagctactcgagaggctgaggcaggataattgcttgaacccagtaggcagaggttgtagtgaggcaagatcataccactgcactccagcctgggcaacagagtgagacgtcagcctaaaaaataataataataataataataaagaaaaatgacttcagatatgcttcagaaaattcaggataaaaagtttctctcatccaagtttctaaaagatttaaagaggcaaagagttcaaaattggttgcccctccaacaggagatccagtgtcctttaagggggacaatgtctccccttcagaaagcagaggagtcagacaaggacagctgcctgtatggacagatcccctccatctcctaagtagaaggggagatgaggctctgccctttgggaaacaaagcaagaaacgccaccagcatgatttataacgagctccaggcctcaggccttgtaccattttctgcacgaaagtggagacgtactccagagtcaggatggactgggtgtgtcccaccccatcctggaaaggactaggaagggcattgtcatacctggctgcgagacccctgtccctttcaccccctggctgaccacccttctgcttctgaagaactggttttctgtgcctggaattgccagttttagatgatctggtacagtccagcgttgggcttcctcctgctcctgacctacacgcctctaatcttcacacagtttaatctcagagaggattttcttagggggaggggacagggggttgccatctaattttcttccttccttgaaaatgtctttttggtgtttctctctttctctctccccactcccctcctcccccaccccgcccctcctctcctctctctctctctctctctctctctctcgctctcattcttttaacagacttttaaccgacaggggtagtggtgaggggaggaagcaaacgctgaaaatacatgcaaacattcacagacatacacgcacccaagccccagggcgtgtcccttctgacgctgtgcagtctgtccttgggatggggttgggagaaatcctggggacttcagagtggcaggaggagggaaaccatgggtccacagttcgtaactgggaatcagagcccccctctgagccatcttccaggaagccatctgtagccaccacccacctccattgcaagcccagtgaggtgccctcccaagggctccatagcacgtcgtgttaacacggccagagcactcaccaaatggccctgcagtgttcacttcagaggtcccagggctcagggtccagccttgcccactcagaaatccaaggtactgaacaaccactttctgaccaataaatagattgattctcccatctcacagcctcacagctgccctttatggtaaacactttaaaccctattttaacagccaaggaaacagagacttcagctggttaaatgatttgcataagaccctatggcctaagaaaaccagaaccaagattcaccccattcatctgtcctggctgtcactcccgctgcctccccacagagagaactgaaccaccgtgggcaacgaggagcagccagagccccaaggcccattttcttggccctaaacatgccccctccaggattccctgtgcaaacggtccccttcaggtcaaggtgaaaaagcaaagacttactttctcaaaaccaccttcatcagaaatgttctctgatatggcaaaagaacagcttactttaatattctcctgtgaacaaagacctcttttattgaggttttttaaataatatgacaactacttgtgtaccctgaactcatgcataagtactatgtttgctcattgcaaaggtgttgtgccacttacgccagcgaaaactcttaatgacaattgtaattgtatgaatagtaaatcttagaaaccttgagacttgagtcatctactaaattatttcaacgctgggttagtaagatgcctttccctcccccttgctattagcatattaacagaaatgatgtagattcagtgggtagcttttaatgtttacacagaccctcatttatgccacctaataaaatatttcagtgagttgtgaagataggtaatatgtactaaaaccttgtctgaaggctttgaatttcaaactcaggccattagtcgtattgcaattattctcacccagctccccactggatgatgaacaactgtattaaaacaaaatatcctttctttctgattgagagatttcatgatgggaactataaaatgttaagagaatgatcttaattctgatgtaacttttagtgtaaaaatacattcatataaaatactttttaaatgctgaatattgaaatagcttcaaaatgccacaggctagaaatctcatgggtgatttcctctttatgcattttaattcattattaaaaaaaaaaaaccagcctccctaaccaggtaatagcatttgaaacatcttctagcttccctcttattgccataaccataaaaacatcatttcccctgctgttattctcatcatttattttctctttaaatatgttaatgtatcataacatattgctttttgtttcagtgaatattcggttctcaggattctcagctgccatgtttattctggtttgtttgccctggattactgtattgatctagcaaacattcacatcctggttcgttttattgcagagccataattcataagaagacagagtcttgttgcggaagatgatagcacccaaagtaataattcaagctgtggctctaaagttatgatacaactttttctaaaaagtctgtcagagcagagcaaatgtagtcaaatgaccgtttcccttcaaagcagtccctcgatagttgatgcgcttttgcaacatcacagacatgagtcaaagtgcatttagaccctttttacaatatccttgagagacagcttaataaactacaaaacaaaaccagtatctgcattctgttcacaacttgtttttgactcaaaatagtatatggctttttaacccaccttattcactggatgtagctccgaatggctgtctcctaaaatcaaatccactctaaaaggaaaaagattttgcaatcattgacaaagtttttaaagattgtgcggcaggctctgagagtgagtccagaggaggagtttaaaatgtagtgttagtaagagcagtatctttgggtcaagggcccgagctcctagggaatgactgcaaagcacaggacatgcacagtgatgtagaaattcatcagcgtgaagagtgaagaagaaggtgatcactgcttcttctcaaactcatgtcttactcgttgcattgatagggatcttcagtttgagcacaaacatcacagggtaactgcaacccagcacatctgctcacag

SEQ ID NO: 317287 - DNA, 4001 bp, Homo sapiens
tctcccatctcacagcctcacagctgccctttatggtaaacactttaaaccctattttaacagccaaggaaacagagacttcagctggttaaatgatttgcataagaccctatggcctaagaaaaccagaaccaagattcaccccattcatctgtcctggctgtcactcccgctgcctccccacagagagaactgaaccaccgtgggcaacgaggagcagccagagccccaaggcccattttcttggccctaaacatgccccctccaggattccctgtgcaaacggtccccttcaggtcaaggtgaaaaagcaaagacttactttctcaaaaccaccttcatcagaaatgttctctgatatggcaaaagaacagcttactttaatattctcctgtgaacaaagacctcttttattgaggttttttaaataatatgacaactacttgtgtaccctgaactcatgcataagtactatgtttgctcattgcaaaggtgttgtgccacttacgccagcgaaaactcttaatgacaattgtaattgtatgaatagtaaatcttagaaaccttgagacttgagtcatctactaaattatttcaacgctgggttagtaagatgcctttccctcccccttgctattagcatattaacagaaatgatgtagattcagtgggtagcttttaatgtttacacagaccctcatttatgccacctaataaaatatttcagtgagttgtgaagataggtaatatgtactaaaaccttgtctgaaggctttgaatttcaaactcaggccattagtcgtattgcaattattctcacccagctccccactggatgatgaacaactgtattaaaacaaaatatcctttctttctgattgagagatttcatgatgggaactataaaatgttaagagaatgatcttaattctgatgtaacttttagtgtaaaaatacattcatataaaatactttttaaatgctgaatattgaaatagcttcaaaatgccacaggctagaaatctcatgggtgatttcctctttatgcattttaattcattattaaaaaaaaaaaaccagcctccctaaccaggtaatagcatttgaaacatcttctagcttccctcttattgccataaccataaaaacatcatttcccctgctgttattctcatcatttattttctctttaaatatgttaatgtatcataacatattgctttttgtttcagtgaatattcggttctcaggattctcagctgccatgtttattctggtttgtttgccctggattactgtattgatctagcaaacattcacatcctggttcgttttattgcagagccataattcataagaagacagagtcttgttgcggaagatgatagcacccaaagtaataattcaagctgtggctctaaagttatgatacaactttttctaaaaagtctgtcagagcagagcaaatgtagtcaaatgaccgtttcccttcaaagcagtccctcgatagttgatgcgcttttgcaacatcacagacatgagtcaaagtgcatttagaccctttttacaatatccttgagagacagcttaataaactacaaaacaaaaccagtatctgcattctgttcacaacttgtttttgactcaaaatagtatatggctttttaacccaccttattcactggatgtagctccgaatggctgtctcctaaaatcaaatccactctaaaaggaaaaagattttgcaatcattgacaaagtttttaaagattgtgcggcaggctctgagagtgagtccagaggaggagtttaaaatgtagtgttagtaagagcagtatctttgggtcaagggcccgagctcctagggaatgactgcaaagcacaggacatgcacagtgatgtagaaattcatcagcgtgaagagtgaagaagaaggtgatcactgcttcttctcaaactcatgtcttactcgttgcattgatagggatcttcagtttgagcacaaacatcacagggtaactgcaacccagcacatctgctcacagcgggcgttgcaaacatttcagttgtaaggcagggcagaccgagtgttaatttgccatcttttcaaagtaacagatctcctcactgttctggagggaacaggttgaagcttaaactgaaaggcaatctgaaattttggagaaagtatacatttggattcagacaaagcaagattcgaatcccggctccacttattactaaggatgaggccccgatctacccaactgcaaaacaggtataatatctagcttggaagagttctatttaaaaaaaaaaaaaaaaaacctgactcatgcttggaatacagtgaatgctcaatacacagtggctgttattagccactcctcttttggatttttgctttctggagtttttttccccctccatccgtaccccctctttaaataacaactgttgaattgaaaaatttgagaagctttggcagggcccaaattcacgtggaataaagtcacagaaactcacacatcactcagaggattctaatgtcatgtgtttattgtcacaatgagttaaaaggacacagaaaatttaaaatcaaattgttaatgacattttattccttatgcataatctgagcaatgcagaatcttcagaggtgcctcctgaagccatctggttgccccgttacaaatgccctaagataaatgagaatttatcctttcattcaacaaatatttactgaacacttgctataatacttattgagcactcggctaggtgccagggagacagcagcgaacaacaagaacagaaatagcctgctcgcctgagtttatatctacgtattaggaagacaagcaatgaatatgaaactctagtagtagaatatgttacagtgagctaattactaagaagaaaagcaaagtaaggaagggggatagaaaacttggagggtgcatatttaaaaaggatggtcaggaaagtccttcatagaaagacgaaaaatgtaaagtcttttaaaaaatatcctaaagccattttaatgttcaatggtcttattttatgtttgtgtgtgtgtgtgtgtgtatgtgtctgtgtgtgtgtgtgtgtttgagacagactctcccctctccccatgtcgcccaggctggagtgcagcagcacaatctctgctcactgcaacctccacctcccgggttcaagcgattctcctgcctcagcctcctaagtagctgggattacaggggcctaccaccatgcccagctaatttttgtatttttagtagagatggggtttcagcatgtaggccagactggtctcaaactcctgaccttaggtgatctgcccccctcagcctcccagagtgctgggattacaggcgtgagccaccgcgcctcgccataatgttcaatggtctttatcatcggcgtaaatccgtaggtttaatgatcatcaggtatcaccaagtcctggctcctccttgctgatgcacagtccgcttcctattctgcccatacctgcgagcgggagaagctgatcacgcagctttactcgggggccaagttggtgctcatctctcagccccattcctccacttcactgctcagtcctccacccttctgagtcctttctgagtctcttctctgaatctttgaaagtcttttccatcacagactgccatggagagagaactataaccagagccaagtacctagtggaaaattccagggttgtagggttgtaggagctttttcaagacgcagcaccaccatgctgctttcttcttcagcttgttattctctgctcccttgatggtgttttgttttgttttgttttgttttgttttgttttgttttgtgtttgagacagagtcccgctctggcgccaggctggagtgcagtggcgcaatcgtggctcactgcaacctccccctcccaggttcaagcgattctcttgcctcagcctcctgagtagctggaattaaaggcacacacca

SEQ ID NO: 317288 - DNA, 4001 bp, Homo sapiens
acgtagtgagatcccatctctacaaaaattagctgggcaaccacacctgtagtcccagctactcaggagtccgaggcaggaggattgcttgaacccatgaggttgaggttgcagtgagctgtgatccaccaccacactccagcctggggacacagcaagaccctgtctcgaaaaaagagagagagggacagacagaaggagggaagggaaggaaaaggaagagaaggggagggaaggaaggaaggaaggaaggaaggaaggaaggaaggaaggaaggaaggaaggaaggaaggaaaagaaagaaaggaaagaaagggaaaatcctctgtggaaagccagatcaccatggtgatgttatcagctgagcagaacataagcttgtggatattttctttatctacttctggttttgttcatcaaaggatttagagcatctggcaaaaatacttacaccttagcaaaatgaaacaattaaaaacaagaaatttgaaaatgaggccaagagaagtgaagacaaaaatgacactaaaactgggggtgaggttaattacagagaatgtatgccacgtggttctatgctcttcagcaactggtatgaagcaggaaatatcaccacacagaaagctcattgcccgcgggagaaacataaacacatagctcagaatcatgaggtcttcctggctccccagtgctgagattaaagagaaactttgccccctggattcccatagagaagacaacacggctgaagtgaaacaccatgtttagactccacgcagccagccacaagtccgtgaggtggttccttacgctgttcctccatatatgctgattgcatctcaccgaagagtttactaaaagcaactccagggtgtgcggcagggagagtgcagcaggagattagtaagaatgtgccaccccacagcaccactttgatgttccagttttatccagagatgaaaaatgacttcatgggccgggcgcagtggctcacgcctataatccccacactttgggaggccgaggcaggcgaattgtttgagcccaggagtccaagaccagcctgagcaacatagcgacacccagtctctaaaataatactaataataacaatgacaataggccgagtgctgtggctcacgcctataatcccaaaactttgggaggccgaggagggcagatcgcttgaggtcaggagttcgagaccagcctggccaacatggtgaaaccccgtctcttctaaaaatacaaaaattagccaggcacggtagctcatgcctgtaatcccagctactcgagaggctgaggcaggataattgcttgaacccagtaggcagaggttgtagtgaggcaagatcataccactgcactccagcctgggcaacagagtgagacgtcagcctaaaaaataataataataataataataaagaaaaatgacttcagatatgcttcagaaaattcaggataaaaagtttctctcatccaagtttctaaaagatttaaagaggcaaagagttcaaaattggttgcccctccaacaggagatccagtgtcctttaagggggacaatgtctccccttcagaaagcagaggagtcagacaaggacagctgcctgtatggacagatcccctccatctcctaagtagaaggggagatgaggctctgccctttgggaaacaaagcaagaaacgccaccagcatgatttataacgagctccaggcctcaggccttgtaccattttctgcacgaaagtggagacgtactccagagtcaggatggactgggtgtgtcccaccccatcctggaaaggactaggaagggcattgtcatacctggctgcgagacccctgtccctttcaccccctggctgaccacccttctgcttctgaagaactggttttctgtgcctggaattgccagttttagatgatctggtacagtccagcgttgggcttcctcctgctcctgacctacacgcctctaatcttcacacagtttaatctcagagaggattttcttagggggaggggacagggggttgccatctaattttcttccttccttgaaaatgtctttttggtgtttctctctttctctctccccactcccctcctcccccaccccgcccctcctctcctctctctctctctctctctctctctctcgctctcattcttttaacagacttttaaccgacaggggtagtggtgaggggaggaagcaaacgctgaaaatacatgcaaacattcacagacatacacgcacccaagccccagggcgtgtcccttctgacgctgtgcagtctgtccttgggatggggttgggagaaatcctggggacttcagagtggcaggaggagggaaaccatgggtccacagttcgtaactgggaatcagagcccccctctgagccatcttccaggaagccatctgtagccaccacccacctccattgcaagcccagtgaggtgccctcccaagggctccatagcacgtcgtgttaacacggccagagcactcaccaaatggccctgcagtgttcacttcagaggtcccagggctcagggtccagccttgcccactcagaaatccaaggtactgaacaaccactttctgaccaataaatagattgattctcccatctcacagcctcacagctgccctttatggtaaacactttaaaccctattttaacagccaaggaaacagagacttcagctggttaaatgatttgcataagaccctatggcctaagaaaaccagaaccaagattcaccccattcatctgtcctggctgtcactcccgctgcctccccacagagagaactgaaccaccgtgggcaacgaggagcagccagagccccaaggcccattttcttggccctaaacatgccccctccaggattccctgtgcaaacggtccccttcaggtcaaggtgaaaaagcaaagacttactttctcaaaaccaccttcatcagaaatgttctctgatatggcaaaagaacagcttactttaatattctcctgtgaacaaagacctcttttattgaggttttttaaataatatgacaactacttgtgtaccctgaactcatgcataagtactatgtttgctcattgcaaaggtgttgtgccacttacgccagcgaaaactcttaatgacaattgtaattgtatgaatagtaaatcttagaaaccttgagacttgagtcatctactaaattatttcaacgctgggttagtaagatgcctttccctcccccttgctattagcatattaacagaaatgatgtagattcagtgggtagcttttaatgtttacacagaccctcatttatgccacctaataaaatatttcagtgagttgtgaagataggtaatatgtactaaaaccttgtctgaaggctttgaatttcaaactcaggccattagtcgtattgcaattattctcacccagctccccactggatgatgaacaactgtattaaaacaaaatatcctttctttctgattgagagatttcatgatgggaactataaaatgttaagagaatgatcttaattctgatgtaacttttagtgtaaaaatacattcatataaaatactttttaaatgctgaatattgaaatagcttcaaaatgccacaggctagaaatctcatgggtgatttcctctttatgcattttaattcattattaaaaaaaaaaaaccagcctccctaaccaggtaatagcatttgaaacatcttctagcttccctcttattgccataaccataaaaacatcatttcccctgctgttattctcatcatttattttctctttaaatatgttaatgtatcataacatattgctttttgtttcagtgaatattcggttctcaggattctcagctgccatgtttattctggtttgtttgccctggattactgtattgatctagcaaacattcacatcctggttcgttttattgcagagccataattcataagaagac

SEQ ID NO: 317289 - DNA, 4001 bp, Homo sapiens
ttttttggggggagggtgttcctaccaccagggaaacattgcttatgtcaggcatatgcggtattgagttttgggacagtaatgcatttctagtcctggtacctgcgatcattaacaaaagcttattctctctagtctgaaatcccttcattctagccagaaagaaaaccttcagcatatttaacctcccaatcaggcaaaggataatgcaataattagaaaagtagttataactttagggccatcacactcttcttggcttgttgaggattgttattatttaccatcgtggccacctgtcagtttctctggatgacagcctggcagagcatagtacttttaatatgattaatgaagtgcgtaaacccaaaaggggaaactctcccaagtgcaagttcgcggtggtgagctgccagcaggtaaccctacccctctcctgatatagcgcctgcatcagggtatacctgatgcacagacccaagggcagtgctgtggtatcagatctactggttccaaacaggtgctgggccggtcactaaccaagaacagtatctgagccctaccctccaaaccccaccttccaggtccccctcggaaaagttagcccgccacgttgaacccctgtccaagcggcgctatgccaagctctccggcagcctctcccctacccaatacagttaatcttctcctctttgtaaaccccccaagtgacgcggagcaaaacttaatcggtccagggaacccagacacgtcttccgcgccgcacggacttcccagaaggagcctggaggcaggcgctggatccctctaggcacctccgtccccgccggctcccctcccccgcgcccgctgggccactcacccgcgtggggcatggtgatggtctcgttggtgttggagcccacgttgaagatgaccacggctgaggcgttctgcaggaacgcgttccggatcttatccctgtacgtgcagttgcccttggggatgagggctatccagttcttgccgcgggtcggggcggcgaacttggtgttggggtcgcaggccaggcggtcgtgggccgagctggccatgaccacctccccgcgggcgtcctgcttgggcgagtgctctccgtagcgcccgcactccgtcttctccgtgtgcagctccgcgccgccgccgcccgccgccccggccccggggtccggcgcgggctcggcgtaggtgatgttcacgaaggcggtgtaccattcctccttctcggccacggtaaagtccaggcagagcagatgcacgaaacaaaaggaaagcagccatgttgagagagccagactgcagcacgcttggatgagagacattgccatctttatccgccggggccccctccccgcccccgcgccctccctccgtcccgtccctcctccccagccccggccaaccccgggccgctgcctctcctcctgctgctgctcactcccgggccggaggggccgcggccgggacgcgcagccgccgcggggaccggattccgggcgagcggatggcgctggccccttcccctctcagctgtagcgcggtggttgcattttgcttcttgggcgcccggggggcgcgggaacagagggcccgcggggcttgcggaggagtcctgctgccgagcgtcctgctccttcgcccggcttcgccttctctcataagggtggccgggggcccacgaacttgcagggtggcggccctgcgccctccagccccggcggggacgggcacgattgctcgtagtctggggtgctgcggtgcggggtgctgcccagggtgtcccggccgccgccactgagcgctggggcgcgcgaatccagctgcagccgctgctgccctgcgccggttccctcaggctgcgggcgctgcgctcctgatctcgccggtggctgcgcctgggcacgcacttgccgcgggcggggcgggcttggggacagtgggagcgagcaggcagagcggagtaagcggtccgtgtgtgtgtgtctgtatgtttgtgtgtgtgtgtgtgtgtgtgtataatgtgtgcgtgcaaggaggagcttagtgtgatgtcaaagcccctgggattctcttgccatgttcccttggtctctctttatgggcagcagcgacccctgtcgggtctcaaattcaacctcaatcggcgacttaatctaggtggaggtaaagaggaagcgacccctcgacctttgagtacgggaataacttcctgagcgttacatttagcaaatgtatgtgcctctcgtaaacgaccctcccgtttgctggaagtactgccgtgagctccctgattacctgtcctaaggccaaagtgtaaggtggtttggtattgaggtccttccaaagctacctctggaatacctagggcagtggctatcaaatctttagttttaaaactcagaccgatgggtcctgccacaaagtttctggttcagtagatctgtggtagggccccaaaaatatgcatttctaacaagttcccaggtggtgctgatgctgctggtctaacaaccattctgttaagatgggtataacaatgggcttcctactgcccacctggaagcaaacatctaacattcgttttcttatagaataggtgttttgtcactctgtaagaagagaaaccgggtgagacatttctggactgtgtttattctgattgtcatggctgggaacaggggactcgcagcaccaacaggcaagggaggtttgtttgggttattgtttatagtgcgctctccaactgtgcatagagattacagtagtcagcagacagtacagtccccctagtgtagtgttcttaaaactgtagtacagcagagtgccttaccaattagacgttttggtggtggatatcctttcccttggcttgagatgcctgccatatagtctctaaaaatatttgtttgatggttctctatcatttacattgtgtttcccacctgatgctctttcagagaacccaggacccattcatgatttaaatttaaaaaatgaaaggctgccttttccccaggactttagcatgtttacagctcttcgttaatgaacgtccaccagtacaacttctctttttccggcagcagtacaaacagctgatggctgttaagggagggcaaagagcctcagctgtacccaaattagaagcaggcacaagaagaactacttagaagaatttgtctctatggcatttgatgtgctgaatttgtatgtgttcctagcttattcattttagaaaataggcttctaggcaattgggacagtgctttttatagcgcttactgccaaggaggcaaaagtggagacacctggctgctggttcctgaaccaccagagatctgagggaggagtccactgctagaaacccccggctaggttctgagcagttgcctttagcaacccacagtgtttccccagtcttctttatcgcttagcattttttttctccagctggaagacttggagaagctatgttattaagaatgtgtgactatcccttaccccttctttcctttggaaaagttaggtgctaaagagatgacagggtcaaggaaatagcatggctggaagattgcttaattacagggccattgggctaataagtaaaacactgagtaaaataggagcgaggtttcttactgttggagaaggaatttacaaatatggaaagaaagagagctgtaaataaccttgaggctttagggtggattaacaatgagtatgaaataatttttcaaaaactatatgtatatatatttatgtgtgtgcacacatatataccatagctctctccattcagaggccaaaagcaaaaggcacatccagtggccagaagatcttcgtttctaaatagcatcctccacgaaaagcaagctggctgattatagggctgacactgggaaagtacagagtgagcccataacctcttgaaaggaaatgctccaagcatgatgggagtatgtcaaaaagacagaagagccagc

SEQ ID NO: 317290 - DNA, 4001 bp, Homo sapiens
ttcttgaactttgatgtgcaaatgaatcaccctgggatctggttaaaatgcggatttcaattcagtgggtctggcgtgggaactgagactgcatttttaacaggctcccaggtaatgccttggctgctggttcctggaccacactgtcttgccatatgggattaagggaaaagctgtgagtccctcctagggcagcctcaacagagaggccatacctcctgagggcagcagactaggcagtgatgccagccttaaggaagagcaaagatcagcagcaaatccaccagtactagatcctctgacactcctggcatgcattcatcaattcagaacctccctttcgataatctgggtttgaaaccagcaagaaagtcatggagtttcattttaagtttccccattttgtggtacacaagcccctccacagcctagcccacccttattttttgctataagcattcctgacccctaggtttctggcagtcagagtggacagtcccctctctctgccttgtcccatggccatccatcccaatattaaaaaaaaaaaaatctccaagccatttggtactgttgttccctccatctagaattctctggcccatgaggtcagatcctgtccattccccaacacccagctcgaatgccacgccctcacgggttggaggagaagggggttagtcaggagcaagcccttctcagaaatcctacagttctttgcctgaacctattttgggacattaatctcttcctacccgctctgtgagtgatttttgttgttgtttaagagttatctttgcccttaagagttatttttgtcctcgttttacggatgggatttgggttcctccaggtaagacctaccctcctccacccccaaatcctcctggtacctggatgtagcctaagaagaattgtcctatgaacgaagaataaattaagattgggtttgcaattgacgccagcagaagcagaaatgggctaggttgagcaccaggcaagacaagctgacgatcagggtacacatcttgaatcagaaaccctgggcacagaccagcagtctgcgtggtaacaggccctccgagtgattctgatgacactcgagtttgagaaccagggcggtctagccaaaagcctgcagtacaccccttcccctctctcgcagcttacgaccttgaccctgggctctgggggcttccgccgaggagggaggagggcacaggcggtcacaaaggagggcgggagtggaaggggtgagcctggaagagaaagtgcgaggatgcgagaagagggatggagcgaaggaagaggatcagaaggaggaaaggaaggtagcggggagggcacagaagtggggagggagggagtggaggagggactggcaccccgcacggtggcatcttccagaaggtcatgcgtccgtccccacgtctttccagggccggttctccccggtggggcccggggtcttggagaccagtctgtgcagcctgcccggcaccagcgtgagccccgggaccccggcctggcgtcccccacgcccgcgcccccgcgccagtacctgctcctgctgcgggggggcctccagcaccggcgctgccttccgcgccgccgtccccgcggccatgcctgagccactgtgccttctccagggcacagcgcctgccggggagggtcccgcagagtccgcagaaggaggcgccgcggggcctcgggagccgagggtgagagccggatctgcggcggcggcggagcggcggccctgcccgggttgtgcggggcgggagatgggagcctcccggcacgccccgcctccgccccctgcacgctggccagcgtcctccccagcagcggcctcgaggtcccggtcgccagcaccccggttccttcagaacctcaggcctcccattcagccagccattgtcgccgataaagcgtcttgagccctaccgggtgcgtgtggcgggaaccccggttttgttaccgggcggcaggactggaggaggggtcagaggtgggtagggagagagaggggagtagaggagtgagaaatggcggtgggggggcgaggggtgctggggaggaagagaagagagagagagagtttcctctccctcagaggtgtttattaggaggcaggagttcgggtggctgtgcagatacagactttcctcagttatctgtgcttcctccaaagatgatgaaggagagaaactccaatctagggagagcgcagaccatcttggcccctatgctgctccaggccatgcagggcccctgcgacgcaagcatcttgcctttgcccctctacctccagggtctcccctcccgcctttacaacttaggcctaagcctggcttcaaggttgagaacaagctggaacgtttaggcaagcctttagaaatacctgggtgttgatttggggaaacagaaaagaggagcacagaattagatgatgtgtcctacgaaatacagcttacccctttccagtttgtgatggctcgtatttgtcaacacctacaaaggaggtgaacagaccaagatggacatttctctgccattgtggaacgtagagcctaacaggggatagagaaaaataagcatctaagtacaatttatcacggatggtgccttggttttccagccttaactgggcatcagaatcctatggaggaatgctgagtttgttaaaactcagagtgctggccaagcacagtggctgatgcctttaatcccagcactttgggaggacagggcgggcggattgcttgaacctaggagtttgagaccagcctaggcaacatggtgaagccccatctctataaaatatacaaaagtgagctgggcgtggtacacctgtagccccagctactcaggaggttgaggctggaggatcgccggagcccgggaggttcaggctgcagtaagccgtgatggaaccactgcacttctgcctggacaacagagcgagactctatcaaaaaacaaaacaaaaatcttcagattgctggagttgagccctagagtttttaatatagtaggtctagggtggagcctgagcatttgtcttttgaacaagttttcaggtgccgctggggctgttacctacatctgaagactaccttgtagcatgatcagagtgtgttggaaagagtgtctgagatggagagaacagtggatgcaagggccggaatgctggagaaggcataatgaattggagaaataaaaatcatggttaacattgatagaatgcttaccgtgtgccaggtgccgtcctgagcactctacctgtgttagctcattcagtcttcctgacaatcctgtgaggtgggcattgtgaccgtccgtgttttacacgggagaacactgaagcacagagaggtccagaagtttgttcaagttttgaagctaataggtggggcagtgggaatttgaacccagacaaaactgacttcatggtctgggttcttaatctctcaaggaagtagctgcgaaggtcagcaagggccagatccacataaatcatattaaacagtttggactgtagcctcaggagaatgagaagccattaccgagttttaagcaagaaaatgacattaccagacttgccttttggcttcaagagtggggaagagggctatgactatgactcaagacagagagaccagccagaaagctattgctgtagtttcagctctaaggatgacagtggccttggtggtgagagtgtgtgcggggacagagtggaggggagatggagagatgtgtttggggatgggagatctaggtaatagaatctactgtacttgactcatctccaaggatggtgcccaggcatgtggcttgggcagtctagcatttgggcagacagtgctgccattgctgagaatgggaacattgaaagagcagcagatttggggacacaaaaatagtgggttcatttggacatgttacttctctacctatcttgtggcctgccttcatgtggcaagagccatttt

SEQ ID NO: 317291 - DNA, 4001 bp, Homo sapiens
gctgaatctacctaacttctcctgaacctatcacttctccccatcacctctcatgtgctcagctgcagtctctcccacagtttctatctccctccaatctacttttcacctcgctgcccgagacacttttgtttttaaatacacacctgaaatcaacaactccactcccaggttacacacccaacagaaatgtgtacctaagatcaccgaagacaggagcaagaagattcacagtagcattatttctgcagccaaatctgcaaacaacccaaagggccatggacagtggaaacgatgagtaacttggggtgtatccatacaatggaacaccacacaacaatgaaagtagatgaactacagttacatacaaatacaatgataaactttgctaatcccacatttcgggaggccaaggccggtgattgttagaggacaggaattggagaccatcctgggcaacaaagggaccccatctctgtgaaaaattaaaaaaatcaggggtgcgtggctgcacatgcctgtagccccgctaccctggaggctgaggtaggagaatcacttgagcctgggaggcggaggctgcagtaaaccgagatcccgccaccgaactccagcctgggcgacaaagctgagctctgccttgaaagaggcaaagagaaggaagggagaaaaaggaagaaagatggggagccacagaaagcggctttgctgtagggctggttgtagggctgcattcactaaggctccatgggtctaaggccaactccgaggatggaggtcagcacagctggcgtcccctggggctggagggctgtgagccaccggcacccagctggctgctttcacggggaagttcgcttggtaaaagctcactgtgtttttgcttttgttcttgcataaacatcagttcaacacaaaattttcacagaaagaaaaacgcctccctgacaatgcgactgtccacttgacaccagggccccgcgctgcccatggaatagggccagagtcctccactggcgttaaggttgccgcctgcccgcttctcccccaggtcctccaggcggacccgcagcctgcaagccagagcccccgactgacaggactcgtggcccgacccctgtgtccccctcatcttgcatcccgctccccccggcggcccctcccctccacggccccttcctgcctgcggaccctcccccacgccctcctcccctggcgtctcccctccccccatctcctcggtatcccccttcccccccaagccttgaccccccacatcccccaccttgcccccctcctctggcgtccccttcctccctgcagccccccaccacctccggcgtcccctctttccccaccctcccgcagcccctcactcccccgctccctccccaccgcttctccagtgtccccctctccccacgggcccctcatcacgcccgcggcccccactccccggtggcccctcctccgaatacccctacctccgcggcctctcacccccccatgccccccccgctccatgcgccgtttctccccctcggccccccacgcgcccccgcggcccctccaccccaggtccccctcccctcagagttcccctgctcctcgcggcctctcccctggcatccccctccccctgccccctcccccttctccacgcgccctctctcctccgcagccccccacgtgcccccatggccctcccacccaagtcccccatcccccggagttccctgacccccttgccgctcccctcccctctccagcctgcgttcgggaagccctgacctttgccgaggcaggcgtcgcagtacacgtgcccgcagttggtgaggctgaagcacgacgtcctgtggggcggctggaagcagcgattacagaacacccagttggccatgccaggcgggcgaccgcagcggcgaggccgggcccacgcgaagcccacgcaaggttgggaccagcctccccgcgcagggcccgaaggcgggcagctctgcgcctgcgcaaagtcgacggcagccctgcgcccgcgcactggagctcgcgccctcccgccaacctcgcgggttctcccgcagcacctgggagggcgcgtgtgactcgtctcccaggtcgtttgggctggagtaggcggaggaacgcaccgcgagcaccaacgtcccgcccctgtcttggcggtcctcaggtgttttgtggaagccgggcctgggtggcgggcgcggggaatggcggctgcgctgaggaggcgtcgcggcgcgacagcagtgggggagggggagggggagcgccgagggcgggggatgcgggccaggcccaccttgagggccgggagctgggccggaggccagggcggccagggtagtgcgctgggcgaggcaggggaggagtaggggagagtgggcgtgggggccctgggggcccggggagcgggataggagggagggagggataagtgggtgtgggagttggggtgggagcgggagtggggatgtgggagttggggtgggtgtgggggcgtgaggcggtgggggtggggtgtgatgaggcggtgggggtggggggggcagttgggggtgggggccaggccgcgctgcacgctttgggactagtgtccaggtggccgctggcgcagagacctcagcacgggaggcctgagcctgcttccctctgaaacggaaggcgtagctcgggaaggacctctgctgcttccaggttccagcatggggaagtgactttttataaaattgtcctctgcgtggttttgagagtttccacccgctgggacgctgcaaagctcggatcgagaggctcaggcaagtgcttgtgccgggagagcgcagggtgagcgctcccggtagctacgggccaagtgacccctgcgccccgaaagatgtgagtaaaatacagctgtttccagggcctcgtatgaaaaccttcttagtaattttatattgattacatgttaacatgatatttttgatatattaggttaaatatatatcagtagcgttgattttaccctttcaaaaaatccttttcaatgtggagactagaaaacttagaattacgtatgggctgggtgcggtagctcacgcctgtaatcccagctactccggaggctgaggcaggagaatcgcttgaacgaggcggaggttgcagtgagccgaaatcacaccactgcactccagcctgggcaacagagtgagacttcgtctcaacaacaacaacagcaaattagaattatgtatgtagcccacttttatttctgttagacagtgctgatctctaccaagtttaaaatagcaagaccagcaacgtggcaaaaccccgtctctacaaaaaatacaaaaattagctgggtgtggtggtgggcccctggggtcccagctactcgggaggctgaggtgggaggattgcttgggccctggagatcgagcctgtggtgagcctgacggcacctgtgcagcagagcgagactcagtctcaaaaataagtttaagaataggatgaggtgcctaatctatcaaattcagaagctgcattataaaagcattctctcaatgttataatgatataacgttaatctcaatctctggtatctttgaaatcataaaaataatacacatatatgcaggtattttgatttattaactcaaacattatgcagattatttgtccttattgataatattttaaacaatcttcttagctataaagaagtctttcaggtacttcatttggaaaattccgactgagataaagattaatatttgtgcaaaagcccaccataaaacattgctatttgtatcttcactggtcgttcgaaaattttcttcacggtcctatgcggaaaagaagtaggtttagtgtcataaagtacttaactcacgattttgaggggagggttgttgtgggcattcaaggtatttaatattacccaattaatatcttacaccaacgtatccgtgcagtctgcttttctaaaccagaatctgttg

SEQ ID NO: 317292 - DNA, 4001 bp, Homo sapiens
ttcaatattgtgtctcaaggaattgagaggcctgaggagagagactgggaactgccagtcagtggagctgttagtacacacccaacttttaccaattaagttcactgtcttatatgagtgctattcatggtaacccaaaacattgatcacaggtcactataacagatgtaacaatgaaaaggtttggggctgggcatggtggctcatgcctgtaatcccagcactttgggaggccgaggcaggcggatcacttgaggtcaggcgttcgagaccagcctggccaatatggtgaaaccccgtctccactaaaaatacaaaaattaactgggtgtggtagtacatgcctgtaatcccagctactccggaggctgaggcaggagaatcacttgagcccagatggcagaggttacagtgagaccgagaacacgccagtgcactgcatcctgggtgacagagtgagattccacctcaaaaaaaaaaaaaaaaaaaaagtgtgaaatattgtgaattacccaaacgtgacacaagagacacaaagtgagcacatgctgttggaaaaatggctggcatttacagacttgctcgatgaatccttgctataaaccttcaccttgcaaaaaaaaaaaggcagtatttgcaaaacacaataaaatgagttatctcttattccctccatcctcacccagctacaggaggaccacgactgtttactgctgtattccaagcagaaaggttggcatacaggagacctcaaaaatacgctactttgatcttgaggagagtgaaaaatcttactcattttatgtacaaagcacagatgtgcatacattatataaaaagaaatagtttacgtatggcattaagatttcatgaagattagaaaaacaatgtttacaaaaggtccttacaaaggtagtaattcaagaaaagatcaataaacgatgtgttaaagtaagatttttggaagctcaaattcaggcaatacaaaagccagcaatatatcttgctactcgaatgcctctatttcacctcaaactcacagataaaactgaacccaatatgtccttgtccattaaaaagcaaatcaccaagaaagtaacaaaagattcccttcaatgtctcttttattgacagtggtcccaaaactcctggtcaatgaattcaaaacccaaatcttgcaggtaggacttaacctcatctgctgccaaatagctggctatgtgaccttgggcagaccacttcacttttctggacctcagtctccccagtcagttggacagtctaagccaggctccagagctgagaccctacgtctggctcaagaacttggtgcagaaacagaacgaagattattaagtttgtgaacgtctatgggaactgacaagtgaaagacaaaagctgaaatccctaccaaaacggcttgcccaagctctatccttttccctcttccctcgatggatcaaaggcggaaaagcggtgtttactagcaactctgtttcgggtcgtgagaatcttcatacacctgtctataggcgcgccagagcggtgaagggcccgagcggtgcagggctgggccgcaagcctcacagtcgcacgttccaccaaccaccagccggggcccggaagcgcgcccggaaatcgaggccctactaagttttagactgcgacctcggcgcccccacggtcaggcccgcacccgtactcagatcctcccgacctacaaaaggccccgccacgcggcccacgcaccccggcaaactcgcaggccccacgatggcggggcggcggcgcgaacacacaaaggaggcgtcgtcagcggggaacaaaaaccctgcccgggtcttccccctaacagcacatcctgcccgactttccaagtgaccttgggggcgttcctgcccctcccagagtctcagtttcccttcctaggctaggaactaagccccatggccgcggccccccagggtgagccgagacccagacgcagacctcctaacttctgttgcccgcgccaagccgggctcggtgcgcccgcgcggacggcagtgcgagcgaccagagctggctcgaggtcccgggctgcaaagcctcggctgggtcaagccgcgcagcgcggctcccccaagaggcgcgggccgaggcctctgtaggccgcgaagctgcctaaacctcgcatctgcaaggccctgacttaccgctgctttcccgcaaagctcggcctaacctggagctagttaggtccgcaggcgccaccgccggcgcactccggagaagaagctccttcttcagccgcccaggagagctcctcgagaaagatgccgccgcctcaacagcaacccacttccgcttcggaggcctcggctccgccccccatcatgtccccattggccgcccgcctactctacttccgcggtcggccgggtaaggacaaattttttaatcctattggataagaaaaccatctgttaccactttaaaacgcgcctctttccgcccccgcccacaatcgagcgcactaactcgcaccttccggcaagagacggcgcgggcgcgccccgcccgcaaggtttttcgggagtcacggtctgagggcgacccgggcgacccggtcgcccgtgcccggctgccactgaccgctccaacgccgccagggacgacccgccagctgcctccggagccgagcaggccccgaaccttcccattcctagatttccagccgcacaacagccgcggtgcccctggctcgacgcagctggccggaggcgcggagctggtcgttcgtcccgcccgccgttccgcgcccctctcccggctcttgtttcctcgcctcttaacgaggcctttgtgaggaaggttgctgggccttgggactctgacgatcggctggaaaccaggcctggccctgtttcagcatccccgcgtgccaagccctgggccggcgtgcgggtccctgcccctgcgaggaagctgggacttttgcaggcctgggtggagacgtgtacataacagaggaagagtgtggaggattggaggactcagggcagcacggcagaggtgcatgcaggtccccggtcggactggagaatgggcggtgggtttcttgagctccagtccctgagctcgactttgacgtgggtttagcaaccaggaaaaaagcccaccttgtccctgctgcctgagaatacccagaccttagtccatggccagcatctctggtccctcggcaccctcaggcaacgtgaaggtcaccccaaatgccttgggttacattgtttccttacagtgagtttgtttgttttagtggcgcgatctcggctcactgcaagctctaacctcctgggttcacgtgattctcctgcctcagcctcccgaatagctgggattacaggcgcctgccaccacgcccggctaattttctttgtatttttagtagagatggagttccatcatgttggccaggctggtctcgagctcctgacctcaggtgatccaccctccttggcctccaaaagtgctgggattactggtgtgagccacctcgcccggccaccttacagtgagtttctaacctcgaaaatggagtcaaataacggaatgacaaggcagatagaaaccagagcattaacgtttttgtgttgcatttacaaacaatatgtgtttgctatttttcgtaattgtaaggaaatctggcatggtagagtatctgatagataaatgtaattctcatgtaaaatatctaagtatttgtgttttttgtttgtttgtttgtttgttttgagacggagtctcgctctgtcgcccaggctggagtgcagtggcgcgatctcggctcactgcaagctccgcatcccgggttcacgccattctcctgcctcagcctcccaagtagctgggactacaggcgcccgccaccacgcctggctaatttttttttttttgtattttttagtagagacggggtttcaccgtgttagccaggatggtcttgatctcctgacctc

SEQ ID NO: 317293 - DNA, 4001 bp, Homo sapiens
cttgagcccagatggcagaggttacagtgagaccgagaacacgccagtgcactgcatcctgggtgacagagtgagattccacctcaaaaaaaaaaaaaaaaaaaaagtgtgaaatattgtgaattacccaaacgtgacacaagagacacaaagtgagcacatgctgttggaaaaatggctggcatttacagacttgctcgatgaatccttgctataaaccttcaccttgcaaaaaaaaaaaggcagtatttgcaaaacacaataaaatgagttatctcttattccctccatcctcacccagctacaggaggaccacgactgtttactgctgtattccaagcagaaaggttggcatacaggagacctcaaaaatacgctactttgatcttgaggagagtgaaaaatcttactcattttatgtacaaagcacagatgtgcatacattatataaaaagaaatagtttacgtatggcattaagatttcatgaagattagaaaaacaatgtttacaaaaggtccttacaaaggtagtaattcaagaaaagatcaataaacgatgtgttaaagtaagatttttggaagctcaaattcaggcaatacaaaagccagcaatatatcttgctactcgaatgcctctatttcacctcaaactcacagataaaactgaacccaatatgtccttgtccattaaaaagcaaatcaccaagaaagtaacaaaagattcccttcaatgtctcttttattgacagtggtcccaaaactcctggtcaatgaattcaaaacccaaatcttgcaggtaggacttaacctcatctgctgccaaatagctggctatgtgaccttgggcagaccacttcacttttctggacctcagtctccccagtcagttggacagtctaagccaggctccagagctgagaccctacgtctggctcaagaacttggtgcagaaacagaacgaagattattaagtttgtgaacgtctatgggaactgacaagtgaaagacaaaagctgaaatccctaccaaaacggcttgcccaagctctatccttttccctcttccctcgatggatcaaaggcggaaaagcggtgtttactagcaactctgtttcgggtcgtgagaatcttcatacacctgtctataggcgcgccagagcggtgaagggcccgagcggtgcagggctgggccgcaagcctcacagtcgcacgttccaccaaccaccagccggggcccggaagcgcgcccggaaatcgaggccctactaagttttagactgcgacctcggcgcccccacggtcaggcccgcacccgtactcagatcctcccgacctacaaaaggccccgccacgcggcccacgcaccccggcaaactcgcaggccccacgatggcggggcggcggcgcgaacacacaaaggaggcgtcgtcagcggggaacaaaaaccctgcccgggtcttccccctaacagcacatcctgcccgactttccaagtgaccttgggggcgttcctgcccctcccagagtctcagtttcccttcctaggctaggaactaagccccatggccgcggccccccagggtgagccgagacccagacgcagacctcctaacttctgttgcccgcgccaagccgggctcggtgcgcccgcgcggacggcagtgcgagcgaccagagctggctcgaggtcccgggctgcaaagcctcggctgggtcaagccgcgcagcgcggctcccccaagaggcgcgggccgaggcctctgtaggccgcgaagctgcctaaacctcgcatctgcaaggccctgacttaccgctgctttcccgcaaagctcggcctaacctggagctagttaggtccgcaggcgccaccgccggcgcactccggagaagaagctccttcttcagccgcccaggagagctcctcgagaaagatgccgccgcctcaacagcaacccacttccgcttcggaggcctcggctccgccccccatcatgtccccattggccgcccgcctactctacttccgcggtcggccgggtaaggacaaattttttaatcctattggataagaaaaccatctgttaccactttaaaacgcgcctctttccgcccccgcccacaatcgagcgcactaactcgcaccttccggcaagagacggcgcgggcgcgccccgcccgcaaggtttttcgggagtcacggtctgagggcgacccgggcgacccggtcgcccgtgcccggctgccactgaccgctccaacgccgccagggacgacccgccagctgcctccggagccgagcaggccccgaaccttcccattcctagatttccagccgcacaacagccgcggtgcccctggctcgacgcagctggccggaggcgcggagctggtcgttcgtcccgcccgccgttccgcgcccctctcccggctcttgtttcctcgcctcttaacgaggcctttgtgaggaaggttgctgggccttgggactctgacgatcggctggaaaccaggcctggccctgtttcagcatccccgcgtgccaagccctgggccggcgtgcgggtccctgcccctgcgaggaagctgggacttttgcaggcctgggtggagacgtgtacataacagaggaagagtgtggaggattggaggactcagggcagcacggcagaggtgcatgcaggtccccggtcggactggagaatgggcggtgggtttcttgagctccagtccctgagctcgactttgacgtgggtttagcaaccaggaaaaaagcccaccttgtccctgctgcctgagaatacccagaccttagtccatggccagcatctctggtccctcggcaccctcaggcaacgtgaaggtcaccccaaatgccttgggttacattgtttccttacagtgagtttgtttgttttagtggcgcgatctcggctcactgcaagctctaacctcctgggttcacgtgattctcctgcctcagcctcccgaatagctgggattacaggcgcctgccaccacgcccggctaattttctttgtatttttagtagagatggagttccatcatgttggccaggctggtctcgagctcctgacctcaggtgatccaccctccttggcctccaaaagtgctgggattactggtgtgagccacctcgcccggccaccttacagtgagtttctaacctcgaaaatggagtcaaataacggaatgacaaggcagatagaaaccagagcattaacgtttttgtgttgcatttacaaacaatatgtgtttgctatttttcgtaattgtaaggaaatctggcatggtagagtatctgatagataaatgtaattctcatgtaaaatatctaagtatttgtgttttttgtttgtttgtttgtttgttttgagacggagtctcgctctgtcgcccaggctggagtgcagtggcgcgatctcggctcactgcaagctccgcatcccgggttcacgccattctcctgcctcagcctcccaagtagctgggactacaggcgcccgccaccacgcctggctaatttttttttttttgtattttttagtagagacggggtttcaccgtgttagccaggatggtcttgatctcctgacctcgtgatccacccgcctcggcctcccaaagtgctgggattacaggcgtgggccaccgcacccagtctttttttttttttttttttttgagacgaggtgtcactctgtcagccaggctggagtgcagtggcacaatcatgactcactcactgcagcctcgacctccccaggtttagatgatcaacccaccttggcctcctgagtagctgggaccacaggtgtgtgccaccatgcctggctaatttttttgtattttttttttgtagacactggctttcgccatgttgcccagtcttgtcttgaagccccgggctcaagttatctgctcacctcgacctcccaaagtgttgagattacaggcatgagccatcacaccctgccctaagta

SEQ ID NO: 317294 - DNA, 4001 bp, Homo sapiens
gtttctttgttttggacaatctcataagaactttaggtcttacagcacgaacctgcataagaaaaatattaagatttttgtgatgctttaacagaaatttccctaaattttgttaagtgttaagggcaagtttaaagtaggttacaaagggaaatggtgtactcatttatctgaaaggcatttcactgcatttctcagattggtttaaaaagtctatgttcgtggcagatttggctcatgaatgtttagtaattctgaaccctcttagtggtaacctctccttgattcattccatcgtcaagggatgaaagctcagtaagttcaagacttgttaggctgcacacagtaaaaggtacacttacccctcgaagtctgcctgggcacacaccacatgcagattttggtgctttcccaaccttcttggtataaaggtaaacaattctattaccaggggttcgggacctagaaagtgaaacagtcagtaggtcagcattttgtagagtaaatgacaatatatacttaaaattttcagaaatacttacagcctagttttgttagaggctgtattgtaggaaagcctacgtcggtatgtcaaacgctggaccattctgagtgcctaaattaagaatagagtaacatcaaatctttccattgtaaaagtaaataaaatctcaaaacagtatcatgtggtctatttcattcacatacatatccttgtatgtaacacccttaaattaagatgtattattccacattttaaaactacttgtatttaaaggtgactgataaacaagaggccaagaatgttagctttcctgatggtaatcaaacgtggcacttccttaacgttctgatgaccaggctccttactcagagtctaattttgtttggagtggtgtccagaaaagtgccacgagcccagttggagaaacaccgctttaaacaaagagcacaaaaagtgagctctgaagtcgaatccttagctatgccatttactgggaatataaagggcaaggagctagcctccttatctctaacatgggaattctgtctactttatacagctgtcattaggattaaacgacgtgggctatccgtcccaacacaatgcctggcacatatcagggttcaatgtcttgccctaaagcaccacctgcgtaaaggcataccctttaatactaattttgatattacacaagtttctttgggttatggcacctgctttcttcccacttctggaaacatcgtgatgttatttagcaaatcggttatacagatatgcatacgagcaacttcgttaagggaactacccaacgtaaaacataatcaatacttgaactaatttaatcttcccattccaccccttgtaaccacctcatttgttgtcacaagcctctcactaaaattaaactaaaacagaattaccagacaccaaaacttgacacgtaaaaccagtgcgagtgatttatgaagccattattctgtttgcatctccaaaagcaagacagaaacttctaacacatttttctcttccttgacatgggccttggacgcagaagccaaatagcgaaaccacccgaactcgccggaccctgccctcccaaagactaaggacacgtacaggcgtgctgtgaaaacgtgggtgtaaaatatgaaaacgtttggcgattttccagactcaaaccgccaaaccacaactcgttagtctccaaacgctacacttggaatgcagcaaagtcccgggtggtgagctgtggctactcacggctttggaggtgccaccaggaacaagggatttccaaagatcaaagtaaggaacttcctcaccaccaacctccctgttgtgccccttacccctacaccagctcaaaggactgcttctgagagctctaggcttcctcagctcctcggatggcagccgattggtaaggaaataaagacagggaaaagagaacaacatccatacctgcagacaacgtccccggaagaggaagaaaaaagcctttgccagttcaaaggtcaaatagaattgcgcaggacaggaagttgcgtcagagagagagtatccgtgttgtacggaagccgacgcacctctccgacgtgggcagagatgcagggaaccaccacgttgtacggcaaccaacgtgccgcccctctgtgggcggggattcacactagctgtctgtgtcaaggccacgcagaaatctattggaaatcgctgtggaaacaaacgcaaatgaaaagccgcaaagagcaaaggtgggacaaaatcaacttctttcgttgtcatggacactgcacttttaatctaaagggcgccagctctggcgttagacctgggtttaaatcccaactcttgacatttatggttaagggaccttcaaggaccagggaccttcaagaaccttcccttcttcaaccttcccttctctttccttgtcatttattcagagcacaagctttacaaacaaattgggattttaatccagtgtctgctaattattagctatgttactttgagcaagcccttaaatctctaaaaggaagatattaggaactaccgtgccatgttatgtcatgatcaaaggcattatgaagttaaagcacttagcacagggtcttatagagaggaagtgctcagtaaatggttgctaatcttatgattatgtacaaagaactacttgaggcttttcatgggtggtaaagtttaacctttaaaacagtatgtaaaattttacattaagcgcacgtgtgtatttttctgagaagagggtccctggctttcatcaccttgtcaaagggattcatgacctctaaaaaagtaaagaactctttgcctgggctgtaaaagacaattctaaaaggggcctttaagtttttaatcttagatcaggctccctggaaacacacctcgaagagacttgagtgttggcttatggggagcgctcttagaatgcacctccaggaagctgagaaaggcggggtcaggtgatccacaacgtggttgctgtgaggcagctgcattgccccagaagagaggatttggataggatatcccagtacccactcaactttccttctagtatttctaatccatctagcaaaccaagaaagcaggcaagtgactgagggcatgtagtctgtcttgaactgtgaggcctattgattctatcaagcctcacatcactgccatctttgtcacaacaccagatggaaggctctggttatatccttccctctgctcactctcaaatagctgcttctcccccgaccttgtcatcagctacttccctcctttccagtcctttgatttttgtcctctgaaatccttttcgtctctgtgccaggcattgagatggaagcttgcatagagagacaaatgtggtttttgaataaatgcactaatgaatgtatttacttgcaatatgttctctatattttaagagagactttgcagagcagaagagaacaggagatgggagcccttggcacactatgctgttgtttacgtctctgtccgtgccttcccccacccaagtagataagaatagtggtctcattgttgtagttttcccttaaggtacttaacccagttccataatactatttttccctctctttaaatttgtatttgcattttttcttgatcagtcttgagagagatatggcaatcttattaaaaacttcaaagacagccaggtacagtggcccatgcctgttaatcctagcacttcgggaggctgatacagaaagatcactgagacctgtagttaaagatcagcctgggcaacatagcgagacgcccatctctacaaattttttttttttaattagccaggtgttgtagcacacacctttagtcccacctactcaggaggctgaggctggaggatcacttgagcctagaagtttgaggctgcagtgaaccatgattgtgccaccatactccagcctgggcaacagaatgagatcctatctcaataataataataataataata

SEQ ID NO: 317295 - DNA, 4001 bp, Homo sapiens
tggaaccaccataggccctgctgacatgtttctttgttttggacaatctcataagaactttaggtcttacagcacgaacctgcataagaaaaatattaagatttttgtgatgctttaacagaaatttccctaaattttgttaagtgttaagggcaagtttaaagtaggttacaaagggaaatggtgtactcatttatctgaaaggcatttcactgcatttctcagattggtttaaaaagtctatgttcgtggcagatttggctcatgaatgtttagtaattctgaaccctcttagtggtaacctctccttgattcattccatcgtcaagggatgaaagctcagtaagttcaagacttgttaggctgcacacagtaaaaggtacacttacccctcgaagtctgcctgggcacacaccacatgcagattttggtgctttcccaaccttcttggtataaaggtaaacaattctattaccaggggttcgggacctagaaagtgaaacagtcagtaggtcagcattttgtagagtaaatgacaatatatacttaaaattttcagaaatacttacagcctagttttgttagaggctgtattgtaggaaagcctacgtcggtatgtcaaacgctggaccattctgagtgcctaaattaagaatagagtaacatcaaatctttccattgtaaaagtaaataaaatctcaaaacagtatcatgtggtctatttcattcacatacatatccttgtatgtaacacccttaaattaagatgtattattccacattttaaaactacttgtatttaaaggtgactgataaacaagaggccaagaatgttagctttcctgatggtaatcaaacgtggcacttccttaacgttctgatgaccaggctccttactcagagtctaattttgtttggagtggtgtccagaaaagtgccacgagcccagttggagaaacaccgctttaaacaaagagcacaaaaagtgagctctgaagtcgaatccttagctatgccatttactgggaatataaagggcaaggagctagcctccttatctctaacatgggaattctgtctactttatacagctgtcattaggattaaacgacgtgggctatccgtcccaacacaatgcctggcacatatcagggttcaatgtcttgccctaaagcaccacctgcgtaaaggcataccctttaatactaattttgatattacacaagtttctttgggttatggcacctgctttcttcccacttctggaaacatcgtgatgttatttagcaaatcggttatacagatatgcatacgagcaacttcgttaagggaactacccaacgtaaaacataatcaatacttgaactaatttaatcttcccattccaccccttgtaaccacctcatttgttgtcacaagcctctcactaaaattaaactaaaacagaattaccagacaccaaaacttgacacgtaaaaccagtgcgagtgatttatgaagccattattctgtttgcatctccaaaagcaagacagaaacttctaacacatttttctcttccttgacatgggccttggacgcagaagccaaatagcgaaaccacccgaactcgccggaccctgccctcccaaagactaaggacacgtacaggcgtgctgtgaaaacgtgggtgtaaaatatgaaaacgtttggcgattttccagactcaaaccgccaaaccacaactcgttagtctccaaacgctacacttggaatgcagcaaagtcccgggtggtgagctgtggctactcacggctttggaggtgccaccaggaacaagggatttccaaagatcaaagtaaggaacttcctcaccaccaacctccctgttgtgccccttacccctacaccagctcaaaggactgcttctgagagctctaggcttcctcagctcctcggatggcagccgattggtaaggaaataaagacagggaaaagagaacaacatccatacctgcagacaacgtccccggaagaggaagaaaaaagcctttgccagttcaaaggtcaaatagaattgcgcaggacaggaagttgcgtcagagagagagtatccgtgttgtacggaagccgacgcacctctccgacgtgggcagagatgcagggaaccaccacgttgtacggcaaccaacgtgccgcccctctgtgggcggggattcacactagctgtctgtgtcaaggccacgcagaaatctattggaaatcgctgtggaaacaaacgcaaatgaaaagccgcaaagagcaaaggtgggacaaaatcaacttctttcgttgtcatggacactgcacttttaatctaaagggcgccagctctggcgttagacctgggtttaaatcccaactcttgacatttatggttaagggaccttcaaggaccagggaccttcaagaaccttcccttcttcaaccttcccttctctttccttgtcatttattcagagcacaagctttacaaacaaattgggattttaatccagtgtctgctaattattagctatgttactttgagcaagcccttaaatctctaaaaggaagatattaggaactaccgtgccatgttatgtcatgatcaaaggcattatgaagttaaagcacttagcacagggtcttatagagaggaagtgctcagtaaatggttgctaatcttatgattatgtacaaagaactacttgaggcttttcatgggtggtaaagtttaacctttaaaacagtatgtaaaattttacattaagcgcacgtgtgtatttttctgagaagagggtccctggctttcatcaccttgtcaaagggattcatgacctctaaaaaagtaaagaactctttgcctgggctgtaaaagacaattctaaaaggggcctttaagtttttaatcttagatcaggctccctggaaacacacctcgaagagacttgagtgttggcttatggggagcgctcttagaatgcacctccaggaagctgagaaaggcggggtcaggtgatccacaacgtggttgctgtgaggcagctgcattgccccagaagagaggatttggataggatatcccagtacccactcaactttccttctagtatttctaatccatctagcaaaccaagaaagcaggcaagtgactgagggcatgtagtctgtcttgaactgtgaggcctattgattctatcaagcctcacatcactgccatctttgtcacaacaccagatggaaggctctggttatatccttccctctgctcactctcaaatagctgcttctcccccgaccttgtcatcagctacttccctcctttccagtcctttgatttttgtcctctgaaatccttttcgtctctgtgccaggcattgagatggaagcttgcatagagagacaaatgtggtttttgaataaatgcactaatgaatgtatttacttgcaatatgttctctatattttaagagagactttgcagagcagaagagaacaggagatgggagcccttggcacactatgctgttgtttacgtctctgtccgtgccttcccccacccaagtagataagaatagtggtctcattgttgtagttttcccttaaggtacttaacccagttccataatactatttttccctctctttaaatttgtatttgcattttttcttgatcagtcttgagagagatatggcaatcttattaaaaacttcaaagacagccaggtacagtggcccatgcctgttaatcctagcacttcgggaggctgatacagaaagatcactgagacctgtagttaaagatcagcctgggcaacatagcgagacgcccatctctacaaattttttttttttaattagccaggtgttgtagcacacacctttagtcccacctactcaggaggctgaggctggaggatcacttgagcctagaagtttgaggctgcagtgaaccatgattgtgccaccatactccagcctgggcaacagaatgagatcct

SEQ ID NO: 317296 - DNA, 4001 bp, Homo sapiens
taatagatgtacagggtgccattatcaggtgcattctagaaggtataatgcaaagaaaaccatttcagcatgaactttttatcttgaggggagagacggtgggttggaaagaataatgacatacattatggcagcagacagaaaactcagaaactacatctttttctatcccaacaaggggtcctgatggtgagatgtgactaccaactagtactgcaactgtagatttcctatcttaaagaattcggaaggtatgaaaattcatcattagcctactttttaaaagttgtacccatctagccatgcatggtggctcatgcctgcaatcccagtactatgggaggccaaggtgggaggatcacttgagctcagcctggacaaaatagcgagaccccagccttgattaaaaaaaaaaaaaacccaacaacagaaaaaaacaaacatgttgtacccatctggtctttgctctcagctctatcgcttaaagacccacagatgcctatttttgccaagttcttgcgtattacaccaaataaaatacatgacccattctctgaaagagacacttacgctgtataaagcacaggtttgagaaacctccctttccaaaacaaggaagtctgatacatctgcttaccagtgtaacacccttgatcatgttctgtacatgactacaaatagtccgaacggtagccagttcctttctgttaccccaccatttgtcaacccggagctgtaacagaacaaaaaatgtattctttccagaaatatgcaggcttaaaagacaacagaccacttaccgaattactttaagattctagaattaacccttatcaaagcacatggttttcaactggaaaaatccaaccacctataaaacctcccaacagttaagctttgtagaagttgcaacaaacttcccttctggaaaattaaatcatcaggtttaaatgacctactgccggttcctgtgatttttacaaagcaatcactaggaaaataaaccaaacttctaacaccattaagacgtgtcactgatgaccactattacatttgagctttatataattggctgtgttcagaatctggtttttcaatttcactgaacaggctggtattctggacagcaacatttaaagctgaagcactgaaccttaattcgaaaattgttaaagcaaccaaatgtgatgctgttataaaccaccttccaacgagcaactgaattatcagaagaaaaaccctcaccctcttttttttctttccaagaaggctgagttctacattgatgtgattgaagtccctccgcagggttcctctggggcccttcacgataactgtgcgtcccttcagagtaatgtcgactagaagagagaacacactcgtcaggccacacaacgcttggaacgtgcagtaaagatgtaagtaaaagacatcaagtctcataccattttctggaatgtcgacagtctgattgctgagaatagtcttcattctgaaacacaaacactgggggtgaggccgacgcaaggcccgtttttccaccaaactacgccgcacagagctccactcctactggagactgccaggcggaagttccagacaagatgtcggaggacgggagaccgacagcgggccccagtgtgtcccagcctggaaggagcagccccaaagcgagaattacgaggcccagcagtcgaactcccactcagcccaaccctggaagtcctatgcgggcggtgccatcccggcaagactgaggggcgggaataggccaaaaagcccacaacaggattcgcatctggcgccgccaggctcatatggcgcttgccgagctgggggacaaacaggacaaggttccgagagtgggagccgcgccgcagcctttcccagagcagatggtttcagattcccagtacccccacgagcacagaaacatccttacctcgcagtagacgcagcaaagaaagaacgtctgtcgtcattacgtacttgtatcgcgtaaggggcctgcgtattgcgtcatgagtgcgcgacgcacgtaaggctaaagcagccaatcgtggagcagcttggctgcttgtcataaatggagcgacgtaatttcgacctgtcctttcccgggagttagcgatccctcaacccctgcactgcgctagtcctaaagaggaaatgtctctacgctgcggggatgcagcccgcaccctggggccccgggtgagcggcggggcgaacgggtttgggcgtggggtggggggatcctatcccttcagagcgcccatgcccaataataaaggccagtgcatttactgaacatttactactagccaacggcagttttaaacgtttttcgtgtaatctcatgtaattatcccgccagccccatgatatagagtctctggcatcagtttgtttgcaagtctctctgggccagcaccgaggacttattttctgcttagagtggtttgtaccctatatttatggagcactgcagtgagcaccccacatagctattctgtcttggactcttactgtgtgtgagacaccactctagccgcagagaacacaaacctgtccgctaggcttcagcggcagacattgagaagtgcagtagcaatcgtgcaacaccctaacaggcactctttgagttgtcgaaggttcttttgagatacatgtgcagactcgtggattttgtagtgttttggctatctcatacacgtttgtgttcagatgtaaaagccgaataccatgatttcttatgttcttgactgccacgttcaaacacagaaacaatgtaacctagaaagtaaaaacgttcatcctggccaacatggtgaaaccccgcctctattaaaaatacaaaaattagctgagcgtggtggcgtgcgcctgtagtcccagctactcgccaggctgaggcaggagaatcgcttgaacccgcgaggcggaggttgcagtgagccgagatcgcgcaactgcactccaacctgggcgacagagcgagactccatctcaaaaaaaaaaaaagaaaaagaaagtaaaaacgttaggcttggttttaaccttccagttgtctgaaactaattgggcattattaacctacgtttcaacaattattcaaagctcgagagatttattgcacacttcactttaaacgcccctgattcaagtcaggaccagaacagttttaaactgtggcaccttcttcagttattgcagttcaatcttgttgaaagacaaacatctagttcctggtaggtggagtacatgaaagtgtgatatatgttagttccagagattttcgggccgggtgcggtggcttacgcctgtaatcccagcactttgggaggccgaggcaggtggatcacctgaggtcaggagatcgagaccatcctggctaacatggtgaaaccctgtctctactaaaaatacaaaaaaattagccgggcgtggtggcgggcgcctgtagtcccagctactcaggaggctgaggcaggagaatggcgtgaacccgggaggcggagcttgcggtgagccaagattgcgccactgcactccagcctgggcaacagagcaagactccgtctcaaaaaaaaaaaaaaaaaaacagatttccaaatctattctaaactcagtagtaaacagtcaactcttactctcttttaggtttggttccttcagtcatcttttatattctaatgccctagaatactagagctcctagtttgacataatttctgaatcacttttttggctttacccttccgtttaggtgttatgatgggttaaaactaaattattacggactccactaaataaacgtcataattaactctttctttaggtatttgggagatatttttgcagcccagtcagaccgttaagctccttgccagataaaaaaaaggaactcctacagaatggaccagaccttcaagattttgtatctggtgatcttgcagacaggagcacctgggatgaatataaaggaaacctaaaacgcc

SEQ ID NO: 317297 - DNA, 4001 bp, Homo sapiens
aatagttttaaaattttctaagatgcttatacttattttaaaacgtaacactcactgccaagattttctaataactgtcacctgaaccaagccttataaacattgttctgtctattcagtggactgtaaagctccttgcggaggctttatttcactagctcttatgccctcaatgaacaatgctgccttcttttaatgagaaccccaaagccctgatcttagacattagactaacatttactgagttactaaggtacagcacatggcaggaattgagaccaccaagccaaaggcaggccccctgccttcaaggaacttaaggctaagagcaagggtagatgggggaatcttaacagatttataatagatgtacagggtgccattatcaggtgcattctagaaggtataatgcaaagaaaaccatttcagcatgaactttttatcttgaggggagagacggtgggttggaaagaataatgacatacattatggcagcagacagaaaactcagaaactacatctttttctatcccaacaaggggtcctgatggtgagatgtgactaccaactagtactgcaactgtagatttcctatcttaaagaattcggaaggtatgaaaattcatcattagcctactttttaaaagttgtacccatctagccatgcatggtggctcatgcctgcaatcccagtactatgggaggccaaggtgggaggatcacttgagctcagcctggacaaaatagcgagaccccagccttgattaaaaaaaaaaaaaacccaacaacagaaaaaaacaaacatgttgtacccatctggtctttgctctcagctctatcgcttaaagacccacagatgcctatttttgccaagttcttgcgtattacaccaaataaaatacatgacccattctctgaaagagacacttacgctgtataaagcacaggtttgagaaacctccctttccaaaacaaggaagtctgatacatctgcttaccagtgtaacacccttgatcatgttctgtacatgactacaaatagtccgaacggtagccagttcctttctgttaccccaccatttgtcaacccggagctgtaacagaacaaaaaatgtattctttccagaaatatgcaggcttaaaagacaacagaccacttaccgaattactttaagattctagaattaacccttatcaaagcacatggttttcaactggaaaaatccaaccacctataaaacctcccaacagttaagctttgtagaagttgcaacaaacttcccttctggaaaattaaatcatcaggtttaaatgacctactgccggttcctgtgatttttacaaagcaatcactaggaaaataaaccaaacttctaacaccattaagacgtgtcactgatgaccactattacatttgagctttatataattggctgtgttcagaatctggtttttcaatttcactgaacaggctggtattctggacagcaacatttaaagctgaagcactgaaccttaattcgaaaattgttaaagcaaccaaatgtgatgctgttataaaccaccttccaacgagcaactgaattatcagaagaaaaaccctcaccctcttttttttctttccaagaaggctgagttctacattgatgtgattgaagtccctccgcagggttcctctggggcccttcacgataactgtgcgtcccttcagagtaatgtcgactagaagagagaacacactcgtcaggccacacaacgcttggaacgtgcagtaaagatgtaagtaaaagacatcaagtctcataccattttctggaatgtcgacagtctgattgctgagaatagtcttcattctgaaacacaaacactgggggtgaggccgacgcaaggcccgtttttccaccaaactacgccgcacagagctccactcctactggagactgccaggcggaagttccagacaagatgtcggaggacgggagaccgacagcgggccccagtgtgtcccagcctggaaggagcagccccaaagcgagaattacgaggcccagcagtcgaactcccactcagcccaaccctggaagtcctatgcgggcggtgccatcccggcaagactgaggggcgggaataggccaaaaagcccacaacaggattcgcatctggcgccgccaggctcatatggcgcttgccgagctgggggacaaacaggacaaggttccgagagtgggagccgcgccgcagcctttcccagagcagatggtttcagattcccagtacccccacgagcacagaaacatccttacctcgcagtagacgcagcaaagaaagaacgtctgtcgtcattacgtacttgtatcgcgtaaggggcctgcgtattgcgtcatgagtgcgcgacgcacgtaaggctaaagcagccaatcgtggagcagcttggctgcttgtcataaatggagcgacgtaatttcgacctgtcctttcccgggagttagcgatccctcaacccctgcactgcgctagtcctaaagaggaaatgtctctacgctgcggggatgcagcccgcaccctggggccccgggtgagcggcggggcgaacgggtttgggcgtggggtggggggatcctatcccttcagagcgcccatgcccaataataaaggccagtgcatttactgaacatttactactagccaacggcagttttaaacgtttttcgtgtaatctcatgtaattatcccgccagccccatgatatagagtctctggcatcagtttgtttgcaagtctctctgggccagcaccgaggacttattttctgcttagagtggtttgtaccctatatttatggagcactgcagtgagcaccccacatagctattctgtcttggactcttactgtgtgtgagacaccactctagccgcagagaacacaaacctgtccgctaggcttcagcggcagacattgagaagtgcagtagcaatcgtgcaacaccctaacaggcactctttgagttgtcgaaggttcttttgagatacatgtgcagactcgtggattttgtagtgttttggctatctcatacacgtttgtgttcagatgtaaaagccgaataccatgatttcttatgttcttgactgccacgttcaaacacagaaacaatgtaacctagaaagtaaaaacgttcatcctggccaacatggtgaaaccccgcctctattaaaaatacaaaaattagctgagcgtggtggcgtgcgcctgtagtcccagctactcgccaggctgaggcaggagaatcgcttgaacccgcgaggcggaggttgcagtgagccgagatcgcgcaactgcactccaacctgggcgacagagcgagactccatctcaaaaaaaaaaaaagaaaaagaaagtaaaaacgttaggcttggttttaaccttccagttgtctgaaactaattgggcattattaacctacgtttcaacaattattcaaagctcgagagatttattgcacacttcactttaaacgcccctgattcaagtcaggaccagaacagttttaaactgtggcaccttcttcagttattgcagttcaatcttgttgaaagacaaacatctagttcctggtaggtggagtacatgaaagtgtgatatatgttagttccagagattttcgggccgggtgcggtggcttacgcctgtaatcccagcactttgggaggccgaggcaggtggatcacctgaggtcaggagatcgagaccatcctggctaacatggtgaaaccctgtctctactaaaaatacaaaaaaattagccgggcgtggtggcgggcgcctgtagtcccagctactcaggaggctgaggcaggagaatggcgtgaacccgggaggcggagcttgcggtgagccaagattgcgccactgcactccagcctgggcaacagagcaagactccgtctcaaaaaaaaaaaaaaaaaaacagatttccaaatctattctaaactcagtagtaaac

SEQ ID NO: 317298 - DNA, 4001 bp, Homo sapiens
gcccagattttaacctcactccagaggctctgccacaattatgctctactgccacagttaatcaacattcactcaattctgaggtcaaaaaacatccttaagacaggcaaaaccgcccacctgcacctaaacgttcctcaaaaaaccactaatctatgcagcaagaaaatctgactttgatgatacaccactattaaatcttagatttaaatagtaagtaaaatatggtgtggcaaccccagagttagcactcaacaacggcaagaaaacaaaaatttaaaatgaactttgtggacatttcactggtctcaataaataaataaaatgaacttgctccttccagtcatcaaaccatgctatccttggtcaaacacccatagcacaaccactctaaggaactttgggtctcacctgccattttttgaccatggaacacattttgtcacgggtaagatccatgccatggaagttagtcaggcagtttttaccctgaacatcttcagtaatcagcttgaattttctaaatgcaacttcatcattctgcaaatcagcaagactcacttcaaacacacgacccttgagaccatcagatgcaatttctacaaaagaaaaaaacaagtatcttaacatttaggaaccatataagcaaagtcaagcctgtaaactgagggtagaaattaagttaatggtaaattataaagaccttaacctttgttatcaaatctatccagacaccagtgacttatcaacagtacttatttgaagctcagaactacccatggcacattttcttaattcaaaaagcaccatcttgcttctctccaagtgctgtactaaaaatgatcaccacaggtgccaaggctgcaaccaagagctgacatttccttaaagtctcccaccacaggaccaacaacagaccaagatgcctgctacaatatacaagcgccaacttaaggaaaatacaaaccaagaataagctacttactggttccttgggtcctggtgacgagcgtctttccaatatttcttatattgaacatagcaggtgctttcacatcataccaatctttcttagaaaatggatcaaccctggattttaagaagatgcttaagttccattgcagatcaattcttactgtatttttcactgttaatggtatttcccattaatattttaaaaagctaaccggcaatttgataccaaagtatatctcacagtgaggtgaggggaacaaacataaatctagctcttcccactgtacgtttcactgcatgcatcagactttgaaaggttatgtccacttcccaccctcatcggtccatccactacacaggcacttagaataacatgcatcggtccttccactacacaggcacgagtaacatgcaatctcattaactttgctggcacgtaatggcatgtactggtaactaagagactgcatggccccaaagcttagcaggagctcgcagattccagcgggaccaagcaaaggcgagattgacgggtcctgaatggatagaagggtgctttcctcaactcctgctgtcgcagtgccatcaaacactcgcagaattgaggcagctcgtgagcccacaaaactaacattccagccgagtcgcgccggcaagccggctcaaacgcgacgcgcgcaaggaccagaaggcctgggaaaggcagccgacctgccgctactcaacaccgaccctccaggccgcgttcctgggtgcaccaacccgccacggcccgcacaatccgactggaatcctcgccatccggcctacgccgcgatctaggaccagcccgccgattccagcagacccccaaaaagcaagacgccacgacagtcgcgacttacactttcttcttggctccctttttgccgcctttcgtaaggcgcttgttcttgccaaccgccatggtgctggtcagagagccaaaagggcggaagtgggagtcgcgcgagaacttaggcgtacgggggcggggcgcgccgtctacgtgacctttgccctgttattcttccggcctcaagaattccgggacagtagagagcgccactctttctactgtggttgcgacatcgccatcgtgtgtggggaggccgcgcggcatgccgcgggctcactggaggctgcgctgtgtagaccaaggcgtcggtggcctgacgtgcaggcgtctggttacctgtggtttctgtggctgtgacgtcgggaagtaagtttctgtaaaacgagacgcccactcaacatcgttcaaagctgaactcaccgtctaacccccaaacctgctttttgagagcattggctttggagtcagtcagcggatctgattcaaatgccggtttcaacagggctttgcttgagaccgacctctccacgcttgtttcctcatgcgtaatatgggggtgataaaacggtcggcttcatgaggtttcatagggctaaatgagcatcactccagagatgctagcgacgttctgcttgttgatgtggatgctggttcatctcaggtgttgttgctttgtgaacattcactaagctctacgcttatttgtgtccttttctatatgtctgttatatattgattaaaaggtttttttaaaatagagtgagaccgaactcgttggctcacacctgtaatcccagcactttaagaggctgaggcaggggaatcaactgaagccaggaattggagactagcctgggccacacagccagaccccgtctttacaagaaaatgataaaattagcagggcgttggccgggcgcggtggctcacgcctgtaatcccagcactttgggaggctgaggcgggcggatcgcctgagctcaggagttcgagaccagcctggccaacatagtgaaaccccgtctctactaaacatacaaaaaattagccgggtgggtgcctgtaatcccagctactcgggaggctgaggcacgagaatctgagctcaggaggcggaagttgcagtgagccgagatcgcgccattgcctggccaacaagagtgaaactgcgtcaaaaaaaaaaaagtgagatctccaaatgtttccatttttgcaactaatccaaacccgcctcccccattttttttaactgtaggggttaacagagcacatcctggcaaggtgtggctggctagctcaagtgtgcagccctcggaaagcatctggcccatacaggcttggtactcagccagtggtgtgttgagttcccttctctaacttcccctctggcagaaaaccctgtgaccaagccaaaaccaacccttacttacaaggccccctgcaagcttttaaacttacaatcccttccagtcctgctagcctccatcccctacctcccactacacccaccccccaagacaaccttcctaaacctctagtagggtcctgaaatctttcagtaattccataaatctcagttgcctggaggataaattcaaagtcttagtttcataatagtatgaatgtacttaacactactgaactctacacttaaaaaaggttaaggtagccctgccaggtgtctcaggccgctagttccaggtattcggaaggcagaggcaggaggatcacttgaggctaggagtaggactccagcctgggcaacatagtgagaccccatctcttttttaaaaagatgattaagatggttaatttggccaggtggtggctcatgcctgtaatctcagcactttaagaggccaaggcaggaggttttcttgagctcaggagtttgataccagcctgggcaacattacaagacctaatctcaactaaaaataaaaaaaaattagcccggcttgatagctcatgcctgtagtcccaactactcggaaggctgaggtaggaggatccccagcactttgggaggccaaggcagatggatcacttgaggccaggagttcgagaccagcctggacaacatggtgaaaccccgtctctactaaaaatacaaaaattagctgggcgtggtagtgcacacctgtagtct

SEQ ID NO: 317299 - DNA, 4001 bp, Homo sapiens
ttcactacaccctttcctcatagttttggttttgatttgcaactttaagtgagttttgttaaaggaggaaagttaggggatctaaagaaaaatagatgcttgatacaggggcagaacaaaagcataaagagttcagctatgcttccttcagtggatccaccagaaacacaaacaacacacactcattgtataccttgataaagctgactcttggatttatatgtgagggctctagaaccaaaatgcctgggttcaaatcctggtgtagctgcttagtaaatgtgtgtgctggacaagtttcttaagctcttcatctgtataaactagagaaataaaactgaagagtaacttactaaattagtgtaaggatgaattattctgtatgtgtaaggttttagaacagtgcttggtatatagcaagtattcaaatgataacattagtagcagtagtagtaagattactattattattactgttacagagataagaactaaatagaatattttctgcatgctaattttgtaaccaggtcaaaaaaggatagttttggttgttttttggattttttttttttttggtcatctacaaataactaactaaaccaaacacttgtatacaaagtatttccatgtaattgttaggagattttctcagtcttttttgcaattacaaaaaaactagaacttgtctagtacttatcatagaggtattcaaatgaacgagataacgtcactaaaatcgcaaaacttaactgaggaactcaatttccagtactagaagtaatacgctgaattataaggaagaaacgtaaacaattataaactgggtataggatggtgtgttatacttttcactctacttttgaatgtttgaaaatttttataaaagtcaatccaaaaaataatgaactcaatataagagttacttctacaactcgttagagtataaagttgaaaattaagtgattgctcaatataaaagttacacaattcaatgatacattaaaaagataaaaagtttctgtcattcccccatccctttttttctgcaaacaatcctttacatcaatgagtgtgtagggaggaaagggaaaaagaaacaaatatttgtccaacacctactatatggcatttatgtgtcacttaattttactccttataacaatcatgacagataacttattcttatccttgttttacagatgagaaaatggaagaacaaaaagggaagatacatgctcacagttgcaaatatactaaaagatgaaatccaaaactcaagagttttccaataagcattctggaacaagctgaattttcagactctgtcctcaatgacaatataccctgctctgtcttcttaggactttttctttccagaacctttaagttcttagctaaattctaccaccaagaacaaaaatatgagggttatgtataagaatagtaaatgacataaaaatatgtttttgccatggtgcatactcttctccaataaaaactttaacaatccaataatcaaatacatagatttttatgaaagaactatttatcacatagaaaacttttctcagccccacttcactgctcttatttaccaaaattcaaaataacctgtggcaatggccatcactaacaatgctttcccttattctttcacccacattatcttatttgatctttacagcccagaaatagagtatcatcatcctcatttaccaacgagcaagccaagtcaggataaatgacttgtcaaggttggccaataatatggaacttgaaacaatgcatgccttatgctgaaaacttctgcctttcttcacccattctaaagaaaaataacttacttaaatatccatacctgccataatcaagtaagttgcaacaatattgtgttcagtctgtgaaaagaccgagccatcttcatttttagagtctgaactgttgcctaaattatttcttagcattttggagggaagataccgaaacacccttcataataagccttcgataattatgaactgctttatgagctactgaggaaagattttttaggaccaatcatttccacttagagacctcaaagaagggccttttcatagaggccctcccttaacaaatttaattgggctaaagaggaaaggactttaattcccagaataagggaaaagcttattagcaaaacaaaaagaaataccaagcaccacacattttaacctatttgggcatcagtcttctatctaaggagattatcaagcacacacatcccatttaacaataaacaaactcaggaaatcagtataggagccagccttagtcctctaaaactattcggattaaggtccctgttttctgttgaccattcaagtctttccatttcggctccttttgttgttttttttttcttaacaatttaaatattagtgacaaagaagtagtctccttcctacttccaaatctcactctcctaaaggtaccagtattgtttggtgcatatcctttcttaggcttttctctgcttatacacatattcatacaagtgtttcaggtttcctccactttcttcttgtaaataaaaatgagggaaaaaaataagtacaaatgtatatatataatgcaacttgttttcccataaggctgtattataatatccaagttaataaacccagaatctaataaagtctaatttattagtagctatgtatttcatagcatggatataatatgatcaactccaccatccgttaatttcccctatagtttgatatgcacatgagtaattaatattatctgatgatagtaatcattgtatactttgccagagtatctgaattcaatcactgatattgtaaagtacagaataaaaatattctggattatcacattacaacctgaaaaccaacctgagcatgttttgttagaataataaggtatccctattaccttttttcccatattctttatgccattaacattattaaaatctgattctcctcagtttcctaaaatcagtaaacattagagaaatgcttagatgcaccaaagttaacagtgtaagcataaaacagaaccactagagggctatatttacccacttagtttaattttataaaaatcctagaatggcacagcagaaacctaagataatccttttgcttcagttctcttgcctgtgtataaactcaagatgaacaggttgatttatctgtcccaaatcttatagctaccagtactcacatttttataaatgtaatattgttatacctatactagaaaagcgaatctcgtcagtattgttttcaaatgaccctagagcaaaaaacataatacccaagaggaaatcactccctttaaaaagtctttgtcttttctttcattcaatatgcaaaacaaaacttaaaatttttgaatttgctttgggtcatactaccttccttttctgtaataagttatacctagttgtagcatccatgaaaaattttccagaaataattatttctaagaactgaaaaatatataatttcagatagtcagctttctgctgcagatgaaagttttgatatgagtgaggtaggtgcatttgaagttcttttttatgcttccttcatgggtgatacagaaaagctatattgggataaggcttagaaatacatgtgaatttgattcaaaatgaaatgcctcaaaaaaacccagaaactaggccaggcgcagtggctcacacctgtaatcccagcactttgggaggccaaagcaggcggatcacctgaggtcaggaattcgagaccagcctgaccaacatggagaaaccccatctctactaaaaatacaaaattagccgggcatggtggcgcatgcctgtaatcccagctacttgggaggctgaggcaggagaatcgcttgaacccgggaggtagaggttgcagtgagccgacattgcaccattgcactccagcctgggcaacaagaacaaaactccgtctcaaaaaataataataataaat

SEQ ID NO: 317300 - DNA, 4001 bp, Homo sapiens
actcaaggtcaaaggcagagaatcacctttcctaaccccatctgctaggtacaattcacctatggtcttctttgtcctgtcgatgtgcctaactatcaggcagatgtttataaagaatttctcctcatatgcaagcgttttttgttttttttcatcagtataaggacagagaataaaccttagctaagaagcaactgtattaaaaacaaaacgatttgtagctatgattcaaatcagctctctttctgtggtattaagagaattaaagggtagaagcagaaaacctctcataaattagcaagagtcctggaaaaaagtcgcaagtcaagagaccacaaagatctcagaggtactgacagtggaaatctcaaatggatcataatagttaccacaaataatttataaaaagcaatggccaatagattccaatattaccattctattgtaatctatagggatgccatattaatcatatttaacctttccaggcattatgctttcttaggagtccatattcaataaataaatgctgaaaagttattttctcatctaacctaataatccatattgttaaaaaaatgttttatcaaacatttcctagatgtcataacttgcttaaaattgtatcctcatataatggtgaggataccattaccaaataccctggtgtttctactgtattcatcatgtacaatcctataattatagtcatgttgtcttaacttagtgttataaatcactacaatttctataacattttcatatatgaacaaaattaatagctttctcattattgaatagaatcagatgtgataagtgacctcaaatgttttatttagaggcttaaagacaaagaactctaaacgagtatccagcatcttttgaaaggatacctaaaggggcaagaaaaaaaattatctttcccccatgagcaagagaaggggagctgggtggtaagtaaggatgcaaggttttcaggactgttaacagttgagagtgtaggttctttctacctctccctgatcctcccagccctcccccataacaatgaggatgctggtgaaatactagcggacaggatctgaccataccttcatgggtaggctctgggtcaggtgtaagtgagatgtcatccagctctcgcaggcagagccattctccatccatggacactcggaatttgcaaaggtagatggtctccatggcagcctgtgtgatcttgtcagtggtgggggttggcatatcggtcggaggcgtcagagcagacatgatgactcagctgggaccacaacacacacacagacacacacacactcacacacacacaccaaaaaaataaatacaacctcctcaccaaaaaaacccaatacaaagctctgaaacaaagctttcaggaaaagggtgggggaggtttaaaaaaaaaaaaaaggaaaaataccttataggttaagaacaaactgctcaagataaacaattctacactatcttatagacagttcctaccacatagcaaaataagatgatgcttgtcttctcccagcttcctctccttttatcttcccttccctgccccccaccttttttttcagctgagctataggctttaaatcccgcacagctgatgctgccttagctggctttaaaaatctggcctcgatatgagtaagtgaaaaatcctcctcctttgtgcagaaaaaaaatataaaagaaaaacctgaacaaaaaataaacctatattttcaatgtagcttaaaaaaaaaatcctgagctgcagaaatcacttccaggatctgctcagatgagctgggatgctgagttctcataggattggccgtgcgcagtaagcagggtgttgaccaaaatggctgactaatgaactgaactgaaaattcaggctcatgtgaccagctgctctgaacgtagggcaagcaattcccaggatgctttatagatgctgctgatgctgggagagcaattaggcttctctctctcatcctgtacaacccacttccagactgtgctagtcaaactgtgatcagacataacacaatgcacatatcctcatcaattcttcttactttgggatcaaggactgaataaaaggatgacaattaataccggataataatctatagtaaagatggtaaaagaggcagttagattaatttaacaagcatataattcacctctttcattcttatctacatagctattaaaattctttactatgctaaatgttatgttttaagaaaagctaaagcataaaaaattgaggttctcagagggaaaaaaaacaaaaagataaaaagaaaagctaaagtagattttcaatttaaatatcttattcttgggcatttataatttccttctccaaggtacaaaaacctgaccttttaggttaggcagaaatgcaaaaaaaaaacttcaagttaaaaaagtaaaatctttcccaattaatggcaatttcccccctttttgattttgttgtatttatcaagtttctgtattaagcataaaatacgtttctttttttttcttttttcttttttgagacagagtcttgctctgtagcccaggctggagtgcagtggcgtgatctcagctcccaggtccaagcaattctctgcctcagcctcccgagtagctgggattacaggcacccaccaccacgcccagctaatttttgtatttttagtagagacggggtttcaccatcttggccaggctggtcttgaacttctgacctcatgatcctcccacctcagcctcccaaagtgctgggattacaggcgtgagccaccatgcccagccttaagcatgaaatatgtttctaagcagattaaaccatgttatatttttaaaatcctcccattcgataagatactgaagacaattatattttcttaatacacacacacacacacacacacacacacacacacacacacacacacggccctatattatccaatgaggcatttataccttggtagcaaaagggcaggtacttgctttatgaactacataaattacaaagagaagaataagaattttctttgaaaatgttttggacaattgaaagaaagtgtttgtttgtttttgtattgaagggttccaattttaaggaggaacatacaaattcaagaaatatgacctgagactattcctttctagggattgttatcagagggacatcttgatttacctaatttctgaaaactaaaaaaattctccttgaatattgttaaaatctcaaatgcttcatcataatttgagactgaactgaaagaaaaaaatgctaataatcaaattctgtagagaaactggcattttcatattgttacgaagacagggcggatggctgggcgcggtggctcatgcctataataccagcactttgggaggccaaggcgggcaaatcacctgaggtcaggagttcgagaccagcctggccaacatggtgaaacctcatctctactaaaaatacaaaaattagtcagatgtggtggcatgtgcctgtaatcccagcactttgggaggctgaggcaggtgaatggcttgagctcaggagtttgaaaccagcctgggcaacatggcaaaactccatctctacaaaaacaaaaattagcaaggtatggttgcgcgcacatgtggtcctagctacttgggagactgaggtggaagaatcacgtgaggccaggaggcagaggctgcagtgagccgagatcataccactgcactctaccctgtctcaaaataaaaaaaagaaggagggtatactggtacaatgtaagaaggcatatatataggcttatttataattggggaaaatcagtaagttactaaggaaagcaaaatactcctggttttatttctatctcattctctctcatcattaccctacatctagactcagagccattcattcattcattcattcaacagatattcactaagaggtgctccacatgccaggtagtgatccaggcactaggcacgca

SEQ ID NO: 317301 - DNA, 4001 bp, Homo sapiens
acacagaaagaaaacatttttggtgcaaacaaaaaaagaggcggtgtttaaagtacaaagtagaaggattcctcagaaaacaaaagcaaagtctccttgagaagattcttatctttgcctcctctgtataggaagactcacttctgccatgagctgacaatccatctgcacattagtgcagaccactccaacacacaaactatggcttcactaagacagtcaatggtcagtgtctgcccactgacttattactcagtaagtaataaggaggtgtgaacactgggcaacctccagctgaatcacatagacccttcctgttaacctgtcacccaccatcacagttttggatctcttgttagatttaaagagcatgggtttagcagaaaagcaatctgggtcaactgcattccttctcttaagctgttacttgggataaatcgagcttccgcatctgaaaaagtggcattcagtttggcgcacacaaacttattaaccatgattatcacaacacatgcacataggaaataatcaataaatattatcttttcctaggagatggatcggggcagaaaaggtgagtcagggtttcttggcagggcagagcagctaaaagatttgtacttgtgctttaaaaatatagggtgtatggtgggaaaggtccttccctcatcgcttcaggcaagtttctgtctccctttccagaactcatacagcaaagtatttggcgcttacagcatgccttgtatcgtcagccacattttcatactgtaagagcttgtatttgaaaatcagatttaacattcctctaagagtccttatattcattgacgactctagggccctactcgtttgccagcacagtaaacagttcactaataaaaaatacagcacggagtgtgggtcagctgcattcagagcgctcgcgtgtgccagtggctttaaaagtggaggcctcttcccgacaaccgatataaccctgggaggtagccttccaaagccacacattcccttcttgtcttctcatgcaccgctccgatttctctttccaatccgggggacggatctgtcatatttaccggcatggaaggaacgctcgtaaaaaattagttactagtattactaaggccgcactggcggcggcggcggcgcagcagccacacctactcagctgccgcggcgccgggagcccgaaaaaggcgggtcagaggggccacggggtctccgggcgccgccccctcttagactccttcggggaaggttcccagcccgggacccgggacagggccagggcgccccgggtggaggggggcaggcaggccgcttctcgcccccgcccaagcacgtgggaggccggcgaagaccagcgcccagcccaagacgggagagagaccaggccaggcaggagccgcggcctggggagacgcggaggtagaatccggcgcccgaaccgcggtcgtcccgctgcctcctcaccgggcgcctcgggagaacagcttcccgagggtagcccctaaagcccccgcctcccggccacccggctcgggtcaccccgcgggaggcggagctccgcgggggccgggccggccctccccagccgaatgctcccttccccgcgggcgtccccatgcccctccgccactcacggtgcttgccgctgccgctgctgccgccgccgccgctcgggtagctcagcagcaggaagggcagcggtgagccgggggacggcggggtcctccaggagcgctgctgctgcggcggcgggcgcactccgaagccggcgcctccatcgccggggtacagcaggaagaagggggcggccaccggcgagtcgggctccgactgcccggcgggggaggccggcggcggccccgcctcgccctctcggtccgtgcccccggcgggagcgcggcgcggctcctccggccgccactccccgcccctcgccggctcctcgctgcaactttcggcaccagcggtgggcggcggcggggtctcagccatgctcactccttccttcgccgcagcctccgattcgcgcccgggcctgggcgggggagcagagggtcagggcgaggagccgccgccccgtcccgtccgctgcgccgccgccgccaccgccacctttcttctcggccacgggctggcgcctgggctccgccgctcggcccacagcccgccccgccagggtccaagccagctggagggaccgccccgcccgacggcgcggcctcgctaccggccgcctcctccagcccctcccgccccggcccccagcctgtgactcggctcccctagggggcagcgtcctcctcttcccactccccaccttccgcttccctccggctgggctgactgcctcccgaccctcgggccctgggcctcttccttacccgcccccgctgggccctgtaaggcggtcaggtgtgtctagtgcttgaaaagtggaagacctggcgaaatacctggcggcgttttgtcgtgtaaccgccaactttatcggtagcacgaaggcacaaagatctgggttgaagaagaggcgaaagctaattttaaaaaagcacctccctgcccccgggtattaaactgtaccatttgcctttcacacactgcaacttcaaccgttgattcactgtttggagtattgagctctttatgtgagaaaccaaaggtgggtgtcttccttccaccacctcttttgttcccgtcttgtgcgctgtactgaaatcctgtatttgctttgactttaattccctggttttctagtgccgcgggtgcgcatgagtgcattttaaatcaaacagcttagaatttatacgacaaatgtcaattacaggtcgacagttttctctttcacagtgcccgtgtctcgctagtaattagccaccgttgctttgagaattcgaatcaatgattactgatccagtaattcccttaagtaaacatttctttcggcaataaagacaatttccagttactctcatggttctttatcctggattcctagctgattagccttgtgtttaatgctggcatagaagccatgttgactcataattaaaaatcactgttgtgtaacattttgcccacctgctttttcctcttctctgttcagcccttccctgtgtagaggaagttgtacttctttgaaaggaaaagtaaacatttttattactgttgttattctctgtaaatcacttttgaaattactactcgcaattaccatgagacttacaatactacttttcactgagtcttttaacaagaagcattcaaaagggaaatgtttacaggatagcttcagtcttagaaaatttcttagcttttcggtttctggcatttccctgacctgttgatcccagtcctactacctatttgagtaagttatttgtccagctctgtaaaatgattatgttattcatagatactgtgagggctaaataagaaatagaaataaagcgtttaaaatacaacttaacattggggtaaataataattattacggccaggtgcggtggctcacgcctgtaatcccagcactttgggaggccgaggcgggtggatcacgaggtcagcagttcgagaccagcctgaccaaaaaggggaaaccccgtctctacttaaaatacaaaaaaattagctgggcgtggtggcgagtgcctgtaatcccagctacttgggagactgaggcaggagaatcgcttgaaaccagaaggcagaggttgcagtgagccgagatagcaccactgcactttagcttgggcaataagagcaaaacttcatctcaaataaatacataaatcaataattattagtagtactcacttcagcagcacataaactaaaattggaacgatacagaaaagattaacatttccctgcacgagaatgacctgcaaatttgtgaagtgttccatattaaaaaataattattattagggatattttatcattttggcaaaataacatttaacttacaataataaaaacatactgagttgggg

SEQ ID NO: 317302 - DNA, 4001 bp, Homo sapiens
agtggttatccctaggtatttgaaatgtaggtgcattctattattttgcatttttatacttttctgtatcttgtgacttacaatgcaaatatatcacctctataactaaagttgttttcattaaaaatatctgtacataataatgctaaagacatttctttctttccttttcttttctttttttttttttttttgagacagggtctgaactctgccacccagtggagcactgtggcgcaatcacagctcacagcagccttgacctgctgagctcaagtaatcttcccatcctcccacgtcagcctcctgagtagctgggaccacaggcatgcaccaccacacccagctaattttttttgagatgaagttttgctcttgttgcccaggctggagtgcagtgatgtgatctcatctcactgcaacctccacctcctggattcaagcaattctcctgcctcagcctcctgagtagctgagattgcaagtatccgccaccatgcccggctaatattttgtagttttagtagagacagggtttcaccaggttggccaggctggtctcgaactcctgacctcaggtgatccacccgcctcgacctctgaaagtgctgggattacagacatgagccacagtgcccagcagcacccagctaatttttatttttttttgtagatatagggttttgccatgttgcccaggctggccttgaactcctgagctcaagcaatccgcctgccttggcctcccaaaatgttgggattacaggtgtgagccaccacgcccagccaatattttctttgaaaacactattttcaacacactgacatacaattttgagaatatttaattatgatgaaaaatatataattacttagcagccatttgggaagaagtctttttcactgttcctctacacatgtatttctaagctcatcaaatccttctatttgttctctggaaaagctcaaataccaaaaattgcaaaggaacagattttagtatttacagccctgtactcaaaagcacttcatagtagtcacagttgactggtggggactagaggaaccacaatgaaaaaacatgcccaattatatactctccacctccccctcaggaggggcaccatcaaaaaagcaaaacacagaacagctactgaagagtacagaatatggtggatgttctcagacgacagcacttgctctttccaaccagatcttggttggtactcaggcttgggaatctgacaacgtgaattccgttctgagctctatcactgagtggcaattatcttctctggcacagcatttctttttggaaaatgattcatatttcagtgattagtttaggacaaatgactcttgggtgtcagaagctgataacccaaagaagagttaatgtgagttctgttatgaagggcacaaattaaagattcaagtagaagctctgtttcacgaaaggtccagaaaaggctcaccaatagaagaaaatactgtaaggcactgtggttaatgacagtgcactgaagccaacgctagtgcaagagtatcaaagagacaggaagaaactgaaagtagtcctgaaacaggaaggaaaagctgattttatgcagagtatgttacggtcagatcagaggcagcatgcacctctttcgtggtttagataggaactggcatacaagtacagagctactgatatttctcacccagatttagaattttacaaaatcctggaagctaagtgggtaaaacttaccttgaaagggtgactagccaggttattttcagggcagagcaacaagaagggatgaaccgtgtccagaaaactttgtcccataggcttctgagactgtattaaaagctacaaccttctcactttgagaagttcactgagactgccttctgaacacataatcacagctcagagaacctgacagtgtaaatctaaggctgactgcactggtggcaacaaatgtttctgtaatctcaccaagggccaattacaaaagggggtgtgccacagtgaaagcaaagaacaataacacaattctgtgaaaaagagaatcccaatgactcaggttttattttccaaacacttaggaaaggaataaatcaaatgctgtaaatgcttctaaatctagacactgtgggccaccccatacactgcaaacagcatttaaacagctatgaaaacagagcatgccagtaaataaacacaggtctgtgtttgaaaaaaacccaaaataaaatgcctaatagaaatattaaaaaattataatggaaattgaatctaaagcagtagctctgctgtgaggcaaatgttcccactcacagatgtgtgaaactgtcatagaaggtactgatatataatacaaatatctgttggatggatgattgcacacccgttaattttcataaagatttttcctttgaaaaaggaacatttgttttcatattagagtaatatgtcctcttgtagaatatttgggagatataaagaaatataaagaatattataaaaatcacccataattccactatccagagataatcaatttttatatttttgatacatttccttttacttgtgtttatgtatacctatacttaaaaaaattgtgactatagtaaatatgcagcttaagagacagcttttaaagttatatccaaacattaccctacacatcaaatattgttccacaataatttttagtgtaaggtgttctacaacttattgaataattttcctcttaggctatttaagttgctctcaagagtgtgttacaggaagtcagaataccgtgataaatatacagtacatacataaactttttgtttgtatctcttattatttccttaggataggtgtctggtacaattactgagaattaattttttaaggtccttgattcacaatgataaaatgatttctataaaggatgtaccaatgcacattcccactagcagaggccccaagtcgtcccatatttttatcaatactacgtattattaagatatatttaaacaacaaattattacattattctaaacttatattttccaaataatatacagtcggtccagaatatgagataaacaattaaaaataaagaaaacattagaaaccataaattaaattgtgtgtaatggaggaagacaaaatccatttttctttctttctttctctctctctctctctctctctctctctccctccctccctccctccctctctctctctctctctctctctcctctctctctctctctctctctttcttttgaaatggagtctcactctgttgcccaggttagagtgcagtggcgcgatcttggctcactgcaacctccgcctcccgagttcaagtgattctcctgcctcggcctcccacatagctgggattacaggcgcccgccactgcacctggctttttattttttttaatactttaagttccggagtacatgtgcaaaacgtgcaggtttgttacataggtatacatgtgccatgttggtttgctgcacccatcaactcgtcatttatattaggtatttctcctaatgctatccctccccccagccccctacccaccgacaggtccccagtgtgtgatgttcccttccctgtatccatgtgttctcattgtttgactcccacttatgagtgagaacatgcggtgtttggttttttgtccttgtgatagcttgctcagaatgatggtttccagcttcatccatgtccttgcaaaggacatgaacacatcctgttttatggctgcatagtattccatggtgtatatgtgccacattttctttatccagtgtattattgatggatatctgggttggttccaagtctttgctactatgaatagtgccgcaataaacatacgtgtgcatgtgtctttacagtaacatgcaaatcctttcttttaaaatgattttatggagtaatagggaatcactgagttcaccagaagtttgttggatatctacgataaata

SEQ ID NO: 317303 - DNA, 4001 bp, Homo sapiens
aggcataaaacaccgactatatagatttcagccaggctccacaggtttctcttgctacctttacagaaaaaacaaaaaaaaacaaaatacagaaattcaagccggattcaagaataactaagattagattggaacaaaaaccttactcaagatatagtactactccttctgtccctaatcctttcccatattttaatttatgacttggacaggtacaaaaataggaggcaagtttattaaatttgtggatgacaatttgttgggacagtgaataatgctgatggctgaataagaatccaaaaagtctttgaaaagcaagctaatgatgaaatttagcagggtaagtagaacttgtatcaatactcagatacctaaatgtagaagttgaagatgaaagacaaattgctttgtataaagcacttaaaagatttcagttgacagtaaatttaactagacaaaacagcaagatgccacaattttgaaacaggacatttaaaaaattaaaatctgtccacaaacacgtgattccaggatagtgaagagattaacaaagaatggatatatgaagacaagctaaaaggaaccacttcctcagagaaggtctgagaaactgggcaggaaactatcttcaaagatcagaacatcggtcatctgaaagaagaatgaaattttcttgttaaactggagattcctgggcccaccacagaaattctgattcagtaggtctggggtggagtgcacgcatctgttttctagcaaccatctaaatggttctaaggtaggggactatggtccaactctgagaaacattacactgtatgttctttgctttgcagggagaagaagctattaacgcattcacttagaaattcacccggcaagaatattttagaagagattcagatatcaactagctagcttgttggactttgggtcctttaaaggttaacttccaatccagagattctattacatttatcatgtaaaagtagtaagtttcaagcattatactttaaattaacagtgaacttatctaccacccaataagacctggtttctagtcccgattctaccacgtacttactgtgcagccctgcggctatcatcgacccacctatcaaagttagaaggttcccctacagatggcccgtagcacccaccccccaactctaatattatatgattcaatgtcaaaatggcatctcacaaggaaatatttgagcataaaccataaattcaggtggtacatgaatgctcaaaacagacagatgggtaaaagatttccccaaacaatatggacagaaactcagatgcaccaccagtgtcattttcttccatgagaaatgtaactaactcaattagccctctactagccaagagatttaaagatgaccagactaaaatttaaaggtgatcagcctaactcagtaaacaggcactgaacacatgggattcaaggagagccaagagcactggatcgtgcaccaaggacgctcatccctgttattaagtaaccaggggagactcccggatttgcaaaaatgaaaaatgaggggggaagagtggcagaggcggactcctggccattcacgcgcgcttgggtgggacgccggtgaactcggggcaccccggccggctccgagggcacagggcacgtgccgggcaggctgtccgggcaccaggtctcacgggggcccggggctgcgcgccgcgcccgcgctgggagagggccctgagccggggggctcacctcctggtcctcgttggcactcatcgcgccggtcgcggggcgcctcctgagcggacggcgttcgcaacaacgaagagaaagcgaaggcagcggcccagaggccgggcgtccccctttcgcgcctcggctgtgggggcggcacagtcttggcactggcagacgccaactgcgcgcgccccgagcctcggcagcgcccagccgccggcagtgggctgtgggctacgagccggagccgcggctggtggggcctgggaagtgcagcgtctccctgacgcttggaggagcggcgtaaagttccgggacagcgattggtgtagagcgcggtcactcaggcccagaaagtgcttcctgtgccgggggaggtgggtacagggaagtctcgcctgttggaactggctgtggggctgcggcggtggggacgggccacggcgttctgtgacatccccccgcctcccctcgtcttctcccggctggcggcgaccggcctcagctgcagcgggcccggggcgtggggcctgggtgagtccgggcccggagacccgcggggccaggcgggaccgccgaggaagagagctagctcttaacaatgctggtttgggggcctgcgttttgcaatcccatcgacgggtgcaatcctggcacttctcttttagacccgaggaaagacgcacccgtttctagggcctcccaggtttaagacgggggaataagaggaggaagatatctgcctttagggactgcaaggttatttctctacctttcctcactggagctaccagaacagatactgggaccatggggacggtgtttctcctacgttggattgttgcttctcatctttaacatcgaaacatcatttcgtccccacactgtcgttcctcttttgttcgttttgtagttgaacatctctgaatcccattcttagcagccttgtgtcctaacaccctgaacttccagttagttaaaagaaaaaaaaagtaaccacattaggttttggggtttttttagttgccaatttgattgggtcacctttcttatctttcacgctagtttccagtttacttcccttgcattacttgatctcccatccattattcaccttctatagctgcgcctcctttcgtgtatagtttcgttggttgctccattggatatctgaaaatttctccttccagcctgtcattgaaatccattcgatctgcgcctgtgcgttatcggggttctcattcaaattcctttgctgcagaataagcacgaccatttcaggtgacataggagaatgtggcaagactttctgatacaattttcgtgcagcaattttgggacacatttcccataatttagatctctgctgtccagttctgtagccagtagctacatcaggcatttgaaataggctagtctgaattgagatgtgctgtgagtgtgaaatacacaccagattttgaagactcagtacaaaaaaaggtaaaatatgtcattaataacttttatattattgtcagtatgataatattttggacatactgtactgcgttaaattgaatattaaaatgaattccatccacgttttactttttaatatgactgctagaaatttttaatttatttatgtgacttgtatttctattggatgacagtcatttttagttcctcttatttcaactccatatttaaagaccacagctatgtcttttgggcctctggagttattacaggaaatggcctctagtctagactcgttcatattaagcaaaggggcccgtattgtattttggtcacttgttttttgttgttgttgttgagacggagtcttgctctgttgcccaggctggagtgcagtggtgcgatctcggctcactgaaatctccgcctcccgggttcaagccattctcctgcctcagcctcccgagtagctgggactataggcacgcatcaccatgcccggctaatttttgtatttttagtagagacggggtttcaccctattggccaggctggttttgaaccgttgacctcgtgaatcgcccgccttggcctcccaaagtgctgggattacaggcgtgagccgctgtacccagcctggtcacccctttttaattttcattcctacattacccagaactagactgtttctttctctgaacatgcaatcctttgccctcataacttaatcctgtcctaaaaatatttaaacaattctaaaacaatctgttgtagacatttctggcaagctttgcaaatcatttat

SEQ ID NO: 317304 - DNA, 4001 bp, Homo sapiens
ttcccccaccctaacatgcagttaataccatgtagcgaggaattgccttgccaaactttgctgcaaatgtttatgccctcatttcctggggaaggcgtggaaggatgagaacttggagctctcaacttacactacactcccaaattttcttttgaatcaaaagagaagttaaatttaaagagacagagggttttggcatcatcatcaccaccatcattattattttctgctcatgaaaataatttattaacaaaagggtacaggtaaacatggaatttttttcctaacctgaaatgactggtaacacagtggccaaagttgcttcccaacctgccctaaacaccttttatatacccttaaattcttcatactagaaagactattttggaaatattcctctggcttatttaatctattcatttcattgaaatggaatagggatggtaaaatatggcattaatttttgaagctgttggccacaaatgtcaaaagctctggtagtttaaacatgcaattataattagaaacattacattttttatggtggtttgcaatttattgttttcccttcagttaaaaaataggactgtcagtaatcaagattagagatggagaaggctaggactagaatatttccccaggattctgaatagtttctgtggttttgatgctgtcctttaactttagatgcgatggagcagagggaaggaggaaagaaggaggaaaaggaagatataatcactttgacatattacaattgggagagtcaggattgaaagttaccctgagacattccttaatagaagagctcagagttaacaaaacttatgcaaacttttaagagacacaggactataaaaaggcttgttaatttctaaattagtaaaagcccacattcccggaatcataaagtattaaagatacccagaaagttttgttcttggtttggctttgactttttcatcatttattacctaagaaacaaaaacactttatttctgtctacatactataattcaaatggagcttaacacacaacaactgtttcccttgaatttaaaaaagattttctgaaaaataaaccatagcacacacagagaaaacaaaatttgtcattatagtaaaaataacatgcccatttggagcttcttttgtgcctatgtttttcattgctttgtgctttcccttgtttttctttcaaggaacagtgataaaccttgctaaataaaaagagttttatgaatgcatctccctgcccagaagcacacctatgatagcaaatgacaaagaataagggcgacagagcattacaactatacagaaactggcacaaatgtgagaactttcctaggagttttcaatgaatatattccttgaatacagtttaagaattactactctttaaatattataatgttgcttaaaatatcaattatatgaattggttattatgaagcctaggtttacacggcacatcagtctcgcttcactattgactatgataagatattatggtctttaatacaaataccagacatatactaagaagaacaattctgaagtgagattacaattttatcagcaagtgcattttatcttaaaagcataaatataaggagtaaacatttgtgcttgtggttattccacaaaatactaaggtatacaaaattagatactgagcatacttacaatattttccaaaaattaagatgtagaagaagacagaaccagatgtcatttccttctatctgagcaactgattaatgaaagtgagcaaaatttggtcttggtttctgaatcgcatacagctcacagtggttgtgtgctatttctgtctgcaatcttagcagttacaaagcagtcctccctccttccactcccatttcctttctctgtctctttccattcctctttttttctttcctcctttctattctcaggatctctcctccccgccctccttctctaaatgtcctaatctccttctttacacacacgcacgcgtgcgcgtgcacacacacacacaaagctgaaaagcaataaaaagtttcagagaacacataacgctatctacaaacgagggcgtatacgaagtctgagaaatgtctgaactgatcaaagacacactaccagaaagaaattgagctagagatatctcataagcaaaaacatattttttcccctaatgacacaggaataggaaaagaatggaattacacagggcaaaatgcctttgtggaattaactgtgggacagcgattaaagtctaactacagcaatcgtttataaactgtttgagtttgggaattcgaacaataggatattgttgaaagaagaatacaaaggaataaaacaacttaaaatccttttgaacttgtgaattttgctacaatggagaccatgacatgtcagtggatgtcctggagcaaagctggcctgggtttgaattgtaggtcccctgtgactttagagttatgcaggtgctgactcttggctgagccttgcttttctggagcaaaatatgtatgcagcaaggtagctgtgatggccagcacagggcatagtgaggggtgtaggtcctactgcattataggtgattactaagtgtcagtcattcatatgatgatttttattattggaccagtggggggaaaagtatgaaaatgcaatgaacatttctgtagactgcattttcttttaaccagactgggtcattcttatttttcaacttgctaatgaatttctggaacaagtgagtagtagccctttgacatgaggaatttatttttgaggttaatgctccctactcgtagatatacacgtagaatctgcttgaattacatatctgtatatcattgacttcaatataataagcctatttctaaatgagggctaaaaggttatactaacactgcttcctccctccataaatataattaattccatgaaagaagaattttaatatagaaatcttcacaaacccttattcatttagtagtagatttagtgaagacactgttcttttgatggacatgcttatggttaactgaatttagtcccataaaatgttcactatttttaataatacttgaagtattttaagattattatgtgagtggttcatggatttttttaaatttatttagaaatagtagttttttggaaggatgctgtggaacgtgtcaagggcagtttcagaagggggacccataagaagcttcttaatagtaaaattgaaggacttgctttgggaattgtcaacaaaaagtaagctgttgatacagaggtcttcaaaatcattctgatgttattttgcaaactttgaaacttttgcctgagcgaatatcacagatacatacaattagtgggcgggtagccaggaagtactcgttaacaatgtatttttaatctctcaaattatcagggcaaaatttccaaatcacctctcattttattaagaatctattaggttttactaaaatagatattcatctgaatgaataattttcatggtttgttttctcagggtgtcacttctgtcttatttttggcaaagacagtgaatctggcatattagttttatagaagtattttggtggcaaaacccaaaagtgaatatagcacaccctggccatacattgaggcaggtactgtttctactatgggctggagaattccttattgtgagaggctgtcctttacattgtagaacgtttagtggcctccctggcctccacccattggatgcctgtagcactctccagttgcgacaattaaaggtgtctccagccgttggcaaatgttcctgaaggacaaaatcgctcctggttgagaaccactgcattgtagcaaaagactcccctcagtaatgtttaggtattattattattattattattatttttaccagattactgaaatagaattcttattaagatttgaattaaagtgtgttttctcattctcttgttttgcagtttgaagacacatattaaagagtt

SEQ ID NO: 317305 - DNA, 4001 bp, Homo sapiens
cagatagggccagaaggccagcccagcccagccctgccctcaggcggacattgttctctgactccggctttgctgggcttcagcagcctccggagggagggctgagaagggcacccagggcctccccgaggtgattctaatgtaacacattagctggacccccagctttgccattgcttctcaaagtgtgttcccaggacacctgtgcctgcccctccccacaccccagtatcttggatcaaagtcctcatgggttcaattctcatactttgatcattatcagaacaccccgagccccaagcccaagttcccaggatggggctggggtgtttaatgaacatcagagtttgagaatttatgttgtaatgttaagctcaaaaagaaattacattgcatgtaaatctcactcacagcaatgttcatatggggaaaaggctggaagggagaggaagcgtctgtattccaggggggatttcttccctccatatttatctatttttacattttctaccaaaaacagaactttatttttaaaagatatctttacagaattcacatttagaaaatagaactaggccaggtgtcggggctcacgcctgtaatcacagcactttgagatgtcgaggctgacgcattgcctgagcacaggagtttgagaccagcctgggcaacatggtgagaccttgtctctaaaaaaaatacaaaaattaaccgggtatggtgacatgcacctgtagtcccagctactcggtaggctgaggtgggaggatcacctgagcccagggaggtcgaggctgcagtgagccgtgatcctgccactgcactccagcctgggtgacagagtgacatcttgtctcaaaaaaaaaaaaaaagaaaagaaaagaaaatagaagcaatattctgaagtgtttcatgtctttgaagtgattctagggctgaaaatttcaggctttcatttttgattatcagcatctatgtgggttagccccttagcaggtaggcagagtctggtggggcccgaaggggaggggaaggaaggaagaaagtgggggagtgagaaagaaggagaggacaggggtcaaagggaaggggaaatggagagggtacggcttctgttcagcccagccggaggctgccccgggcggaaggaagctggtcctggccgccctgaggggccttctgtgaggctcaggccggtggctcctccctggcagggagcccaagggaggtccacagctctgcgcagacaggtgccaggatggagcctcctcccgtccttcctgccagacccactaataccaggcaacaaggggcctgggaatgggagcagggaaagcgggcaagtgggaggcagagctggggcgtttatggccggcagccttggaggacagccccgagggctcaagggcttggcaagcttggcaaacttgcaaatggcagccctggattgcattccgcccctgcccccactgcacaggtttgagtcccactctcccaccaggcctgtcacaaatacactggggtcaaccccatgtttcaaggatcaagctgaccacaccctctccctgctcagatgctcccgcctcccctgcctttatgccagggtgggtccgttccttggctgggcttccagggcatttcaggatctgtccctcttgcctctgagccccttgaccgccgaccccaccgcagctctcagccctctgcctgccacgccttccccttcttccccagcccccgctgagtccagcactgccggcctggctcacctgcaggaagcctggtagctccttctccatcagcaccttgagctcccccttggtcagggtctgcgtgctgccctcgctgcccgaatatcgggaaaagacgtctatgatcatgcccatggctgtctctagttccgtcatggtgctagattcagacccaccttcctcctgggggctggcagggccgagaaaatgtcccactggcagcctcttggtgctttataaggcagcctcatattgacacagagggtgggacagtggggttgggacattcaggaagtcctgcccctccccattcatgtgctcagttctgatgaaatgcatcgttgtgatgacgtttctggaacctttcccccagccaaggcccagggtgtgggctgcctccaggcatccacattttacagtgttcacctgtgtctcggcgccatcactgagccacagtggcatcctcattcctggccctccctgggtaagtgggcacggggtgagtgtgtgtggagtgagtggtgactccgtggccctttgtgtcaatatcagagcgtgctggcacccagcgtgctgacacgaggagacatctgagagtgaattcacatgggcgtgtttgtgaacatggatctgccccatcgtccctttcttagagcactctgtgtccttcagaggcccagcttccacgtcaatctcgctcgctcctcccctgtggggccaaacagaaaactccccttcatcctctgggagtttgctgaaaatcaacgggcagaaggcagatgaataggagaagagcataacagatgtatttgatcatagcttatgtggcacggcagccttcaagatgaagatccaaagatctggtggaaactatccataaacacagttcagcgaagtatggaaatatgattggatacaaaagtaaggctggatgctcacagaccaagaggagagcctggtagggcctgttgagtcagattccctggggcctctctgagcagctctccttccttctaggtgtggggcaggactctttctggaatggagctcttatgacctacagtcaaataaagcaggccagagggtttctttaggctggtttctacacagaaaggggagggagtggagaactggagtcatatttctgggttttatggcagggtttggggaagcctctcagaggaggaggagctggagacaggagggtgggagcaggacagagaaacttttgtttctgaggcttccacgttggggtgttgttttttgagccccggcacttaccaaacccaaatcacccacagggcttagacggcacaaaggctcctgggactctgggcagagtcagggacagtcacacccctccccgtctctatagcggaggtactcagagggtctgtgcttgggaggctgagcgagtcctggagagcatggaggtaggggcctgtgttcacatcctgccccggtcaaagtaggcccacactcaaaggcctctctctcagcagagatcttccagagtgtcagcctccagcaagttccctaacctctcccaacacagcctccaccagcacatgggccgagactctccccacggggctgtggctcaacatagaaaaaccttggtgcacgatggcagcagcaggtctcacaagagccggctttctcagaacacactgcctctgcccaggtgtcctgcagtggaggctcagactggccccactggtgaccccttggggagcagggacaggtccattctgctcactcctgagctgggcagttccctcttgggataaggtcgcacagcacaggccaccatcataccaccccagccagagaagtgggagagagaaggaggctccctaccccagaggcagtgctcctcaggaagggcattcactgcgttatatagatatatatatacacacacacacacacacatatatatacacatatatacacatatatgtatacacacatatatacacacacacatatatacacacacacatatgtatatacacacacatatatatatagatatacacacacatatattttttgtttgtttgtttgtttgtttgcgatggagtctcactctgttgcccaggctggagtgcagtggtgtgatctcggctcactgcaacttccacttcccggtttcaagtgattctccagcctcagcctcccgagtagctgggactacaggcatgtaccaccacaccaggctaattttttgggggtttcaccatgttg

SEQ ID NO: 317306 - DNA, 4001 bp, Homo sapiens
ggcatggtggcagtagcctgtaatcccagctactcaggaggctatggcaggagaatcacttgaacctggtggttggaggttgcagtgagccgagatcgcgccactgcactccagcctgggcaacagagtgagactttgtcttaaataaataaacaaacagatagcagtaaggatgacctgaattagttcatgttgaatttttaactgatgaggggaaagatgatgttgctcacagttttgctacttgacagtactttctctacttaaaagaacagcatattttagtaatataatgtatgctttccagtctttctaactgaatacccaaattatagtccagatacaaaaccattcgttttcacaaatgagccatcgacttcaaaactatatttaaatttcagttatacatttttctgaatattaaatcaatgtatttatctataacacatttttccaaaacaatctgaaattatgcaagttcacctgaagagtttctcatggataacactgaaaactgtttaaacgggcaaaaagtgtcacaaataaacttttcaaaaactttaattacatatactcctgcgagctgtagactagcatttgaaacaaacacggactgagctaacaggcttttacatttacttctaagccaagcgcaagataaaaatatgcaggacttgtggtaggttctcgataccatgttattcatttaccgctagccagatctcccaaaagtagcaacggctgtttctaaaaacctcatagatggtcaaacgaaaagacgtgcaaaaaatcctgatggctgccaaggggatggcaaaaccgcagaggctacgtgctccccaccatcggagtagctgccctcggagctgacagcgcaaacgccgtttacaaccccggctcactgccaggcggcgggtgagctcggcttccctctcactccgctccggaggagacggaacacagaaaagaacaggatcttccttgttcgtgaaggtcctccgctttctcctagacgacgggatttagtaccgcctggggccaaacaccagcttgggcagcaaaacaaaggcgcctccattccagaagagctgccgggctgcaagaaaactactctgggccctcagtgcgccggtcccctttgtttcgtgtcccggtcgcagaggagaaggaagagggaagactgcgcgggagagacgcaggcagcgggaggttgggggccagggtgggaaagaagaggggaacgacagcctgtgtgtggtgtgtgtgttggggtggcggtaggagttgcagcgactttgttatttgcttccaaacacagactccacgagaccgcactgcagccagtgcggttgtctgggggaccccgccgacaacccgtgcctttgcccggctcctggggccccaccgaggggcgggagggcagggcggtcccgcggtttacttacgctcttatccagctcgatcttcaccttcttctgggagatgctcttctggatcctcttgctgaagctggcgttgcctgccgcccggccgcaccgctcaccatcctcccgcaggcagcacagttgcccggggcccggcccggccgcccccgggggcccagccgctgagaccgcccccgcgcccggcacctcagccccggtgcccgcgccggtcccgttccccgccgaggcggcggcggccgcggcagcgaccactgcggccactgcggcggccgcatccccgccgcggctcatctcgtcaggcgtgaagccgttcatgtctccgagctcccgaggccggcgctgacagaaatcccctctctcctggccgctccgcctctctccgctccggcagcggcaattcactctgcacaccaagttagacagcggcacggccaaacaccaactgtcccgggcctgctggtctctgctggcaccgaaacagtggacagtgctgagggccgggacgcagactcgagcgtctcctggagcggggaccccgctcactgtcacatggggacttcagcagttggaccgctacgcctccgcctccctccggccccgggacctgcgcaagcgcgacgcgccccctcccgtcccgcccctttctttctgccgcgcggccccatgggaattgtagttctctgctgcagagtcaacctgagctccgccctgaccccgcgccatgagggacggaggaactactaatcctagcatgcatagcgcggccacggacccacttttttttttttttttttttttcagtaccgggaaaacaggagcgtgtgattggggtttacagtgttttctctcgctctctctgtttctagggaattcgggctgtgtttagctgctggaatatcgtagaattggttttcagagaagttcctcgactcctgaggcgaaacataaagggatgggagtggtgtgggaagtgatcgtgtggggaaaaaaaagtttcgagcccgtttcgcatttgtggagacagagtttttggtgtgaccactcttttgtgggaaacccaaaccaaggagaactcaggagaattggcgctcttcggtcctggaggttccgcagctaacatcccggcttgaccaactatcgaggccgcaaattaatagggcacctcctgggaggaaaacgcccatcctgacttctcaactgtgacaggtccccctcacaaacgccttgcgggggggtgggggggcgtttctaaacacttgcatgttcttacaagggaaatgtttttattcttgggcgcaccaagttggccgcctcctgaggtggagtacggaccagttgacaacagggctccttttcacctccacgcccaaccttttccatttctcctcaaacggttttggagaagggcggagtcatatcattttaaaggaaacttggaacctcaccaatacaaacgctggtcgaatgttcccagaaacttccctgcattagctctaccgggcgcggggagcagaaagcgcatttcctgagtcctgaaaagcgcgtgcgcgcctgtgtgctgccggcgtttgggcgcgcctgcttgtatgtatgtgttcgcgggcgcgcgcgtgtgtacgtgtgtgtgcgcgcgtacgcgtgtatgttcctgcgcgcttgcggggacgtgcttgtggagggcggagagagggatgggcgtggctaatatgaaagctgcatctttactagttagctaccatgcgtcattatttatcaaaagatatatgctgcttaaacacaaatacgttttaaaatatattttaggcagtagggttttgggttttttttttgcaagttcttttggtgagtaaatttagtgataaatgatttttttttcttttgagacagtttgctctgtcgcccaggatggagtgcagtgcagtggcgcgatcctgcaacctccgcctctcgagttcaagcgattctcctgcctcagcctcccgagtagctgggattacagacgcgcgccaccccacccagatgatctttttaaatgcaaaatgccatcgacgcagaaaatcaaaggtatccattgtatctgtgcgtttgagttctaggatatgacaaagaaaaacaatttaaatattacgtaaattcagtaggaaaaagaaagatgatgactgataagtacattgtgtacctccttaagctgtgctgtccagtaggctgtcctctagccatatgtggctactcagcacttgaaatgtggttgagacggaaaaactgaatcgttaattgaatttgaattaaacaaaaaccaaaaacctgatgctcgattcaattgttggaatacttttaagtgtgtttgcaacaactcagatatatgaatctgtttttccaacttaaattttatgaactctaactttagcatatgaattgagatgtgctgtaagtatatatcagctggactttttttttatttctggacttactacaagaaattttcaaaaagaatattgaagtgcacattaaaaatttttatatatgtttaaatgttttggatgtaatgggttaaac

SEQ ID NO: 317307 - DNA, 4001 bp, Homo sapiens
acagagtccattcctcatggagaaaaacacttggaaatatcaacacaaactcaggccccagccaagttgccttacagccaccccctcacccagagaaatggagacacacagagaatctaagggctggctatatgggaaccacggggaagatcactcatcctatagggctccttgaaacagcctttcaaggccatataagaaaactcacatatttactataattggattgctttactctagtcacccaaagcaagagtttacatcctcaaacacagctcaccatggatttggacatggacaggagtggagaaaggattcagtttcttttttccttgaacatgattgctcaaaggaaactgaccctcgagacgctcagacagtgggccttgtcttcccttggcaatgtgaactttaaaaattacattatgctttgccatggtgctttttgaaaaactgcctttaactgccagatttcaggtactcacttaattacttttggaaactcagttaaaggaagatatccattgccacctggaataaaatagctttactgactggagagtgcagtgattcaaagtagactaggcctgggcttttttatctggccgcagcaagtgcagaccagtgggagaaatgaagcgtgcagttatggatgctaacaagaaaggctgctgctccagtgattatttttcttttttaaggaaaaaatgatcccagtaattctcttttgttcctcttttgacacagcttggtggatgtgggggaaagggcagatgaaatgaccagtgaaatcaaaagatgaagtcttcttaaaggactggctctccagcccaatcatctagaggaagagacaagttcagattcttgtagggtatctaaatgcatctgtgcctgaaaattatggccgtttgagaaaaacaagaattcatggtgagacaaagcaacacagactgttggtacaagatacaaagccactaagtcagcgttcagcaaagactgatggatgaattgtcacccagcctaaaggactggcccagctaccaactgcccctgcccagcccaagagggcaagaacacaatagaccgcacacccacgtctcatccccaggcgcacaccacttcaaaggctacagcaagcagacaacataacctgcctcttctgcggtgtctttcattcagttctgtttcttcatgaagtgggaaggaaacaagtttgggcccacctgagattggggtgtagacggaaggagtggggagagatgcaaacgacagaacacaaccgaaggcctttttaaaagtcaggatccatagccttacttatcactgtaaagggaacagagtcggctccatccttcctcatccttctttaaccctcgcctaccaagccctggaagacagggacgcaagaagagctctagcgcggagggtctgcctgagtgctggtctttcccatacaagatgtagcagcagggatgggagggtgagctggacgactccacaacacacacacagcccgccccgcctcaccttctcgatactctggtctacagccttctggaagacccgggccaccagcagcgtgacgctggtcaccagcaggagcagggacaacgtccccgccgtgtagaagcagcatcggcccattctgtgcgccgctcacgggccgggccgggccgcacccgccagggatccaactgcaaggagggaggagccgccgcagaggcgtcgaagacccgggacccttcggcgccacgcccacgccctcccggcgcacggttcgtgcgcgcagctctgggctccgcggcctggcgagcgcggccccgggtgcaccgggcggatggggccgcggagggacgggcccggactcggtttcggtttccttcgccgggcagccgtggcgcccgcctagcgcagctcgggagagtgcagggagcgcgcagggacgtgacgttcgcgggccgggctcgccgcaaccccgcgaggcaaccgccggcgactgcgcggggaggcgggcgggggcggaggccgcagtcatgtgccctgcggcggcggcagtgattcggcccgcgccctccccggccggtccccggtggccctgagtggctgcggcgcctgagccaggcccggcctggccgctcccagcgccctgcaccgcaggcccagcgctcgccccaccgaaattgccgaacctggttcacacactcatttactcattccgcagataggtctgagggcctcccatgggccacgcgctggggattcaaggtggctgggacattcccctgctctagaggcgctcgcaagttagcggggacaccgttaccgcaattacaacacaatgtagcaagtgcttctaccaggtgcctgctgagatcatgccagcaagcatgttctgcctggatgacctagggccccacattgaactggggcctgggggatgcataagtttgtcacgtaaggggcatgtgcaagaatggaagatgtgcaaaaaagggaggaggaggcatttcacggagaaggaaacggtgagcaaaggcattgggggtgaaagagcaaaacctgtaggaagcaagaaggaagttccttttgactgtaggctcaggtgttcagggggtggagtcggaggtgttgaggccccaagaggtcagactttgaagggctcttggtatcctgttaaagatgtggaagttgggaaggagcttaaagcaggcatcgctggtgttcttgcctgctttgctcactgtggtgtcccagacacccaggaccaagacctgcacacagccaggactcaagaagtgttcgttaaatgagtgtttcttctacgccagccctttactagtttctttgcacagttctactcatttaatacccttggcagtcctatgaataggaggttgtgtttgtcccagtcctccagaaacagtcccagatgggggtactatgcaagagagttttgagggaaaacagggagctggacctgggatgcaggtgtgatccttgtgaaggaaagaggcaagcaaggaaggaaggttgggtggaaggaagcatttgatatatatacagtccatgtataaaaagttcagcaaggccattggggtggggaatcctttagccaaatgggcttgtcccagaagtctggcatctcccagaaagaggcccgccttagtatccctgctgtgctcagtcatgagctgggagcagccttaggaagctggcctttgcagcaacctagggataaatatcagggtatggatttcagcagagctcagcagttgaggcggagccattggtcagttatgctatctacactgcaagatccaagaagtacattttcttggcaactatagtgtattatcctcattttacactcaagaacactggggctctgagttaagtaacctaacaagctcaactggttgctgagtggtggatcctgcttgaaccaggatgtagggctggctgttggcttccaaaaccctcactttttctactctgcgcattgctgcatcccgatctgtcactaatgagaatctgaggacagcaaatcagttaggaggctttgttgaggacttggtgagatagcatgatggtttaaaaatggtggcaaattatttgttactcctttcgttgagaggtggggtctatactttctcgctttgaatttgggcaggttttagcaatttgttaaaccaatagaatacagtggaaatgaccatatcctggaacttctgaagctagatcataaatgccttgcaacttctgctggggcctttgcaaattcttgctcttggagcctcaagtcacccctaagttcagctacccggagactgctgcagagaacatgggaaagactgtggggagaagccctgagtctgtaggaagagaaatgtcccaccagtccccagctgtccctagccttttgagtcacaggccctagacattacagagcagaggtgagtggtccctgctgagccctgctcaaaatgcaaaataaaggattg

SEQ ID NO: 317308 - DNA, 4001 bp, Homo sapiens
agaattaaaccaacacataaaggtgatggtgaaaaggacacagaaatgaggaggtgcactgagagaaggaaagatgaagcaggagatttcccagagctttggggagactttaaaggctttagggatccccaaagatcctacctctctcaccatccgtcaactctgctatgccctccctgagccacaccccctaagaggtacccacttctggatgggtttacttccaagagcagggactgcaggatttcaagggaaggcttggaaccatagtggccccattatctacctaggcatttgcagctggcaccatgccaaaaaagccctgtagaaagaggtcttattttcttccttcctcttcccctctggaaataaaagtaggttgtgtttctcctgcccgcccctagagatcagggaaacgggagctggaagggcatcttggattacctcgtcaaattctcactcagcatatcaatgcctgtgccttttgtcctggctactgccgcttcagtaaaggaggccaaaaccagttattgcggccagggcggctgcgaagtggttcaaagatcaacgactggggtcgtgtagggtgggcacgcagtccctggggcccaggggaaggggaatggtggtcggcgcccgggctcccttccctactggcaggagtgggggtgcacggaaggagggtaccaggagagccacaggttcccactggccacatgggaacagggtttggagaaggctctgcacagccacagtcggagcttcgtgctagggtcagaccgctctcgccatgggatcggtttgctcaccgagaaacttcaccgagaactgcaaatgggcatagaagattgcggagggggcagggacaggggccttggagaggcaagaggggaaccggtatcttccatctggtgcgcgtaaaccaagactctatcctgtgccgggtctctcctccccggtccaactcccttacttgtcctcatctctgtccccaaggtccgtgacccgcggaggtgatgggggggataggagagccccagggaccgcagaggtgacacaatcgcccgcccgtcctccctcgctgggagccgattcagcctgtgccgagcctctcccttcgcgcgcctctgcgcacagcggtggcaccgcaggactccgggtcccccccggctctccatcgggaagccggcaaatgcgcttcctcaggcagaccgcggcggggtgggggcggggggggggcggaagttgaaatactgggacagaaacacctgcccgtcccaagggacggaaaactggatgccaagggggccgcggcgcgcagcgggaggcgaggggagaccgggggtcgctgcgcaccgcccgcagccgaggggcgagcggcgacctcgcgcgccccagcgcggcctggccacggaggccggggcgcagggggcgccggcgggacttaccccagagcagagtgagtggcttggctttggggatgagcaccagggagtacacggcccccaagtggagcaagctcatcaggacgacattcctccagacgatgttctgccgctgcccgcgcgcgcctggcctctccgggccgccgccgccctcagagctttcgagcccggcacggatttcttccttggcgtcgcagaaagggatcttccccgcgtcggtggccgggcctggcatggctgggcgaggtgggcgcccgcagcagcggcaggcaggcaggcgctctgcccgagcggagctcgagggtgggggcgggggcttctgccttttaggggggaattctccgcacgtccagtcccctccttccagcccttctcccgggctcctgcgctcttccccagggtcttagcgtggcctagggatgcagatcttggcggccggcgtctgttgctggcgtatcccccatatggctgcccgggctgaactcggccgcgagaaagaggaggcgcgcgcggggcgggaggggcgcgcggccggggaggaggagctgtgaaaatggaacggggccggcgacgctggagggagcgctccgaaggagcgcggaagaaagccctgcttagctacagccaatcaggagcgcccgtgcggcgcttatagacaaaggcgcccccctttcggcttttcggggccgaactggggagcccgctgggcgggagttggccgcctccgcccgggggcgggtggaaggtggctcccggggcagggagcctgcagggcggctcacagcgcttctgctcttgtgtgtgtgtgacccccaaaatgccttttatggtatttttccagtcccccccccaaaaaaaaacttcccgaaactgtcatccctttgagaagccttttatttcttctcaagcctcaggccacctgggttggagaattttaaatacttgcttggagtcgcgaccctagttaaggccagacccacgatgagaatcagaagtccctcaatctgccagttagtagggctcctcgggccaggggagggttggaaggcagctgctcgttcttaattaggcagctgtggattacccaggcacacagtaagtgctcagttggtgcttgtgaggtgatgcacagatgatttgggccagttcgctgcccaccctttgcccatccgccgcgccactctgtttatggtcaattctagctaatcagcgcacttctgcaacgcctccttagctctcagtgaggaacactaccctgaaatcaacaccattgagaatcgggctttacaaaaaaatcacccagaatgttccaaggaaaattaacctgtgaaagatttgtgtctgcccacttctctcctagagctgatggcttaagagctctccagagaggaccctagttgcacagaaaatggagggaggattgagctggaagtgtctgaagcaggtgtgaccgcaattgcgggcaggcagcagaagtaaaagggctcgggacagcatctctgagttctagttttaactggctggaacccagcccaactctctgggcacggatttccttacctgagaagcagaactagtttctactcttccttccagcttccatattccatgaatgtgagttcgaaggggcgccattatattgaccaaaaccagctgatttttagattaaccgttgttaggaatcatttccaggatttcaagagaggcaaaaaaatttaaaagactgactgcatgaaagggccatgcataagcatcttattgttagcagacctgagccagtcctagcagccagacaaaacaatgcctgatttaagctaaagcaaggtatgtggcacttgtggaatctaggccactgagtcagtgttactgtgttgcttcagacggagctgaaattatagaatttgcctggagaccagataaatgtcggccctatataatgaccagtcagacagtggaacatgaagctggagggtgcgattttcatctgtctgttcaacctgggctatgtaatgaaccacgttttcttctcatgctccctctgctccccatacccagcagaccttcctactccctgtggctctctagttcagactgtcctttctctctggggtagactagttgctcggccaaaagcctctctccgggttattggaaaggctcaatgctgtaaagaccctcattctaaacattcagtcatttatttggcatttattgggcatctgctatgtgccaggaccagtgggcacaggggatccaaggatgaataaagtctggtcccgcccctaaaggagctcccatctagaagcaaagatggagcaaacaaatgtaacctcttgactatgaccttggaagggcagaaagttacagtccattatcggaaaaaaaaatttaattaggtatcaaacttacatacaaggagtctaagggaagcaaaaatagttccttattgtcccccctgagaaccttattaggtcagctgttctatcttgaatccatcttttgtttgtttgtttgtttttgtttttgagacggagtctcgctctgttgcccaggctg

SEQ ID NO: 317309 - DNA, 4001 bp, Homo sapiens
cctatggactctgtgatgctacagttattacttatatatttaaatcacagactggacacctggtttttccagtcacataattaagtttacatctcagtattaccatttagcctactttccattttttatctgaaaattaatcttattaagattaaaaactcaaatatacctatttcgttttttataacttaattcaactttttttctgaccgattaaagggaatgcctaccaatgtcagttttccgattattctccctggacttggaagtggctaggctatattactaacagtattatacaacctaattagagaacaataaagttgacctttgaaaataacatatcaaacatcagaaagtgtcttttcttcatctgctttaaggattacatttgtttcttttgtgtaaataatacattattacaatttgagattatttacttaatctttaatacaatgagagctaaaaataaatcaataaacatttgaaaatattttctacaattctatttcatctcatttactagtaacatttaagttcagcctcacttttgaacactcatttcctaaacctcaattgtctgtaataattttatgttttcttgtgcagtagttttccttccgctgggtcatctattaacacttctccaacaaaccagagtcttcttatgaaggactgttgtgaatactggcattcgtaaatttctaaaaataaaatttcccaggtgcacagttttcctccctgtcagcataatcttgggctaaagttgttgtttaacaaggcaatgggcatttatgacatttctacccattacagcatttaacaaatgttattgtaattgctaattcacctgtctgtattccactttagacaataaactctgtgagattagagaccgtgtccatctagttcatctttgtatcctcaatctaatatataataaaaggtcaataaaatatatgctgaatcaatgaaagtcccagcaatgtggggaatggtaatgaagaactccagagcaatgcacttacctgtgagatccagggttctgtccacaaaaaccactgatgccctgcctgcagcagtcttcttcctgttctttgcaggggcataattggccagatccgcagcgatgacctgacttaaggaacctacagcaaaacactcctcccgtactcctaaatgttcacacagagaactgaggcctgacactaggcatctgatctgcagcagcagctctggggttagcgtagtggagtccacatcacccaggcttcccagcttcctcttgtccggtcgggcgctattaaggaggtgcacatcctggggtagcagtgggaaaagggatgcaaaagctggagtcaaggcaaagtggggagcaacaggggcaagcaataacgggacatggaacacctcggccgtgtagttcatgttgcccatccattcacacagcttctcctccagctgctcgaacaccggctgctgcccctccatctcggccgctgccgccgctgggacatgattagctgtgaggtggacagcgtggctcacggttgtgaccaccacacaatactggaagtgactgcggcagatgatgtcccgtaggatctccacggtccggcctttcagcaggcagctcagcacaaacactgccttgggctgcttggctccaccaccaattgcgtcgggctcgaactctcgcaggtgacagtcaggaccccccaccgcctccaggagacgggtggatccgcagccccagtgcaggctctcggcgcaggcggcgtccaggtaaaccacagcccgtttcactttggccagcacctgctcccatccttgctgggtaaaggacagtacgcccgaggcgctcatggttggggattcgcagacttgggaaactacggtgcaggaacttctttcagaactcaccgcttccggaaattgggctccgggagactttgacagtctccacagtacacgtggtcggcctctgacacgctccctgatggcgctcggtgatgacgttaaactgagcggtgattggctagagaggaggccgggagtgaggaaggatggcgcggtcgggaaagaagtgggtggggctctgtggctccgggcttcctcaaaagctcgtggagatcaggtgtttcctgagatggagctgaactgagttctttccgtcgctcggcctgtctgcgcagataatcttctcagataatcttctcatgttccttgaaaagtctccgaaataaaaacctaatccgaaatttggtatcttccttagatatgaacacgtctccaaaagtacagccaccttctcaatctaaactcagagcaactagaaaaagataataaaaacaaccgtgtgcaatattttgggtttatagattgctgtcacatacgttatcgcccacaagcctcataacaaaccctgttgttctcattttcactttctccatctttcctccctcatctcatcgtcactacatcttataggcttaaaaactctcagaattcagcccttcctctccatttttgctgtcacaaaaacccaacatcatcgctcacccaggcaatgatctcccaacattttctgacttttgatctctttaccctccaattctattttcttcctaataaacaaagttggtcctacaactttcctgcttaaaagcttctcctagcccagttgcctataggatacatccacactctttaaaaagcatcaacatccttcttgatttctcaatttctctccagctattcccaacatggagaaaaattgtaccgatacaatgaagtcaataggctgaacccaaaatgttttatgggttctgtttgttccaccaatatacttacattactaagtataatctctgtgctaagcttcaaagatgcaatggttaataaaattcattacctaatccacaaagaatttacctggtaaacttaccgaaaataatcattccaacagtactgcctgtgagagactttttctaactcaccaccactatcaccctatcacctctcacttcccccacctatcaaaccactcaattgatacattcgctaagtacttgccatatcatggggtaagtattaacactattttctttaaactatctgttttgctaaattatgcactagatgcttggtatccccaacacttataacaggtgttcaataaatgttcgttgaatgaatgttcaattaatatccatggccaggcgcggtggctcatgcctgtaatcccaacactttgggaggccgaggtgggcagatcacctgaggtcaggggctcaagaccagcttggccaacatggtgaagctccgtctctactaaaagtacaaaaaatagctggacatggtggcaggtacctgtaatcccagctactcgggaggttgaggcaggagaatcacttgaacccaggagggagaggttgcagtgagccaagatggcaccactgcactccagcctgggcgacagagcgagactctgtctcaaaaaaaaaaaaaattccacataataatatatccagccaatttttaataaatacgtacagtattccaaacactgtctgggttttaaggatataaagaaaactaaaccacagccctgatttcaaaataattatgatgaaataaagggacccacacatgtaaaacaagtgcaataaaatgttacagaagcaaatactttttaaaattttttgtataggagtcaagaaggaggaaaaataaattctaagagaaaaaggaagaagtcagaaaaagcttcatatagggcatgagttttgacttgccttcaaagaaacccaggtgttcaccaggtggacaggatggggaggaggattcttagcagtccaggcacagagtgcagcataaacaaagtcgtagaggcataaaacagtacaatatgttctctggaactacaaagggtttcctatagctggagtgcattgtatgaaaaaaggcgcaagaagaaataagagcaaggaattagaaaa

SEQ ID NO: 317310 - DNA, 4001 bp, Homo sapiens
aaacctaagaaataatgctaatgttattgtgtcattatagtgtcattaattattttagataacatataccatgcacttaatatgtgccagacactatgctcaatgctttttcatcatctcatttaagtctcacaacttcaagaggattcttgtgttcttatactcattatataaatgagaaaactgaggtgcagaaaagctaggaaacttgctcgaggtcacagacctggaaagaggtaggctgtgagcccagacagactaaatccagaggctgactgagttcttaaccactggtctataatgctaccaaaacggaacttactacctttttcctaacttccccgttgctcaagcaaaaactaagttgctctctacctctttctctcaaatcccctgatctccagtctccctgtgcccaacttagtttacttcttacctgaatgatgacagtagacaactaactgcactctgctataatgcatattccccgtaaaaatcagaccgggccttctaaactacaatttgatcatgccactctcaactgaattcctataacccatgcaatggtccatactccttagcacagagaagacagggcccttcaccatccagcccctttctacgccttcaactgcacttgccatttccctatataaatattccaattcaatttacatcaatattacactcaaaccagccgtattgcaagtctttaacaaagcatattcctaatcccctcagtgtcacaaatattgttctatttgggatgcctagagtttttcatatagtaaattcatatttgtactgcacgtttcagcccaatagcaccttccttgaacatattttaataataatcgtgtaatagttaatatttgtttaacacaatgtatcagatactattctaaatcctttacatattttaatattcatttaatctttccaacaaccctatgagactgtggcaaaagagccagcagttgctgtcacttcaatatattttggaatacatttccctccccaaattaaattcttggaggtaaaaactgtcctgtttatctttgcagcagctgttcttccatagtgtctggtacataatagaaacaggagttcaataaacatctttttaataaatggccagagagctgtgcccctagattttaaatgcacacttggaaactcctgctggccattagccttctaatcttcagagcacgagaggagcataacaaacatgtttagcgtctagtagaattctgtgtaagctacaagtactaccacacggttctgcttaaatatacacacatcctcacgtataacatcaaggttttttttttcctgcaactaacttctttaactctttaccaatttaaatgtacccaaccagcattcaaaaaagatttgtcggtcaacgacgacgatattaaacattgtatatgaagtctcaaaaaaacatggagcttactttgctctctcagaaagtcgatttctgcagccatttcgatacaattttagtttagagctttcaccacctttaccttcctctgaaagacagagagcttgctgtgcgggaaaacaaaactaagccaacgctcggttggttgtcaagcgctccagcggtgcaatctgcatcctactcacgcggcatctacagccccgccacgcttctttcccccgcgccccagacgagtccctggccctggtgagagactgaagattgctggggactccacgttcaaccgaatcccacgctggtgggaagaggacgcggtcgatacaggcgtcccgcgggtcactctgggtctcgtcgggccacctaggagagtgccgcgggagcttgacggcagcctgagagcggcgttctacgcggagcggcgggggttggagaggacaacgccaagacggctgggaagccccaggccagcagcggaagtccactcggcccgccctgcgactttgaaaccggtgccccggaccactccttggagacggtggcgcctcttgcgtcatcacgcgggcgttggagcttacgccatcgcgcgtcctagagtcctagcacgctattggctggctgtcaagcaatgggaggagtcgtgagaacctggatgacagcgggctgagccaccggcttggcgcggcggccaaactggtgggacagtgtctccaggtagtgaggcccaacctctttaaaacaaacaaacaaacaaacaaaaaaccaaaatgcaaacgtgagtagagaatgaaatacacagtttaaatgccctcactatctttgggttactaatatactaagcctttctggactaagtaaaagatgcaggttcctgcggctagggatagaagccagactggcgtcttcagaatctcccaccaaggctgtacctctggaggagttctaggtttggatttggtcatctcaagaaggtaagtaccttctcggtctttgtgggtctttagacaaaggagacaactgttgtttaaatatttaactgtgtagtaataaagcgtgtagttagaagtactcaaaagatcttgcaaattcagcagctacttcttcaaagataagcttgtttcctcaaatataaggaaagataaaaggtacttttttttgcaaaaaacaaaacggtaaaacttacatttgtggatagattacaattttcatttttgaaaattaattttgtctggacttaaaacgtatttttttaaaaaaaatcatttaacattagaggaaatctcaccactagcaacaaaaatgttaacttgaagctagccactagttttgtgcttttaataaattgtatttttatggactgaagtaaagtttcactaaacaggcatgtcatagatgcagcttgatttggctttctgtttaacggcttaagagttttgttgtcccgtactcataatgtcatataaacaaagtaaccttagcgatatgtgttaagaaattttaaaaatgtattcaaatatatgcagttaggcatctgaaggccttactcaatactcactgttaatagaatgagatggtcccttcctctaaagactagctgttaaatatggatgtgtagcttaataatcattgaaaaggtctaatccagctttgagttggtgataattgaacttgttctgatttttagtagctataacgtttacacaaaaactttttgtataaacgttatagctaagggaaaattgagtgtgcaaggtccaactcgtttttgaagttcagtatatgactctttcttcataaacatctcactgactctccaaggacttgcttgtaacttctcccacatttgaaccttgtatattgtcgtatttctacttggcatcaaataaataattatagacttaactctacgcttacacccaaactggatggaagcaaataccttctggctataactgatgagtggtatttacataaagtgaatatctcaggtgaaaacttttatgtctgcactcgaattttttagcttacatgatcataattatgatcatgatagttttttgtttttgcgtttgtgtttgtggttacaagattttagtagttgaattttaatggagtattttcaacataagtttcatcattaggaaacaaaattgtgatgatttcacttatccttaaaggatcccctctcatgttcctccttttcacatctcctgagttctttatccacttctcccaaggtaggtgccaccttagtacttacttcatgctccttcctgcattatctgtcatgttttgtagtttgtctccaggctccatcataatacctggaacacagagttgattaaatatctgatggaaggaatgaaagaattcagtggatgttcatgaaaagtatctattagtataaattgaatacaaggaatgacaagcagaaatgtatgtagtttgtgtgtaactcttgtcaagccaccatttaatgtttttatatgacttttctgcaataaagaaaacccctaaagttgtatagattgaaaattagtgacatttcact

SEQ ID NO: 317311 - DNA, 4001 bp, Homo sapiens
ctggcacattttcatcacaaatatatgaacaatttccatttaccattttgaaatatggaaacagcagaaattaatactagttcctgagtccaccactggttattatgctggaccagctccaaaggccttttgtgcactgagattttgtgactcagtctaacaaaggagaaggaggcggcaattgggagcaaggggacgttggtcctctcgtgtggttgccggcactctcactaccaaccagagagcgttgctcactctttcctagttcttcagcgcccatgcccacacgtccaggctccattagcaagcagctcctatgcagcccttctcaaaaccagtgccaacagtggactggacacctgaacttaaatttcctgccctcttgctctttcctccactggaagtgtgaaagtggcagaagatgagacgtggaggggagagttgaaggggtgtgatgaggtgcgtcagagagtcgctgtagaaaggcctggcaccaccaacagtccccactttcaggctcagcccatgcagaaaaaaattctgggctgagtcacattctaagcaagcaagctttctctacgaactgcatcctcccacagcatatagggctccccatgcgcatgctcatctcgcctcccgaagctaagaaacatgggtttcccctgtctttgtttccttcactgccttctgcagctctgtctgctttctaaaacaccctggtgggagcatgttaaggacagcggtatcccatttcttcaacagcccagtacctcgtacctttcctccccttataaagactgaaaatactcctctttgatttccaaagaccccagcatgtttatgcagtgccaggagggaagcttaggtctggctggtggtttgtgttaattgtctggctgcactttagaaagacgctttttgaatctaagcatttagggagaaagtggagaagcgtggctgtatgaaagagcaattgatgttaaatattcatgctcttgctctctgttaatcaaaattagtaacccccattgcttagctgcagtcttgctggcttcatactatgattgcgctaaaggaacttggatagaaagcaacaaccaccacacgcacacacaccccacacacacccaaggacttgggtgcttgtaggtttgaagtgtttccagttaacattgtgcaattcagcactgtctattttttccaagatgttgaatgaaccatggttatcctttccatcagcattttagaactgctctcccacttggttccttctctcatgttgaattcagcaaactttagccttaaaaatcagacattttctgcaataatccttaaagctaattgcagcatagtctagttcagttttcagtaatgatacaattattttacaagatagaaaagaaactgactataattgaacaaaatgtggcgatattataggttgttttcgtagcaactttgacatcatgtttcctgaacttttaggaaatattttgtttttatttattttaaaaagtacatgttatataatgacagcaactttaaaattatcacttaatttaaaaggaaaaagaaaaacagctcttaattaaaacctgtttttgtaactatattttttcaagttttctacaatgagtatgctttatcattatactgaaaataataaaagttatatttttaaaaaactgagctgttgttgaatgtatgtttgagaagttatccattttttccttacctatgtcatctgcaagagaaatgttggtgaatgtgctgtcttcctcctcctctttcctggacccgtccatcttgttcaattttcagacctgttagtaagaaaaatgagggcagagaaaagcagcagttgtcccatgtgaccgcccttgttaaatcattaatcagtgaacttccaagcaggtgctatctgatccttgcactagccaccctcttcctgctttccacctgagaagttctcacctgagtgttgcattcttaaccggaagtggtaggagacccaagttaatgacttacaacccttgaccggaggctgctgtgctggcacggctgctgtaccctggctagatgccaaaccctgccttcaagtttccttaggctgaattgctcaaggaaattgtccaaaaagcgtaaggataaggttgggggaagaaattgactttatatgattaacatatcttttagatacccacggtaaacttctcaaggatttatcaatgaccagagcatgacctgggggtaagtcacaaaccctcagagcctcaatgttctatctgtaatatgaggataagtctgttgtgaggattaaatggaaactgcctggtacatgtatgaagaaataagattcatacatgtacatatatgccatacatatatgccatacatatatgtagaaatatatgaagaaatatttgaagaaataagaagaaatatatatgaagaaataagatacatgaagaaataagattatatattgagctcatcaatacactctcatattactgttcagacacctcatcctgtaaaagttcattgaaacagcaaggtctcccttttctgtttctggagttgagcccaagaggagagatgttggcttcattagcccttaggcagggaccctttgtttgaggaggaagtatttctttacaactatttatccaggtgccctagttcacatttgtatacagacacaaagcaaaactattttagaatttcaaataatcactcctttgcggaaaaaaatagccaaatttgatgaagcattttaagcagatattaaaattgttactacatgctacattctgcactgtgctttgatacatataatattttttttattcaggcaagttcattgttactatatcaagcagaatggatgtgagctgttggaaatcctgaattttaaaaattaaattcactagaatagaattcccccaatttttcaattatattctgcaaatattaagtgcctattctatacaagctgagcactttggaggttcaaaataaaaggtttatttatttgctattaataagcttataaaagtgttcaaaaacaagaatcctggaggtttacagaagggaaaaaaatatatgcagctgacaggaccctgaaaggcttagagaaggggacatttgagatgcatgatcaatgaaaagtgggattcaacaggcaaaattggtcaggtagtgagtgctttctcagtgaaggagtatgggcaaaagctcagagacaggaaggtattgggcacatgcagaaaccaagagtatgagatacaggtaaataagaggtgggagatatggtggaaaataggatgtcatatctaagagtggtttgaatgctagattgtgttagttcaagtcctctaagaatcagacaccaagatgggattaaaaagatgagataaaatagggagggaggcagaaaggttggagggacattagcccatgatgcaagtctgacaaagtgaagtgaagtgaagacaaagtggaatggaaggtccagcttgatcatcagaataaagaaattttgacaaagatgtcaaagaatacttgagccaaagttgaccataagaggagtcccatgtctcccagaaatgacctcccttagttttcacacagcacttagttactggctgggagcagctggcagaaagtgagacctctgtacaaatgtagttatggatttcagagcacagtagctgaggtccttgattagttacactccctgtagttggaggtctacagggtacaggctcagggcaaccacatgagctgctttttctagcaactctgtatataatcatggaccagtattttaggaagcataaaaattcctctcttggctgatccattttctgtcagtcctagaaataatgacacacacttttaaaatgcctactatgtgctaggcaacagtcctacaggtaggcactaatattattcccattttaaagatgagggagctgaggcatgtagagagtttaaaa

SEQ ID NO: 317312 - DNA, 4001 bp, Homo sapiens
aatgattaacaatatggattcagattacctggattcaaatcctagctctgcaatttataagctctggaaccctgggcaaggttaacacctcggccttaagtttcctcatttgtaaaatgtggataataaccgtacgtatctcatgggtttgttgtgagaatgagtggatagatacaatgtgttggcaacagtacctagtacatagtaggtattcaataaatgtctgctatcgtcttctctaccttttagctctaatttgggcaacagaaagaatttaaagaaaaccatctggtccagctgcttcattttacaaaatcaaggccaaagatgacaatggcttactgaagaccacagaagtagttagcaacagggccaagactacaacaaatgcccagtgttttttccaccattccaccacaactattgtcacatctgagcctgcagattttgagactttttcctaatacccgtccatcttcagccactcaacttttctgcatctaaaattgatttcaccatctgtcatactggagaactactaagactgctaaaataatgtcttcgtgcattaatgtgctaaatgctttgcatatgttatttcatcaaatcaacagaaggaaactgcaatttacagatatggacactaaatttcagaaagtctatatatctttcagaaaagctgtttcagaggtttcacagccaatgtctctaccaagaatttgaacccaggtctaacttcacagtccatgctttttccattatgcaatggaaaaaactttaatatggccctaatcttaagtttgccaaacattttgctaccactgatgtcaaactcctctggaatctttactaagcaactgaaaataaactccattcccttcaagctacggaacttcaatataatgtctgttcagatctgttcaagttctgctttgacttgtcctggttaaataaatccagtttcaaattccacaagatcaaggaactgtttggccaaatgaggatttaaatggaagctatactctcagagaatggctagctacactgattttaatcaggaatagaggtaccagaatacatgggcacagctttgggtcctcgggcatagaaaacgtgttggcaacctggaatggcatctgtccttattgttgcgtaatagtgtgaggttgacacactgtataacagaagccctgcctttcaggaatgtatcctctttctcctttccaaacctttcttcccaaaacttgttcagcaggactctgggggagaagacgatcaggaaacaaacccaggtgccgctttcgccgcctggaaaaatggtccaatccttattttacggctctctaggctccctccccacctcagcctcccctcccatctctcaggctctcgcagagcagccacgggaaggtccaggcgtgccaggtcccattccacccaaacgcccctcccgcagtccaattccagagccgagagctgcaaagcggctcccgacccaggagctgcggggagaaagctacacgatgtctgcgtcagggaccgcgagaggtccctctcccaaagaacgcctgggcctgacaacgaaaacaggagaaaaagaggtcgcgcaagggttctgccgggagccaggcctccgccgcccaccaaatgcccaggcccgagaccgctcctcccgggcccccggtgcgcagggccgcgtccagcccgccccgccctccaggccctcggaggtactgaggatgcagctctagtcgcctggggccaggccctccgctgcccgggacggccctcaccttccgcttgaggcgccgggagaaggagggatccggccgacacctcaggccgggacacttggaccaactgaccccggcagctccgcccactccgcccacagaacgtgcgccgtgagaagaatcccatcccgtcccagccgctcgcccgccaatcctgactcgagaatacacgcctgcgcattagctgcccgcctcaccccagtcgtccaatctcaaagcaccgggatccacctttgccataacaaaaggacactgacatccaatcaggattgaggtcgctgtgggcgggacctggaacagcgacagccaatgacagtaaagaagcgaagctaagcggcgctggtgaagcggctcatcaggtctatcaggaaacctgagaattggagtgagaatcccagtgtggaaaatcaggaaagaggctggtatgagcgacagagaagtcattcaggaaagaggttggtatgagcgacagagaagtcattcaagttcgagaaaagagcgtttgcgaaccaagcagagaaagtcaacgcgacaccgtcgttccttaattctaaaagcagactttttcatatttttcttatttccgaaatcggaaagcttatagttgagctagtggaatgttcctctcctcacgcccctcctccgaaactattattaaatctgtagtgcgtggccatttaatattttagaattgagaaaataccctagtggtactgaggcatagcacttgtgcttaccttacccctgtggagcctcacagcaacccacagaaaggaactgaagcctgagcgtgaacacatttcttgctcaaggtcacatatacggtatcaagagtggagtgttcttcgtgacaccgttcatcgtaatctagtacttgacacaaagcggcatcctgctttaatattcgttgagtacaaggtagacatccacagcaatacattattattttggctttggcacagcctcctaagctgtagagacaagccttatgtctccctgtttcttgactttttacttctggcacagtttgctgacacatcgccttaatcattttaagagctatataaaaatatcttctattcagtgttttgagaactatgcatttggctgcgactgcaatattcagtttgaggaaatttactagaatgcaatgtaggagctaaataaatgaaaaaaaatccaacataaatctaataggagtgccaaaaaagagagactagagagaatggatgcaggcagtattcaaagagtaataactaagaattttccaagattgtggaatatttgaattttcagattcaagaagtacttattcttgagcaggattaatataagaattctatgcaacggtgaaattgcaggacaccaaagatcaagagaaactattaaaagcaaccttttgtttttgctagaacagtatttttaaatatttttaattgtagtgaaatatacatagaataaaatttaccatcttaaccatttttaacttcagtagtataagatacattccacattgttctccaaccaatctccagaaccaatctctcttttcatcttgccaaactaaaactgtatacctattaaagagcaactctccatttcctattcccctcatcctctggcagtaatcatcttactttgtgtttatcagtttgactactctaggtacctcacctaagtggaataatacagaatttgcccttttatgactggcttatttcatttagcataatgcctcagagttcatccatgttatagcatattgcagaacttcctttttaaggctgaatagttctatatatcatttattatgtgtattatgccacattttgtttattcatctatcagtggacgcttaggttgcttcctccttttggctattgtgaataatactgctatggacatgggtgtgcaaatgtctctttgagaccctcttttcagttcttttggatatacacccagaagtgtgtgttaatttgtgctgaatcatatggtaattctattttaaagcaacttttaaaaaagtggtattgacacaagaatagacaaaaagaaaattaggaaaaaaagggtacctggaagttggtatacaataaagatgtctggtgaggaataactgtttctaaggttgtggggaaaaaactattattcattactgttgggagtgtaaattagtatagtaactgttcgtgggatatagaaaacaca

SEQ ID NO: 317313 - DNA, 4001 bp, Homo sapiens
acatggtgtctttgttaactggcacattttcatcacaaatatatgaacaatttccatttaccattttgaaatatggaaacagcagaaattaatactagttcctgagtccaccactggttattatgctggaccagctccaaaggccttttgtgcactgagattttgtgactcagtctaacaaaggagaaggaggcggcaattgggagcaaggggacgttggtcctctcgtgtggttgccggcactctcactaccaaccagagagcgttgctcactctttcctagttcttcagcgcccatgcccacacgtccaggctccattagcaagcagctcctatgcagcccttctcaaaaccagtgccaacagtggactggacacctgaacttaaatttcctgccctcttgctctttcctccactggaagtgtgaaagtggcagaagatgagacgtggaggggagagttgaaggggtgtgatgaggtgcgtcagagagtcgctgtagaaaggcctggcaccaccaacagtccccactttcaggctcagcccatgcagaaaaaaattctgggctgagtcacattctaagcaagcaagctttctctacgaactgcatcctcccacagcatatagggctccccatgcgcatgctcatctcgcctcccgaagctaagaaacatgggtttcccctgtctttgtttccttcactgccttctgcagctctgtctgctttctaaaacaccctggtgggagcatgttaaggacagcggtatcccatttcttcaacagcccagtacctcgtacctttcctccccttataaagactgaaaatactcctctttgatttccaaagaccccagcatgtttatgcagtgccaggagggaagcttaggtctggctggtggtttgtgttaattgtctggctgcactttagaaagacgctttttgaatctaagcatttagggagaaagtggagaagcgtggctgtatgaaagagcaattgatgttaaatattcatgctcttgctctctgttaatcaaaattagtaacccccattgcttagctgcagtcttgctggcttcatactatgattgcgctaaaggaacttggatagaaagcaacaaccaccacacgcacacacaccccacacacacccaaggacttgggtgcttgtaggtttgaagtgtttccagttaacattgtgcaattcagcactgtctattttttccaagatgttgaatgaaccatggttatcctttccatcagcattttagaactgctctcccacttggttccttctctcatgttgaattcagcaaactttagccttaaaaatcagacattttctgcaataatccttaaagctaattgcagcatagtctagttcagttttcagtaatgatacaattattttacaagatagaaaagaaactgactataattgaacaaaatgtggcgatattataggttgttttcgtagcaactttgacatcatgtttcctgaacttttaggaaatattttgtttttatttattttaaaaagtacatgttatataatgacagcaactttaaaattatcacttaatttaaaaggaaaaagaaaaacagctcttaattaaaacctgtttttgtaactatattttttcaagttttctacaatgagtatgctttatcattatactgaaaataataaaagttatatttttaaaaaactgagctgttgttgaatgtatgtttgagaagttatccattttttccttacctatgtcatctgcaagagaaatgttggtgaatgtgctgtcttcctcctcctctttcctggacccgtccatcttgttcaattttcagacctgttagtaagaaaaatgagggcagagaaaagcagcagttgtcccatgtgaccgcccttgttaaatcattaatcagtgaacttccaagcaggtgctatctgatccttgcactagccaccctcttcctgctttccacctgagaagttctcacctgagtgttgcattcttaaccggaagtggtaggagacccaagttaatgacttacaacccttgaccggaggctgctgtgctggcacggctgctgtaccctggctagatgccaaaccctgccttcaagtttccttaggctgaattgctcaaggaaattgtccaaaaagcgtaaggataaggttgggggaagaaattgactttatatgattaacatatcttttagatacccacggtaaacttctcaaggatttatcaatgaccagagcatgacctgggggtaagtcacaaaccctcagagcctcaatgttctatctgtaatatgaggataagtctgttgtgaggattaaatggaaactgcctggtacatgtatgaagaaataagattcatacatgtacatatatgccatacatatatgccatacatatatgtagaaatatatgaagaaatatttgaagaaataagaagaaatatatatgaagaaataagatacatgaagaaataagattatatattgagctcatcaatacactctcatattactgttcagacacctcatcctgtaaaagttcattgaaacagcaaggtctcccttttctgtttctggagttgagcccaagaggagagatgttggcttcattagcccttaggcagggaccctttgtttgaggaggaagtatttctttacaactatttatccaggtgccctagttcacatttgtatacagacacaaagcaaaactattttagaatttcaaataatcactcctttgcggaaaaaaatagccaaatttgatgaagcattttaagcagatattaaaattgttactacatgctacattctgcactgtgctttgatacatataatattttttttattcaggcaagttcattgttactatatcaagcagaatggatgtgagctgttggaaatcctgaattttaaaaattaaattcactagaatagaattcccccaatttttcaattatattctgcaaatattaagtgcctattctatacaagctgagcactttggaggttcaaaataaaaggtttatttatttgctattaataagcttataaaagtgttcaaaaacaagaatcctggaggtttacagaagggaaaaaaatatatgcagctgacaggaccctgaaaggcttagagaaggggacatttgagatgcatgatcaatgaaaagtgggattcaacaggcaaaattggtcaggtagtgagtgctttctcagtgaaggagtatgggcaaaagctcagagacaggaaggtattgggcacatgcagaaaccaagagtatgagatacaggtaaataagaggtgggagatatggtggaaaataggatgtcatatctaagagtggtttgaatgctagattgtgttagttcaagtcctctaagaatcagacaccaagatgggattaaaaagatgagataaaatagggagggaggcagaaaggttggagggacattagcccatgatgcaagtctgacaaagtgaagtgaagtgaagacaaagtggaatggaaggtccagcttgatcatcagaataaagaaattttgacaaagatgtcaaagaatacttgagccaaagttgaccataagaggagtcccatgtctcccagaaatgacctcccttagttttcacacagcacttagttactggctgggagcagctggcagaaagtgagacctctgtacaaatgtagttatggatttcagagcacagtagctgaggtccttgattagttacactccctgtagttggaggtctacagggtacaggctcagggcaaccacatgagctgctttttctagcaactctgtatataatcatggaccagtattttaggaagcataaaaattcctctcttggctgatccattttctgtcagtcctagaaataatgacacacacttttaaaatgcctactatgtgctaggcaacagtcctacaggtaggcactaatattattcccattttaaagatgagggagctgagg

SEQ ID NO: 317314 - DNA, 4001 bp, Homo sapiens
gtgaagaaaggacaacaaaactcagtgaccaactggacatggggttgcaaaagagagaggaatcaaagatgggcatcctttttcatcttgtaagtattgatcacctcttagccatatccaaccttttgtagacaaaggtgtttcctctgtttctgagccttgcccatgcatttttcccttgacttatattagcttcagtaataaccctgtctgtgcatttctaggcatttctgtattaaatgctgctatgaaagagacgtccaattccacttgttgagagcaaacagaatctggtgaaaaccaggccattgttcagcggtaagtcatatcttggcacatctgctttttagtgaaaatactctggctcagaggtaagtgtgtagccagcaagaagccattcatggatgatagatcaattgatagatagatacatggtgggagaaccatgataaggaagaaatgtcagcacatatgatacgccatcatttcaaaaaatggaactatagtttctacactggatttggttcctaagggaagaaaatgcaagctattcttggggcttactcaacaactcagaaagagaagagaaagcagaccctgaagccctggaggaagattcactgtgctccaactcagacacaatctaaagcgcttcttcagcttctacaatgaatgaatctctggtaaataaggaactttaagtggtgaggtcagaggagagagagattggcatggcattcacctcccatcccagagagaagggcaagtgctttggttaaggacggcctaattacatggagtgtgtcttatctggaggagggtagaaaatgtcttagggtaacccttaatcaaaaaaatccagtgtttgacggagataggaatagagatgtctcctatacatttggaaacagaagctggcctcaaggagaaccaaggaacactgcagaaaatggtagatgaggttgtacttctggaaaaggggacaagatgaattctccaatttgatatgggtaaaatctggggagaaataactacctaataaacatctcatcacagccagaaaatgggggttatttccaccctgggtctgggccctctagagctgtgtgggcagaaagactcaatggagctcaagtgcttggcggagggtggaaagagcacctccgcagactgctctggcaacagtccactatgctgtgcaggtgtggcaggctgagagtgggagcagccggacgacctatgtgaggaacagcagtcagcagtggaaagaagaggcaagaactgtctgaggaccccactcatgcctgggattggagtttctgccagcttgtcaccaattccgcctgtgcttgttccttgcccaagaggcagagactgatatgaagagtcatggcactgtagccagaagtgcagcgacatctctggtgtatggattcctccagcagttctagggacctggcaaagcaaaaggctgccacatggaaacgggaggatagaaacagtcatgatcatgatgctggctggcacttaaaagtgcttattatgcactaggcactgtgctgagctcttcacacattctatgctttcaatcttcacaatgaacttatgagagctattattatccccaaagaagactgaggcagagacaggttaaataactgacctatatttacacaacccaggctcctcaccgccgtgagagagctcagatgactcgccctcagtttggagtctgaaaaagaaactctgaagaagaacagagacacagattgccaggctctcccctaggcccaaacctcccccttaaatactggctcttacaagcagatgccttgaacaaagcctgtgcccagctaagtgaaaatctttcacttaccttccagaggtcaccctgatgcagacgaagagaaaagataaatttgctcagcttcagatgtagccatcgttcctatcataggcaagagcatctccgtagtgatgaaaagctctataattttaaatgtgttattggtctaagcacaatttacactagggatgaaaaaaaggaagagatttatgagatgtaagatagaaagataaactcttgtcccttagtggctattagaaacattgccaacataccataaatgtgtgaaagatgacgtgattattttgcatttccactgggcatttcatatgttgcaagaatttactggggccaaagtccccagtaaagatggtagagtctggggaggggaggtggaggaggccccactgaccaagcccccatctgggatgggtatagggcaggtggctttaggcagagagagcacactctgttgcctaaggtgcaacacctaccagcatcctctttatttcctgcctctagccacctgctctgggggcaggttcggtggccaggcactgccccatgtttcatcaggctttggtgtcagattctgggtctaagtgttccagtccatcacaaaatctgaaacaagagagggcagccaggacaggagaactggcaaggttcatctaactacccctaaaagcctcataaacataagcatccagtgagttagtgccaccaacctggccccaagagacacaggatattttatcaaagagaaagagattggtgatcagaaagtgatttacctgaaacccacttgaattattctcacagctggccaatctggaccggttatcctggcagggacatcatcaacatcaacatctgaaagcccagtcacaggaagttagtcacagggcaggctgctgagtcagggctgggatgaaggtcacatagagtcctggggttaaaccaggtgatgtgtccgaatctcctctgacccagcagccagtgtcttgagcaggaggtaaactccagctctgacccctggagaaatgtgatagcaggcttgggcttttaattaatttacttatttgtagaaatgggggtctcattattttgcccaggctggtctcaaactcctggcctcaagtgatactcttgccttggccttcccacactctaagattacaggtgtgagccaccatgcccaacttttggttttggtgggacaggacaacaactattgggaaattagggttctaagatttgctcatgttttggtgacatcagtcatttcttgtggagccaagtacagggtatatgtcccatggcctgtaagagagaaggcagatgactgggtgaggtttcactttctgcaagtcagatatctttccaatggacccaccactctcaaatacaactgttaagagaattagcaatagaacatctgcaagtcaattgaggtgtcctaaggggaagtgctatggaaatggtctcatgaagcacttgtgaagttagcgatatggagtccttaaatggatggaaatgaggactacatgtcagaagtcctggatttcactatcgtgactcctgtatctgaccaggagagtactttggtggctgtatcctatatttaaatttaggctgcaaatggaaaaacagtttttacaactctaaatacactttctactacagagaatggtgactgaagcaaaagtaaaaatagctgctcgcaccacggtttgagaaaatctaaatctgaaaatgatcatttttatttgcatgctaccaaataaggacattggggaagcaatgagtcaccagtattttagcatttaccagattccaacatgatgtgaggatattctttaagatgagatttgaatatgctctaatctacgttaagctttacccttgaagtgtaaccctaagttcctatctgaaaaacgggccatacttgggagactcaagtgggaggatcgcttgagcctgggaggtgaaggttgcagtgagctgagattgtgccactgcatttcagcctgggcaacacagtgagaccctgtcaaaaaaaaaaaaaaaaaaggccaaatcacagctctacagcacagttacagcagtgctccaattaatgatttcaatgccttcaaacgctcaaatacaaggg

SEQ ID NO: 317315 - DNA, 4001 bp, Homo sapiens
ttcgattttatgtaattaacattgttccaaatgttgtatgataccatttatatcctaatagtgttgtaagttttaatagatcattgcagaggatacaggattatgagcaagacatttccaactaaacaataaatcattgctaccatcctttggtagggagttgcaaattttgattctgtctgagggcatttagcacaagcaagcttttgaatggctggagctaaatggagacttaaaaagaaaaattatcccatttaattgccaaaactaacaggaccatgcagtttaagtgttcagacatttatggtgcaaatgctcatacaggcagctgatgtcagttctgggaactggtattaagagcagtggcatgaaacagagttgatgaattagacagaaaagacagtccattttcggattgctttcaaaaaagcagcaagagagaagcaaagctgcaaaagcaaatgaaaactccagcccagaacttgacatttgaaatatcaaaattatagttgggagagattaaaattgctgcccagtctgtgatgttttccactcatctctcttggaggatgaaaatcactgtttttttaaagttctctttttttcttattagctgccttagaagacgtttttgttagaatgactgagtccttagaaaatgtttttgttagaatgactgagtcccaaagtgaaatttcccaaagtatgtgttaaagaacagaagcagtattaaaaagtgaataagctgcttaaagatccttaaaacagacatatcatcttaaatatctaagataccttcatccatagaaaaacaaaatccacatcctccctaaaagtgatcaggcttttagagcatgccagaagatgatattaatattcagtcttgcatcattctccttcttttcctggacacagtaaatcatcatcactggagaaaaggaccagcatttgggagagcttttcatagcctgtgtaattaagttaaggaattttaaagaggaatttttctaagtctcagagggaaaaagtgttctctttatattagcagtacagacactgttgtgttccaagaatggacaccaaggatgaattcaatgaattccctctttgtatcacacatttgtaccaggttcttttcagaaatcaggatttttaaaagcaaaaaacattttctttcttagatgttgcagttaacttcatgtagtgtaggtaatatagctgctgcatttaaaacaatcctatatactttatcatcctcacatagttctgaggactgggataagtcctgttgtgtgggacaacattcagagtaaatttgggcattaaataaatgatagtgaagaatctgcctctttttaaacctgtaatgaaatgactttcctagtcaagaaatatacattttctgttcttttttaatctgattatttgcctttctactaggaagcatcatatttttcaaagtgcctgcatcatctcctcagaggatctctgtctttctcttctgactcaacacatacatacatttctgctctaatctacagtaatactttggagtagaacaactgacataagatgttttttatagagaaaaaattacatacctttttcttctttccttttggtcttggcagaggatgcttcttaaatgctcacactcactgggtgagtttgggcaaaaggagaagagaggaggtgctggaaggagcttctttacaaatgaacctttgtctgccttgtctctggcctgggatcgacagactcgctgctccagccaggactgtggggaggaggggagtggaaggagacaaggctgcaaggactgcctcctttggaagtgttcagtttgttccaaaccaggcgagaacgaatagaacagcttctttacagagggaaataactagtctatacaagaacctcagggaggcagactctggtagcaataaaacataaaacctgagggattttaaaagaacacagagtgatttttcccttaagaaaagtgtgtgtgtgtgtgtgtgtgtgtgtttgtgtgtctgtgtgtgagagagagagagagagagaagaggaaagtggggaatggctagctgcgcacctcttcccctttcacagttttcctagccatctagatctgttacaaaatcctggtagaagatacgttccaattcaccttccatttctcacccaaagactcattagtagtcaatggaaagctaaaatgatgactaaaaagaaatgtattctgtgccttagaaataaaagcacaaaagaaattttattctgttttcagcaaactatactggaattctagcatctgttaactgttgtttaggtttttaaaaaattcgattaggagtagtgttttgggaattagagatattatattgtaatggagttggaattatctagacagacaattgaggcaagggcattccaggttgaattacaaaggcatgaaggtgaaaaagagggtgacaacttcggagattataggtggtttcatttggctaaaaccaaaggtggtaggagatgaaatttgagagacaagaagcagcaaattgatgaattacctcatatgccatgctaaaaaaattgtttttatcgtgaagatgaatggaaagatgatgaaaacatattaaaaaggatgaaaagcctgactgcagtgtgaaagaaggatggtttcctgggaggaaaggagactaaagacagaaaataccggcttttgctgtagtccagaagggaagataggaaggaaaactgaaaagacctgatgaccacttaagtgtttatgtttagcatagagataggaaattttattaactttcaaaggcttgggcctttggacgatgatactgttaatcatctagaaaaaggatataaaaggaataactgttattcatctaggaaaaagaatacaaaagttttggctggaggaggagtgggaaaatagaaatgagttagttggtgaacgttgagtttaaggaaccctaaatacagttgagaatgtttagtaggcagttggttaaatagacctagagcttaggaaaaagcctggtctagagaattagttcatcaaccaatcaactcaatatcaaataatctcaactaaataactaatgcaggtattcaactaaatgatagccgaagtcatggttgtaccactaagaagttactgtgctcttactgtgtgccaggcatttcatacgtctgaactcgttcactctccttccaaccctatgaagtaggtactattattagtcccattttataaacgaggggaacatcagagatgtcaggtaacctgccccaaatcacacacacagccagaaaatggcgagaccctggcagtgtgtttctagtgtctttgtttcccaccattatgctgtactgccccttagaatagattataaagttcatgatacgactgagagcagaattattcaaggaatgggcagagaactgggaaggaaactgagaagaggtagccaaagaagtaggggaaaattaggagagtgtcatcatggaagttaaaggaagagtatttcaagagaatggaggtgaatggaaggctgctaatgacagcagtgctgggagaacaacacgtgcacaccctgatatgaaggtaggcagagcaaagagaaggtcaatacaaccagaagcagttccagccctgacagagatcaaatctctgcttggtctccatttcgctgaaactggagcaagtggcatggacctcaggaagggagatgagaggtgtgtgcgcaatggactgcacatttcctttgcatatttataaacaagtctgctgtgattcttactaaataaagatgatgccatacacagatggagttaatttgtttgcatgatttaaatgtatataaatatgtgaatatgaggaggaaaatggaaactagcctttattccactttaagagctatccgtcctgtttacctcaggtagatctaaacagaggtatggtgccaaggcaaatcaacattccctgt

SEQ ID NO: 317316 - DNA, 4001 bp, Homo sapiens
cagtgttgctcctctacaagccattccacatgtaacttccagagtaaattcttaaaaaaaatatgtcagatcatgtcactctcctgcttaaaactcttcaatcactccccgaggcactcagagtgaaatctaaactcgttaacagggcctaagaggctctgaataagctgacccctgcctgcatttcctacatcatcttccactgccctcttctatgctgactacactttagctacactggcttcttctctgctttttttccaccagtagcttctgcactttctattccttgtacctaaaatgatgtttacctgcctggctcaatatcatcattgcagagccaccttccctgtttacggggtctaaatcagaagcctccaattctaacctattcccatccagttttattttcttcataatctctaccataataagtctacactcacttgaatgtaagtccaagagaagaatgctttcttatctgtcttattcattactgtaccccaacgcctacctagaataacaacacacagtagttatatgtgattttgcatatatacttaagtgaattaaagaagtagttattacccccttcttacatattaaaatacccacataggctcagcgattaacctgcttcggttacacaactggttaacaacagtcagcagcaggagttatctaacggaattatatagactctcaacttaccactttctttgcgaatggctatacaatgctttaagcatctcaaagccttgcctatgttacttaacttcttgtacttgtttcctactctttatttccactaccttgatccttggagaggctttctctactggtgacctaagccactgagattgccatgtgttaaaaagcactcataaaatacatatatgtgaaaatttaggggaggagggaagtgagaagggcaatgaaaaaataagtaattgtgttagccactgaacaaatcacaatctggtagaagcacaaacatgtaattgcagcaaatgcctagcagagatacctgtttaatgcccgtctgataaatgagtgtctgaaggaagcacctgtcagattaatatatcaaaaaccactttcgttttgtcggtacttggttcaaacacccctaatgttcacaacttacatgaggtcagtacacaaagcccatcacaatgagggcctaatttttcaacctaatcttttcccgaagcaaattctgacatccgagtcatgccagtctccggtaagtttgaatcctggcttaactaaatatactaagctcccgagtctgtccgttgtgcttgagaaaccccccccccccctttcctggcacagtccagggtacacagcctgctctcagaaacggacgtcaatcgaaagcattctaacatacgattcatcaaaggttaccgactaattcaagtttgggatttctgaaaagaggctgagaaatccgcgtggaagttggtggttgggtgcggcccatttctctctccacttccgtgcggacgaagaaaaatatcttaaaacaaaatgaggttttaaaggtgtttcagcggcagcagggcaggtagaaaatccaaaggggcaacagattttcaagaggtggggaacgaaccctaaggcatgtcccgtccccaaccccttctctcctctggagggacccctgaacctaacagaagaataggcggcgagcctggatcccagccccactccatgctttcccgcaccggcgtctcaaccatccactatccggcctctagcgtctgccgcgccgcactcccacctcctcgatgtaggccggcgggtctcgcttgattagattctgtaactgcggcaggttgctgggaagcttgttgttgtttctgttggacattttggctgcagacagacttcgcggcgagcagttttaaaaaaactcagacggccggcaccccgcaatccctgccagctgcagcttggactcgtgtttccgggtatgaccggaaatagcgcatgggactctaggcaggcgacaccttagcggttcctaaagcgagctatgctacggaagcctcagagtgtcaaaattactctcgttgccaaaatactctgtggtgtattggagagccagccaccgccgacccgcccctcgcccttgggcatatgctactacttaatattgccttgcgtttctgaaaggatctgaaatgtaaattttttcacgtgtgttagcatgtatcgtcattccgacacccatatgaagcacataaatgaggattaatcgtttatttttaatcccgcagtctaaaattagaaactgacgcctgtaatcccagcactttgggaggccaaggcgggcctgaggtcgggagttcgagaccggcctgatccacatggagaaaccccgtctctactaaaattacaaaattagtcgagcgtggtggcgcatgcctgtaatcccagctactagggaggctgaggcaggagaatcgcttgaacacaggaggcggagattgcggtaagccgagattgcaccatttcactccagcctgggcaacaagagcgaaactccgtataaaaaacaaaacaaaacaaaacaaaactgaaaagaaccgtggcgctagataacactattccctcttaggaggaaaaaagagcaacgagggtcatataagttaatgtgtatgattttagatatgtttttattttggttttggttgtttcaacttagcgtgacccatacaagggaaaagagggctggataaaatgtgatcatgttgaccattaataaatgcaattaatcgttaaaattcaaccatcgttataagctttgtaagcactcctcagtcagagtttttaattcagatcctggtaattcgaagaggagaatacatttctacaatctcaaggtgtaaaaaatcaataagggttgaatgaatgaggtagggtgttgtgaattagagagagagaaaaaaaaacctaattacccaccctgtgccaggcactattccaagcacttgtattaacttatttaatcctcagaacaaccctctaaaataggtgctattgttatctacattttacagaagaggaaacaagctcagggaagttgactgcctcaattcatagcctgtgaggaagatgagatttcaatctagacagtcttgattgtaactacatgagaaaaaacatagcctaacagctggtagctggttgctggtctggcaaaatagccagacaatagggttctgcttaaccaaagcaattttatagaacgccaacctcatctgtgacgatgataaaatgagccccaaacaaaacaactctgtaatcacacctgcacacaaaataaagaatgcttcacaaaccatgttattcagctgcttttggagaatgacttatttattaattatcaaatcagttacctgtgaagttaagaaataaatgtcagcaataaatcttttttaaaaagcatagatttaaattaaaattttttggctaggttgttttagtgagggcaaaaaaagtattctcaaaacaaaatctggctaagtgtggtagctcaagcctgtaatcccagaactttgggaagccaaggtgggagaaccacttgagctgggtagttcaagactagcctgggcaatatagtgagaccccatctctaccaaaaagttgaaaaatcagccaggcatggtggcacaggcttgtggtccaagctactgaggaggctgaagcaaaagggttgcttgagcccaggaggttaaggttgcagtgaagcactgcacaccagcctgggcaatacagtgagaccctgtctcaaaaaaaaaaaaaaaagaaaaaagactgcgtacaggtacttgaaaatgtctggtgtattgaaacaatagccataagtttggtgtgactaaaggctgggagggcagggtgcagcagggaaagagctgagaaggttatattgtcctgatatgaaaggctttaattgctattctaaggagggcatataggtcagttcattt

SEQ ID NO: 317317 - DNA, 4001 bp, Homo sapiens
tccccaactggtaagcatgcaataaatgttgaaatgattattgcaacattaaaggaaagtagtgattataaacaagagaactcaagcatcatctatatttggcatcaaaacattgatttgttcttacagattttaacatcctgattacacttggctgagtacatatcctggcattcttgagtgttcacaaaatttataaggctgtaataaacatttgccactttaaaaactgttcactaagatgataatgcatattcagaaaatcaaggaaagacacaatccttgaatcactggtaaacatgagtctacaatgttctaaaagacttgggctcttttactaaattatcgtgttctagttccttcataaagctattttaaaaacaaacaaaaacaagaacttatattaaggttacaagaacaaacactgctcacaaatagtatttttacatttgttcagaacaggtttatatccaaaagcgattatagtaaacaatgactactgagagtacagcatgtaatactgataggtaaggctgatccaaagaatattaaggctaaagtatcactcaacttctgatcctcaggacaaacgatacacttcatgtttgaaaagcatcagttgtaaaacttagatgttgattaaactaattcataaagtccagcagattttcattaggaaattagataaaacaggtcaatcatctggagagtactaatgcagtttggttctcgtaccaacacaggacagaggtatttttctaaattcagtcaattactttccaaggttctcatctgacatactaagaagtctgtaaggagaattcctccacccttggcccctatccgcgaacattccaaatctcagcattagggaatgcatatccatcattttgcagcctactaaaagcccacgaccttaatatgaaagcggctttcgtgctgcatttggctgctgcctgtatgaaggccctgcctcaaagcagggccaactctggcacgttttttcatctctgaaagtggagctaggaaaaacacccagatctaaagatgttcgtttaaatccgtttacatctgctccctttcaaacactacaagcaaactccaaaagcttgagcagcagccgcagcggcaatgacagttcttgaggccgaactgggtcagggttacagttacacttatatagcatatttacacccttttgtctacaaacttgagtgcaaacttaagtttcctcaaggcagcgtgttcgctgggcctcgggaaccgaagcaattttcctgagacaggaagggcacaatccaccctgctgggtggctgcaccagccttctccggaccacgcactcagcggcctcggcttctggccagctctcgcagccaaggggtcgctcggggcaactcgcccgcgtccaggctaggtaactgggttttactacgtgggctcccagcttttcagtcgcccctactcgcccgaggccgtttcgggcctggggtcgcattacataaacagccacggccccagctttcccaggccggcccccgcccccacgccaggggcgtcccacccccgcgcgccccgcgccgtgccttccctgccccctacccgcacccaacccggaccccgcggcctccgcaccgcgcccgctcccgtccctcgggccgggcctggccccgaacgcccttcccggcccggcccgccccgccccgatgtggccgtgcaggccgcccagccggtgctaggccccgcgctccgcccgggccgcccgcctcaccgttctgctggtgcggcgccgggcccgcacccgggcccgcgggcgctgcggctcctgagacggccgctccgccgaacttgggcgggatccgggcgctggcggccgggtgagaggacccggcgggggccgacatgacggcgctggtggcgacggcggctccgcttcagggaggtgggcggagggaagggaaggcggggccggagaggagagaggaagaggaaggaacgcgcctggcgtcactgagggtgtcacccgggaccgcggctcaggtacccaagcttctccgcgagtccagcgctgccactcggcggccgccgcgggcgcggggatcctgggtcgctccgccttgacccacgcgccccacgccccgggacttacacctggggtcgctccccgcacgcgcgggcctcgcgccggtgccgccgcagcgccccctgcaggccggagccgagctggcccaggcctgagtctggcccggggttccgtggccccagtgccggccccgcggctgctgctccggcccggccaggtgccttcgtgttgaggcgaaaggactgggcctcagtgggtgaagggaccgggtggcccgcttccacctagggcagaggctggatcggccgcggcgaggctgggcccagcattactgggaggggaacttgagagccgcgggttgatgttcggagctcaggcgacgactgaccacccacccttcctcgaagaggaacaatggcttgggtttggtttttaatttttgattcccccacctcccctttcttgattccaaaggaaatatagcattcaagcgccatgtctgttgggaatatataattccttggcaaagaaagaggaaacatttctctgataaacacaagaatctcagtaagaattgcattattgagaacttttcccactgataaagtagggaagaggaaggggaaaatagggtaagggaatgctggaagacaaactttaaactttatctccttttttttttttttttttgtcgattgttggtgcatcctgttggtgttccgagaagttgtggctcagcttgctttgtctacattagtggaatctttaagtctttctggtctgtctcagcatactcactggcaggccctagactacattacccaagtcattttgccgtcttggaatcctgagtatgtcatcactctgtattggagatgagattgctcagaaacactgaattcagaatgggatctagcaagatggtatttctggagcaataagtcatttactgaatgattatgcaaagcataaattgcattgtagtcctagaataatacaaagcttccctttagttgttgccgtaaattaataactggcattttaatgcactaaatgaattttagtagttagatttatatctttgacttctaggaatttcaactacattagagttcatatacacaaaaggggcaagcccttttccacagcatttccagcttctccacagaaacctagccccacatgagcaaaagatcacactctgtgcttcatcaaagagattacacaattacagattccagcatctcccaggagtcctttgaatttggattaaggtctataattacgtgggtaagggaataactaggtaattggctttctgcacctggaatgtattctcctgggtataagaggctccttttaatcagaagtatatgggatgaaagtgaaccctgtctcttaaggggagactccttaagaggaggattggggccctgtgttttaatagatcttctccacaatctttaatacctaagctccttccccttgtccactaatttgctgtagaatttttctagcatgtttatgatggtgttcagggcacactaccccaaaatataacaccttggcatattgaatgttttaagctgatggaatttgagaaatggcaggtgtgaggactctgaccttcccatgaagcaggtcataagaccctcatgtgagagatgccctctctatacctggagaaaagaagcagtcttatttgtgaagacagagagacgccaagaggaatctaaatgaataggccttggtaggtttcccccagtttactgcccttagcccatctttttgtcttatcacagttttccataacagtctactcttcatcaagcttggtataaaacgctcaggtttcttcaggtcttcgtttccttatgaaggctctggtgccatgtaaaacttacattaaatatcataca

SEQ ID NO: 317318 - DNA, 4001 bp, Homo sapiens
tttagtgctcatctaattaattattttaatctagtcattaggacaaagagaaatcatagtccaacaaacatagcaacagacaacgttgataatgggcttattttatgagtcataatttgaccgagccaggtggtcactataaccacttgagtgttgtcagtggtttttcaaaggcgacagaatttctttctaatttaaatcatatcacatctctaagaacatatgcacctatatttaggggactaaggaaaaaaagtgtaattttgtaagtgtgtaggcacacacatcacaaatataacagactcatcttgattttttttaaatcttgattctaatcagaacccaaatttgctttaaattttctattttttccaggttttaacaaaataagagatatttcataggactgatgatttaaaaaaaaaaattaaatacgacagaaaatgctttgaatgcaagagaagtgggtttccattctatgtctgccatacttaactgtgtgacatggaatgagctgaagaacctctctaagcctcagttccttcttttagaaaatgaagcctttccagatttccactgattctacaatttatctccagtttatttgccccatacaagcatattcttccttttgttcttttatttgctacaatttaagataagagatcagtgatacctgctaagacttagaatctgtctatattcaagaaataacatttcaaattaaaaatttgaagcctaaaatttgtgatttgattttgtttccatattaaactataagtttccaaaataaaagcaaccatgtaaaaatattatgagatcatttccttctcctgggaaggggagaactgaaaaagaggagagaggcaggcaaaggccttctggtccactttgtttctgacaacccctttttcctcctcccacttagcagagagagacgtggcagcctgagcgctggtcaagctcatccaaccaagagcacttaggaagtcggcacgaacacacctaagtagcagcctgttgctgagtgacagaaaagagaggctgagatggtcactccaaagaacaggaagcagccagttccctctgaactggtcctcagaggaatcagcttcctcacgcaacccagtttgccacgtcaaacttcctcacacagagcaccaagttaaagaaacctgactcagcttcaagcggcgacacggcagaaagccacttggtataagcaggcctaggatcaaaatctggggagccccaaccccagaacggccccctggctcactgtcacccagcaactctagccaaggtgcacttctaaccctggaacaagttcgtatttggccagatcagtttcactattcggatgtcccgaggcttcaagatatagttgccatttttaccatgaatatttctaacatttccttccttcaaaaaaggaaattaagttgataaggagatgagaaaaccgctggcaatgacactcgaatggtggccactgaggatcctaacaaggcagttcctgcatcccaaggcaaaaggtgggggcgggtaaaaaatgcccacgcccacctcctgctcccccatcccgccggccccactattaaactgcactagaaggctaaagaacaaagaatgagttctcctcccgccgccactgcctcaggtgagcacccggcctcccgccgcgtccccgggccgggcgccgcaacccgctccgctgtgcctgggcagggctgtcccgcatgaaggcgtccgcgggtgggaggctttacctgttcccgctcccgcaccccgcgggcttccgagcgctggcggctctgcgcctagtgccggcagccctcggtggccgggctcccgctgcggtcgcttctcccgccgcgcctcttccccggccggcgtccccttagcctggactcacgctcggagttgcagctgggctgggaactgccacgtcaaaccctttctcggctgcgcgcccccagcgccgggcttggaccagccgccgcgctcccgcctgcgcacgcgcacagccaccggccgccgcggggcggggccaccgggctgagcctgcgagcggccgagcgacctcccccttttcgctttttccctttttccggttttttgttttttggttttctttttcccgtcttttctttcccctccccctacaggtcaaagcctttaacgtcgtggctaaatcagaaccgtattttctcggcgcagccccgcaggaaggaggggagcgcgttcattcattcttccatcaacaggttgcagtttcagctcttcattcattacgtattacttaaataactaatagttcaggtactgcactaccgttacatacgggaaagtacacgatctggacctaggggagattaccgtttaaaggcgaatctggcacgtgtacacgcacatttgatgacgtacccgtgcaatgcactacagaggaaggaacgcccaaagcagcctggcaacgtgtaacgcgggaggagtggggggtgggggagatgtcccaaaggaaaagtgtgggaagtggggtttccattgatattggggttgttagcgttgtgtatactccttcttccgcatattccttgtttgtgaagtaggatggctgatcccagccccaaacaggaatctctgcatggaaaagcacccagcgtttagctcaccgtcctgtgagaaacagctcagaaataaaggcaacctatatgagatctggagcttacctctctatctcaccctaaaatcaggaccatctggctggtttcctatcatctttcactgctaaatagaaagacattcagccactcccaggtttggtatagctaccactttgctcaaacttacaaagtaaaaaccagcccggtgttgttgtttttaacatgcactttcttcccggctacaagaaagccacttgacaaatacctttactgatgaactgcctaggtaaaaacgtacatggggatgttgctactcccgaaatgctacatgaattgtgcaggaattttaagtcattttagcagtaaagatatatggtccatttatcccactcttaaaagtttttaaggcatggggcaaggcacagtggctcacacctgttatcccagcactttgggaggccaagcagggaggattgcttgaggccaggaggcagtgagctatgatcacaccactgcgttccagcgtgggcaacagagtgagaccctgtctcaagaaaaagaaaaaaagattttaaggtaagatatctggcctacatccagcttcaacactgatcaggtttgaaaacccacattgaaatttttgttttaaattgtttcttgtattctcaatgtgatgaaaatgttcagtggaagtttaggaagttttggccggtgttgaagcagtacagcttgtaaaagcagtgaaagaacttgtcatataacagctacattacaaggagcgagtgaagctatgatacaaagataggagagagtaaagtcagaaacagtcacaccatgtgatgacctgcttgacttgttacccctataaaaccactacttttgaattgtaaatacatcctcacctcctgctcaggtaccaaacttgtctgaaaccaggacaatttgtggtttcaattctaaaacagtttttaattcctaaatgttaaagctggaagggacttggccgggcgcggtggctcacgcccgtaatcacagcactttgggaggccgaggcgggcggatcacgaggtcaggagatcgtagaccatcctggctaacacggtgaaaccccgtctctactaaaaatacaaaaaattagccgggcatggtggcgggcacctgtagtcccagctactcgggaggctgaggcaggagaatggtgtgaacccgggaggcagagcttgcagtgagcagagatcacgccactgcactccagcctgggcgacacagccagactctgtctcaaaaaaacaaaaaataaaatctggaagggactttagcgatatgagtattcaattc

SEQ ID NO: 317319 - DNA, 4001 bp, Homo sapiens
gtaatatccccttacaggagtttttaacttgtaaacttcataatattatgtatatagaaaatcctacatgtcacttgaaagcaggagcttgagtccagcctggggaacgcagtgagacccccatctctataaaaaataagattagttgggcgtgcgccacgtgcatattcctagctacttctgaggctgaggcgggaggatctcttgagcccaaaagttcaaggttatagtgagctatgactgcaccactgcactccaatctgggcaacaaagagggaccctgtctcaaaaaaaaaaaaaaagtaaaagaaaaaaaaagaaaatcctacatgtgtgtatatgtgcattcttccaatgctttcattagattcccgtaagacagtgaaatccccccaaaattttgaatcattgctcttcacagtttacaaatttatttctattcccatgttattggtttcaataaagaatttgcttatataaaattaagcaatatcattataaatccacctcaaatttcaaatttcacaaataaccgcggacgtatttaagataaaatcactacaaaactacaaaaacactacgagttatccaaaagttcttaagagtctacaaacctctccctgagctgttaattaagggatagtgagaaacaaggagcacagaagaaccactaaaaaaggagagtaggctgggcgtggtggcttatgcctgtaaccccagcacttcgggaggccaactcgggcggatcacttgaggtcaggagtgccagaccagcctgaccaacagcgtgaaaccccgtctctactaaaaatacaaaaattagacaggtgtggtggtgggcgcctgtaatcccagctactcaggaggctgagacggaggttgcagtgagctgagatcgcgccactgcactccagcctgggtgacagagcgagactccgtctcaaaaaaaaaaaaaaaaaaaaaaaaggagagtaagcttttgccaactcttgaataaacggaggtacagaaaacgcaggacgctgtaacaagaacacacccttatcgattaaatacagttataactgcccacaaagacaaccaaatttcagttttctatagttagaaaaaataagttaggagaaaggatttgtcacagactatcagatcactgcaacttcaaatagccctacgtaaaattaattccttaagcgcaagaaaaaatttataatgcccacaagtccaggcaatattttggtttattttacaacagccccgtaatttaacaacttattagcaaaaacatgtaacacttaatgagactgccctcaaagtacaggctgcgcctggctaccaccgtccttaaaataatcctagttaaatgacagtagacgtcagttcaaacctatgaacctttaaatctggcaatagttcaagtacaaaaaaaaatcctaaccaaagccaaagtaatcctgagattttttttcctctcctcaccctcggggaccgcacctctttgtgcacaagggtctgaaagtctcctaatctcaaactccagttaccagcccggctactactccccggcaagacactgtcgccagcctcgggtggcttttgctcagcagtggagacgtcggcgaatgcggacgggcgcgatcactggagtccagatgccaggcgttgttccgccgggcccgaaaccaagactaggggcgcgccgtcaccagagaccgggcctcaggctggtgcggggcagcggagacccaggctgcggtcccagttttggcctgggctctacctcaaagcttaaggaccggcgaagaggacaaaaagcaacgggcggacgcacctggcgaggaccttcggcagccggatcctgcgttagtgcagcgctcgtcggactctcccagcattcgccgccgcccctcctccccggccagggccacctccacgttccgttccaacgtggcagccgcagccgcagccacgccctgcgcccaacacttccgggagcgacatctttccccgcccacccgacgcacagcccgccacggcacttccgggaccggcggtagcctgggaggcggggtacggctccgctggttggtggcgctctgcggtcatcgcgccccggcgatcgtagaaacccttttctgaggggcggcgcgcagaatgtggatggggtagccaggactagtgggtaaaggactagtgcagagggtgtccccgtctggccgaataaccgccgtggcccgcaggaacgccacgtagcactagtcctgtgaggcgtcggcagcccctggcgacactgcccgcgccaaaccaggtggaaaatcgggctgcaagggctttattgtaatttgtgactgagttcttaaaattacccacttgattgcacattctggcgttttgagaacttatacaaagtgaaacaatctgggcattcccaaaggctattgtggacaaagaggtatagatggggtgttatattaattccaattagtaccgtttcatacttgttactatcccatggtattgagacccggtagcactcaccttctgccactgtttctccacaacctcaaatctaattagatgcgttgcctaagtgtacttttagtttagggaggaattattttacagcaaggtgaagccaaaggaaaatcacttgctaaattaccagaaattggattcaacccagatctcctaacttctagacaagttcttttctcattacatctagcattcaaagccaactcttgcactttgggtagctaaagcagaaggatcctgccccttgaacagcagcagtgttaacattcccacagtcagctacatcttctgtaacattccatctgaagcttgcagcttcataagacagcttaacatcaattcacgccaacttctgaaataatgaacccaacttttactggtagtaatatattctctttcagtcttctaattaccattttctttcaacgcagtaactaaggttatcactttggcctgaatgctagtcaaactgattgggatttgtttttgattagtcttcaattcaaacaagtaaatgctccatttcaaccgcaagcagctttctgttcctagtgcaattaaaactgaaagacgttgaagcaactttacctttttacatttatcagactttttcaataggcttgtattacagcttcatgcaggtctgggtctcaacctatctttgctttgctgtcaccactttcaaatctaatcacatccaatttcacttccagcattatcacttttctttgctgctctgtcctttgttgaccaattacctcttttaattatccatttttataaatggtcacaagtttaatctctggggtcaaggaggcaacagtactatgcactttgtgctctgctatctgtgcatgaactaaacagatgatcagtaacaaatcaacaaactttgaaagcaaagtaatgtaactggcgactgatcatgatgcacatcttttttttgggggggggggcacaatgatttgtggactaaagagctagcagcaaaatttatgcaagttttctcagtactgtggtaatggaattattaaccacattgttggactggttttatttaactgtggtcactggtatttatgcatattggaactgtgcaaagactgcctgtatctaaaaaaagaaaaactctttagttcacaaaactaaatccaatttagttaactactatccaagcctaatcctgaatcaaataaaaactgaattgctcactagaagaatgtttggagagaatttaatgacaaatttttcaaattaggatttgcatagcacaaagatattctaggtttttttagagacaggtttttgctgtgttgcccaggctggagtgtggtggcaatgatcacagcgcgctgcagcttcaacatccagggcgcaagtgatcctcccacctcagcctcccaagtagctaggactacaggcacacaacaccatgcctggttaattattttattttctgtagacacagg

SEQ ID NO: 317320 - DNA, 4001 bp, Homo sapiens
agtataataaaactttttgagctgaaattaacctaatgacattcctaacaacaatgtaatcaatgtaaatcaatctagtaatatccccttacaggagtttttaacttgtaaacttcataatattatgtatatagaaaatcctacatgtcacttgaaagcaggagcttgagtccagcctggggaacgcagtgagacccccatctctataaaaaataagattagttgggcgtgcgccacgtgcatattcctagctacttctgaggctgaggcgggaggatctcttgagcccaaaagttcaaggttatagtgagctatgactgcaccactgcactccaatctgggcaacaaagagggaccctgtctcaaaaaaaaaaaaaaagtaaaagaaaaaaaaagaaaatcctacatgtgtgtatatgtgcattcttccaatgctttcattagattcccgtaagacagtgaaatccccccaaaattttgaatcattgctcttcacagtttacaaatttatttctattcccatgttattggtttcaataaagaatttgcttatataaaattaagcaatatcattataaatccacctcaaatttcaaatttcacaaataaccgcggacgtatttaagataaaatcactacaaaactacaaaaacactacgagttatccaaaagttcttaagagtctacaaacctctccctgagctgttaattaagggatagtgagaaacaaggagcacagaagaaccactaaaaaaggagagtaggctgggcgtggtggcttatgcctgtaaccccagcacttcgggaggccaactcgggcggatcacttgaggtcaggagtgccagaccagcctgaccaacagcgtgaaaccccgtctctactaaaaatacaaaaattagacaggtgtggtggtgggcgcctgtaatcccagctactcaggaggctgagacggaggttgcagtgagctgagatcgcgccactgcactccagcctgggtgacagagcgagactccgtctcaaaaaaaaaaaaaaaaaaaaaaaaggagagtaagcttttgccaactcttgaataaacggaggtacagaaaacgcaggacgctgtaacaagaacacacccttatcgattaaatacagttataactgcccacaaagacaaccaaatttcagttttctatagttagaaaaaataagttaggagaaaggatttgtcacagactatcagatcactgcaacttcaaatagccctacgtaaaattaattccttaagcgcaagaaaaaatttataatgcccacaagtccaggcaatattttggtttattttacaacagccccgtaatttaacaacttattagcaaaaacatgtaacacttaatgagactgccctcaaagtacaggctgcgcctggctaccaccgtccttaaaataatcctagttaaatgacagtagacgtcagttcaaacctatgaacctttaaatctggcaatagttcaagtacaaaaaaaaatcctaaccaaagccaaagtaatcctgagattttttttcctctcctcaccctcggggaccgcacctctttgtgcacaagggtctgaaagtctcctaatctcaaactccagttaccagcccggctactactccccggcaagacactgtcgccagcctcgggtggcttttgctcagcagtggagacgtcggcgaatgcggacgggcgcgatcactggagtccagatgccaggcgttgttccgccgggcccgaaaccaagactaggggcgcgccgtcaccagagaccgggcctcaggctggtgcggggcagcggagacccaggctgcggtcccagttttggcctgggctctacctcaaagcttaaggaccggcgaagaggacaaaaagcaacgggcggacgcacctggcgaggaccttcggcagccggatcctgcgttagtgcagcgctcgtcggactctcccagcattcgccgccgcccctcctccccggccagggccacctccacgttccgttccaacgtggcagccgcagccgcagccacgccctgcgcccaacacttccgggagcgacatctttccccgcccacccgacgcacagcccgccacggcacttccgggaccggcggtagcctgggaggcggggtacggctccgctggttggtggcgctctgcggtcatcgcgccccggcgatcgtagaaacccttttctgaggggcggcgcgcagaatgtggatggggtagccaggactagtgggtaaaggactagtgcagagggtgtccccgtctggccgaataaccgccgtggcccgcaggaacgccacgtagcactagtcctgtgaggcgtcggcagcccctggcgacactgcccgcgccaaaccaggtggaaaatcgggctgcaagggctttattgtaatttgtgactgagttcttaaaattacccacttgattgcacattctggcgttttgagaacttatacaaagtgaaacaatctgggcattcccaaaggctattgtggacaaagaggtatagatggggtgttatattaattccaattagtaccgtttcatacttgttactatcccatggtattgagacccggtagcactcaccttctgccactgtttctccacaacctcaaatctaattagatgcgttgcctaagtgtacttttagtttagggaggaattattttacagcaaggtgaagccaaaggaaaatcacttgctaaattaccagaaattggattcaacccagatctcctaacttctagacaagttcttttctcattacatctagcattcaaagccaactcttgcactttgggtagctaaagcagaaggatcctgccccttgaacagcagcagtgttaacattcccacagtcagctacatcttctgtaacattccatctgaagcttgcagcttcataagacagcttaacatcaattcacgccaacttctgaaataatgaacccaacttttactggtagtaatatattctctttcagtcttctaattaccattttctttcaacgcagtaactaaggttatcactttggcctgaatgctagtcaaactgattgggatttgtttttgattagtcttcaattcaaacaagtaaatgctccatttcaaccgcaagcagctttctgttcctagtgcaattaaaactgaaagacgttgaagcaactttacctttttacatttatcagactttttcaataggcttgtattacagcttcatgcaggtctgggtctcaacctatctttgctttgctgtcaccactttcaaatctaatcacatccaatttcacttccagcattatcacttttctttgctgctctgtcctttgttgaccaattacctcttttaattatccatttttataaatggtcacaagtttaatctctggggtcaaggaggcaacagtactatgcactttgtgctctgctatctgtgcatgaactaaacagatgatcagtaacaaatcaacaaactttgaaagcaaagtaatgtaactggcgactgatcatgatgcacatcttttttttgggggggggggcacaatgatttgtggactaaagagctagcagcaaaatttatgcaagttttctcagtactgtggtaatggaattattaaccacattgttggactggttttatttaactgtggtcactggtatttatgcatattggaactgtgcaaagactgcctgtatctaaaaaaagaaaaactctttagttcacaaaactaaatccaatttagttaactactatccaagcctaatcctgaatcaaataaaaactgaattgctcactagaagaatgtttggagagaatttaatgacaaatttttcaaattaggatttgcatagcacaaagatattctaggtttttttagagacaggtttttgctgtgttgcccaggctggagtgtggtggcaatgatcacagcgcgctgcagcttcaacatccagggcgcaagtgatcctcccacc

SEQ ID NO: 317321 - DNA, 4001 bp, Homo sapiens
ttttaacttgtaaacttcataatattatgtatatagaaaatcctacatgtcacttgaaagcaggagcttgagtccagcctggggaacgcagtgagacccccatctctataaaaaataagattagttgggcgtgcgccacgtgcatattcctagctacttctgaggctgaggcgggaggatctcttgagcccaaaagttcaaggttatagtgagctatgactgcaccactgcactccaatctgggcaacaaagagggaccctgtctcaaaaaaaaaaaaaaagtaaaagaaaaaaaaagaaaatcctacatgtgtgtatatgtgcattcttccaatgctttcattagattcccgtaagacagtgaaatccccccaaaattttgaatcattgctcttcacagtttacaaatttatttctattcccatgttattggtttcaataaagaatttgcttatataaaattaagcaatatcattataaatccacctcaaatttcaaatttcacaaataaccgcggacgtatttaagataaaatcactacaaaactacaaaaacactacgagttatccaaaagttcttaagagtctacaaacctctccctgagctgttaattaagggatagtgagaaacaaggagcacagaagaaccactaaaaaaggagagtaggctgggcgtggtggcttatgcctgtaaccccagcacttcgggaggccaactcgggcggatcacttgaggtcaggagtgccagaccagcctgaccaacagcgtgaaaccccgtctctactaaaaatacaaaaattagacaggtgtggtggtgggcgcctgtaatcccagctactcaggaggctgagacggaggttgcagtgagctgagatcgcgccactgcactccagcctgggtgacagagcgagactccgtctcaaaaaaaaaaaaaaaaaaaaaaaaggagagtaagcttttgccaactcttgaataaacggaggtacagaaaacgcaggacgctgtaacaagaacacacccttatcgattaaatacagttataactgcccacaaagacaaccaaatttcagttttctatagttagaaaaaataagttaggagaaaggatttgtcacagactatcagatcactgcaacttcaaatagccctacgtaaaattaattccttaagcgcaagaaaaaatttataatgcccacaagtccaggcaatattttggtttattttacaacagccccgtaatttaacaacttattagcaaaaacatgtaacacttaatgagactgccctcaaagtacaggctgcgcctggctaccaccgtccttaaaataatcctagttaaatgacagtagacgtcagttcaaacctatgaacctttaaatctggcaatagttcaagtacaaaaaaaaatcctaaccaaagccaaagtaatcctgagattttttttcctctcctcaccctcggggaccgcacctctttgtgcacaagggtctgaaagtctcctaatctcaaactccagttaccagcccggctactactccccggcaagacactgtcgccagcctcgggtggcttttgctcagcagtggagacgtcggcgaatgcggacgggcgcgatcactggagtccagatgccaggcgttgttccgccgggcccgaaaccaagactaggggcgcgccgtcaccagagaccgggcctcaggctggtgcggggcagcggagacccaggctgcggtcccagttttggcctgggctctacctcaaagcttaaggaccggcgaagaggacaaaaagcaacgggcggacgcacctggcgaggaccttcggcagccggatcctgcgttagtgcagcgctcgtcggactctcccagcattcgccgccgcccctcctccccggccagggccacctccacgttccgttccaacgtggcagccgcagccgcagccacgccctgcgcccaacacttccgggagcgacatctttccccgcccacccgacgcacagcccgccacggcacttccgggaccggcggtagcctgggaggcggggtacggctccgctggttggtggcgctctgcggtcatcgcgccccggcgatcgtagaaacccttttctgaggggcggcgcgcagaatgtggatggggtagccaggactagtgggtaaaggactagtgcagagggtgtccccgtctggccgaataaccgccgtggcccgcaggaacgccacgtagcactagtcctgtgaggcgtcggcagcccctggcgacactgcccgcgccaaaccaggtggaaaatcgggctgcaagggctttattgtaatttgtgactgagttcttaaaattacccacttgattgcacattctggcgttttgagaacttatacaaagtgaaacaatctgggcattcccaaaggctattgtggacaaagaggtatagatggggtgttatattaattccaattagtaccgtttcatacttgttactatcccatggtattgagacccggtagcactcaccttctgccactgtttctccacaacctcaaatctaattagatgcgttgcctaagtgtacttttagtttagggaggaattattttacagcaaggtgaagccaaaggaaaatcacttgctaaattaccagaaattggattcaacccagatctcctaacttctagacaagttcttttctcattacatctagcattcaaagccaactcttgcactttgggtagctaaagcagaaggatcctgccccttgaacagcagcagtgttaacattcccacagtcagctacatcttctgtaacattccatctgaagcttgcagcttcataagacagcttaacatcaattcacgccaacttctgaaataatgaacccaacttttactggtagtaatatattctctttcagtcttctaattaccattttctttcaacgcagtaactaaggttatcactttggcctgaatgctagtcaaactgattgggatttgtttttgattagtcttcaattcaaacaagtaaatgctccatttcaaccgcaagcagctttctgttcctagtgcaattaaaactgaaagacgttgaagcaactttacctttttacatttatcagactttttcaataggcttgtattacagcttcatgcaggtctgggtctcaacctatctttgctttgctgtcaccactttcaaatctaatcacatccaatttcacttccagcattatcacttttctttgctgctctgtcctttgttgaccaattacctcttttaattatccatttttataaatggtcacaagtttaatctctggggtcaaggaggcaacagtactatgcactttgtgctctgctatctgtgcatgaactaaacagatgatcagtaacaaatcaacaaactttgaaagcaaagtaatgtaactggcgactgatcatgatgcacatcttttttttgggggggggggcacaatgatttgtggactaaagagctagcagcaaaatttatgcaagttttctcagtactgtggtaatggaattattaaccacattgttggactggttttatttaactgtggtcactggtatttatgcatattggaactgtgcaaagactgcctgtatctaaaaaaagaaaaactctttagttcacaaaactaaatccaatttagttaactactatccaagcctaatcctgaatcaaataaaaactgaattgctcactagaagaatgtttggagagaatttaatgacaaatttttcaaattaggatttgcatagcacaaagatattctaggtttttttagagacaggtttttgctgtgttgcccaggctggagtgtggtggcaatgatcacagcgcgctgcagcttcaacatccagggcgcaagtgatcctcccacctcagcctcccaagtagctaggactacaggcacacaacaccatgcctggttaattattttattttctgtagacacagggactcattttgttgcccatac

SEQ ID NO: 317322 - DNA, 4001 bp, Homo sapiens
ccccttacaggagtttttaacttgtaaacttcataatattatgtatatagaaaatcctacatgtcacttgaaagcaggagcttgagtccagcctggggaacgcagtgagacccccatctctataaaaaataagattagttgggcgtgcgccacgtgcatattcctagctacttctgaggctgaggcgggaggatctcttgagcccaaaagttcaaggttatagtgagctatgactgcaccactgcactccaatctgggcaacaaagagggaccctgtctcaaaaaaaaaaaaaaagtaaaagaaaaaaaaagaaaatcctacatgtgtgtatatgtgcattcttccaatgctttcattagattcccgtaagacagtgaaatccccccaaaattttgaatcattgctcttcacagtttacaaatttatttctattcccatgttattggtttcaataaagaatttgcttatataaaattaagcaatatcattataaatccacctcaaatttcaaatttcacaaataaccgcggacgtatttaagataaaatcactacaaaactacaaaaacactacgagttatccaaaagttcttaagagtctacaaacctctccctgagctgttaattaagggatagtgagaaacaaggagcacagaagaaccactaaaaaaggagagtaggctgggcgtggtggcttatgcctgtaaccccagcacttcgggaggccaactcgggcggatcacttgaggtcaggagtgccagaccagcctgaccaacagcgtgaaaccccgtctctactaaaaatacaaaaattagacaggtgtggtggtgggcgcctgtaatcccagctactcaggaggctgagacggaggttgcagtgagctgagatcgcgccactgcactccagcctgggtgacagagcgagactccgtctcaaaaaaaaaaaaaaaaaaaaaaaaggagagtaagcttttgccaactcttgaataaacggaggtacagaaaacgcaggacgctgtaacaagaacacacccttatcgattaaatacagttataactgcccacaaagacaaccaaatttcagttttctatagttagaaaaaataagttaggagaaaggatttgtcacagactatcagatcactgcaacttcaaatagccctacgtaaaattaattccttaagcgcaagaaaaaatttataatgcccacaagtccaggcaatattttggtttattttacaacagccccgtaatttaacaacttattagcaaaaacatgtaacacttaatgagactgccctcaaagtacaggctgcgcctggctaccaccgtccttaaaataatcctagttaaatgacagtagacgtcagttcaaacctatgaacctttaaatctggcaatagttcaagtacaaaaaaaaatcctaaccaaagccaaagtaatcctgagattttttttcctctcctcaccctcggggaccgcacctctttgtgcacaagggtctgaaagtctcctaatctcaaactccagttaccagcccggctactactccccggcaagacactgtcgccagcctcgggtggcttttgctcagcagtggagacgtcggcgaatgcggacgggcgcgatcactggagtccagatgccaggcgttgttccgccgggcccgaaaccaagactaggggcgcgccgtcaccagagaccgggcctcaggctggtgcggggcagcggagacccaggctgcggtcccagttttggcctgggctctacctcaaagcttaaggaccggcgaagaggacaaaaagcaacgggcggacgcacctggcgaggaccttcggcagccggatcctgcgttagtgcagcgctcgtcggactctcccagcattcgccgccgcccctcctccccggccagggccacctccacgttccgttccaacgtggcagccgcagccgcagccacgccctgcgcccaacacttccgggagcgacatctttccccgcccacccgacgcacagcccgccacggcacttccgggaccggcggtagcctgggaggcggggtacggctccgctggttggtggcgctctgcggtcatcgcgccccggcgatcgtagaaacccttttctgaggggcggcgcgcagaatgtggatggggtagccaggactagtgggtaaaggactagtgcagagggtgtccccgtctggccgaataaccgccgtggcccgcaggaacgccacgtagcactagtcctgtgaggcgtcggcagcccctggcgacactgcccgcgccaaaccaggtggaaaatcgggctgcaagggctttattgtaatttgtgactgagttcttaaaattacccacttgattgcacattctggcgttttgagaacttatacaaagtgaaacaatctgggcattcccaaaggctattgtggacaaagaggtatagatggggtgttatattaattccaattagtaccgtttcatacttgttactatcccatggtattgagacccggtagcactcaccttctgccactgtttctccacaacctcaaatctaattagatgcgttgcctaagtgtacttttagtttagggaggaattattttacagcaaggtgaagccaaaggaaaatcacttgctaaattaccagaaattggattcaacccagatctcctaacttctagacaagttcttttctcattacatctagcattcaaagccaactcttgcactttgggtagctaaagcagaaggatcctgccccttgaacagcagcagtgttaacattcccacagtcagctacatcttctgtaacattccatctgaagcttgcagcttcataagacagcttaacatcaattcacgccaacttctgaaataatgaacccaacttttactggtagtaatatattctctttcagtcttctaattaccattttctttcaacgcagtaactaaggttatcactttggcctgaatgctagtcaaactgattgggatttgtttttgattagtcttcaattcaaacaagtaaatgctccatttcaaccgcaagcagctttctgttcctagtgcaattaaaactgaaagacgttgaagcaactttacctttttacatttatcagactttttcaataggcttgtattacagcttcatgcaggtctgggtctcaacctatctttgctttgctgtcaccactttcaaatctaatcacatccaatttcacttccagcattatcacttttctttgctgctctgtcctttgttgaccaattacctcttttaattatccatttttataaatggtcacaagtttaatctctggggtcaaggaggcaacagtactatgcactttgtgctctgctatctgtgcatgaactaaacagatgatcagtaacaaatcaacaaactttgaaagcaaagtaatgtaactggcgactgatcatgatgcacatcttttttttgggggggggggcacaatgatttgtggactaaagagctagcagcaaaatttatgcaagttttctcagtactgtggtaatggaattattaaccacattgttggactggttttatttaactgtggtcactggtatttatgcatattggaactgtgcaaagactgcctgtatctaaaaaaagaaaaactctttagttcacaaaactaaatccaatttagttaactactatccaagcctaatcctgaatcaaataaaaactgaattgctcactagaagaatgtttggagagaatttaatgacaaatttttcaaattaggatttgcatagcacaaagatattctaggtttttttagagacaggtttttgctgtgttgcccaggctggagtgtggtggcaatgatcacagcgcgctgcagcttcaacatccagggcgcaagtgatcctcccacctcagcctcccaagtagctaggactacaggcacacaacaccatgcctggttaattattttattttctgtagacacagggactcat

SEQ ID NO: 317323 - DNA, 4001 bp, Homo sapiens
ataagtgaaatgaattctggacaatgacactgctctttttttttttttttttggcattctgtgaatttcctattacatcagtttcatgattcagcattttccatttcatttatttacagtaatatatggcgagataacccaaggtttctgcaggattgtggaacataagttactctgggcaggaagggtgtcgccttctgtaaatttactattgtttaggagaactcaaaacagaagcaagcaagccctcaaaggaactgagaaaatttctccccactttgttctgaggggtctcagctactctggtatttaaaataaatgggttttgaaaaataggttactgccctttagttgatgactaaaacagaagccaagaagtgtgcaaattgcaaactgacatgcatgagccaaacatattctctgaaatgacaatgttcaagacgcagctaaagtcaccactctggcggtaagcgtgttacagagaactagatttctttccggcatccgcaacttggctggagtgaccaaggaggagttgaagagcgctggagatgcgaggtgcgttggcagaaaactgtccgggccgggaggacccggtggaaactaaaaggagggtcgacgcgggtggcgggcgccgagagtaagaggcgaagttgggcacgggaaggaaaggagctgcgagaagattgagagggaagcccaggaggggtggggggttggggggtgctggagactgcgcgcggcggggcggggagcgaactccgggcggcgaggctcccgggtggagtcgaggacaagaaggggtctcgagggtaacccgacccgggtctagagagagtccaggagggaaaggaatgagcacgagcgagagagcagcttggcaagtccggtccaagcgcccctctccacgcccggggtacctatcccaggtgccgggaacgcccggggcgcagcgacgaggaagagagaaaactagcagcggcgtccccgccccgcgtggcgggtgtccccggccgcccccacccgcgtccccggggccccgcgcggaggggaagacccgggcagggtccggcgctcaccaggtagcagagcaggagcagcgcgcaggcagagcggccgccgaggccctgggggacgccgccactcgggaccatggctgcggcccgggggccgaccgcgagcggcgggggttgctgctgctgctgccgcggccacccgagccccgcgccgcgccgctgcatggcgaggccgcccggatccgggccggaacaggtcacctggtgcagggaccggcccccgcccgaggcgccaccttcccgcccgcccccggccgggccggccgccgcgcgcggggccacctgccgccacctccggacccgccgccgccgccactgccgctcccgccgtcgccgcccccgcagccccagccgagcgccggctcctccccgcctccccgtccccgtcccctccctcccctctgcctccctgcccagccctcctcccggccgctccctctggcccccgggcttccacccctcggagcagcgggcgcccacgcaggtgggcaccgacccgggtcccgccccttggccgccgccaccccccgcccgggtcgctgggccccggcgcacccccctttccctttctctctgctcctcccccgccccccttccgcgctcctgctctctgcgatccccctcctctccctccggctccctcttccttctcccctcgcgctcccaaaccccctctctttttcactttctccttttcctccctttcctctttctcccttcccatcctcttcctcgcttccgcattcttcctctcccacccaccccttttgcgggtcgcacagaccagttcccgcccgtgcaatgggtttttgtctggttgcttttttggccggggcgccattcccgcagggcgcagggcgagtgtgccccctggagttgtgccgcgcagctgcccggctcccaggccttcaggatggattttgacccctgccaacctccacctgtccacctgcggggttgggactgcctccttgctggcatgtttgcagccgggctgcgccccaccctgccggctggttcgcggcacgttctggatgtttcccgagggttttgtgtggtgccgccgccaccgccaccactgcgctctttgttttaattgtccagagtattggcacccaggacgggtttgtatttgatttgcatccctgtgctccggcttccactttggactgagaaaaaaatgaattaattaggtcaatacagtaatactggagccccaaatgaaaggggtgaggccctggaagtgcgcaaacagctttttaaaaaaccaggacacatcctcggccttggggacgcaggttgagactggctgctctccgacccgggttctgcggcctggcggggaggggcctccggccggcgggaccaccagctcgccgccggccttggctttcagggaagcgcttggctgtgtctagcggctccgacaactatctgggcccgcagctgctgctctgaaacagttaatccaccttccaaagttcgcagaagcttccctttagcactggtagatttgtgcggattggaactaataatagcctgggagcctgagaggccacagccctttccctgtgccacgagcataggtcaagtcacaacagacgtcggggagaggctggtggtgagacggggtgcccgggatggtttgacgggcgtggacgcgccctcagctgcttcagtacaggcctggccacaccaggcatggtggctcctcagctgtcgtccacttttttttaggtcacctaagagctgtggccttgtgtgagttccctggccttattccaccggttctcaaacttcagaattacctggagggattgttaaaacacagattcctggacttcagccctagaatttctgactcagttggtcctgggagggacttgagaatgtacctttctaacaagctcctgggtgatgttaacgcgctggttcaaacagccctcctccatttccagaactattggcttttagggaactgggctcctgctcctcccagccagctgccaccacattaaagcattttgggggttttgacagatgctcccactatctctgttccacttctgcagaaacaaagcacttaacattcttctgtgtgacgtggaaaacatttattctatcgagtgtccaagggaacaaaagatttggtggctttgtcccagatcctgtctatatcttttccatcaggtcaaaatacagactatgcttttaatgtatatggaaggaaaattgtcggccagttcagggggaaggggcttcaacaggcattgcagcatttctagggttgccacctgtcttcctgggccacgctccggagtttctctcctcccacattgtacacagattctgttggtcttcggggagctaaatggttcctcggggttgtttgtaatcaggattcatggaattgggagttttcaaggccttgtgagctttgaggatttgggtttacctaagtgtaggtaagcagagtgccccactggaggctggactgtttctaacttgccatatccaactgctcacttctcccctactcactcatctcctattgtgttcctactgtggactgggcaccacctgaggccccaggattccagaggtaggcaggaaggctctgtttctgcaaggagcaccaggcatgcagaaaaccggccagagtttggtcttctaagagggatgtgtgagttgctctctcatcctgagctagaggtggtgggattaactgcttcatcctgtgttggagagggggagagaaaaagtcaagatttcttttcacgggggagtgggacgttttgatccagaagacagaatcagctcttacttttgcgtctctccagcagtttgtgtcagtcattgaaagggcgtggtctgatttcagaagaaagccctttatttaaaaagaaatatatcttcccattgtcc

SEQ ID NO: 317324 - DNA, 4001 bp, Homo sapiens
agtagtccccctccttgccaggtcttgagatgtccacgtggaacttttcggcccggcccatttgtatatgaatgtttcacgcaacactctactacatcacttctgcttctgtgggtagccagcagggccctgtgtacagggatcatctgtttaaactgaaatcttgtcatttgttatggcagttttatttatgagcctgtgtgttgtaaccttgtggcataaatattaaataataatatctcttgggcaaaaaaatatcattcatgttaactgacaacttcttatgaaaatatgaagtaagcccaaccacacaatttgatattggctaattctgaaatatgagtaaaagcacggattgctcaacaggtagatgcacaggcagaattataatttgcatttttacaccttcttgcttcaagaaatgaaacattcaagaagtaaaaaacgttaaaagaaacgggctgagtggcaaatttcttcagaatcaaattctaatttctgccagtatctcctaagcagtttttagcttccaaaaagaaagactccaaataatgacaatgccacataagtgaaatgaattctggacaatgacactgctctttttttttttttttttggcattctgtgaatttcctattacatcagtttcatgattcagcattttccatttcatttatttacagtaatatatggcgagataacccaaggtttctgcaggattgtggaacataagttactctgggcaggaagggtgtcgccttctgtaaatttactattgtttaggagaactcaaaacagaagcaagcaagccctcaaaggaactgagaaaatttctccccactttgttctgaggggtctcagctactctggtatttaaaataaatgggttttgaaaaataggttactgccctttagttgatgactaaaacagaagccaagaagtgtgcaaattgcaaactgacatgcatgagccaaacatattctctgaaatgacaatgttcaagacgcagctaaagtcaccactctggcggtaagcgtgttacagagaactagatttctttccggcatccgcaacttggctggagtgaccaaggaggagttgaagagcgctggagatgcgaggtgcgttggcagaaaactgtccgggccgggaggacccggtggaaactaaaaggagggtcgacgcgggtggcgggcgccgagagtaagaggcgaagttgggcacgggaaggaaaggagctgcgagaagattgagagggaagcccaggaggggtggggggttggggggtgctggagactgcgcgcggcggggcggggagcgaactccgggcggcgaggctcccgggtggagtcgaggacaagaaggggtctcgagggtaacccgacccgggtctagagagagtccaggagggaaaggaatgagcacgagcgagagagcagcttggcaagtccggtccaagcgcccctctccacgcccggggtacctatcccaggtgccgggaacgcccggggcgcagcgacgaggaagagagaaaactagcagcggcgtccccgccccgcgtggcgggtgtccccggccgcccccacccgcgtccccggggccccgcgcggaggggaagacccgggcagggtccggcgctcaccaggtagcagagcaggagcagcgcgcaggcagagcggccgccgaggccctgggggacgccgccactcgggaccatggctgcggcccgggggccgaccgcgagcggcgggggttgctgctgctgctgccgcggccacccgagccccgcgccgcgccgctgcatggcgaggccgcccggatccgggccggaacaggtcacctggtgcagggaccggcccccgcccgaggcgccaccttcccgcccgcccccggccgggccggccgccgcgcgcggggccacctgccgccacctccggacccgccgccgccgccactgccgctcccgccgtcgccgcccccgcagccccagccgagcgccggctcctccccgcctccccgtccccgtcccctccctcccctctgcctccctgcccagccctcctcccggccgctccctctggcccccgggcttccacccctcggagcagcgggcgcccacgcaggtgggcaccgacccgggtcccgccccttggccgccgccaccccccgcccgggtcgctgggccccggcgcacccccctttccctttctctctgctcctcccccgccccccttccgcgctcctgctctctgcgatccccctcctctccctccggctccctcttccttctcccctcgcgctcccaaaccccctctctttttcactttctccttttcctccctttcctctttctcccttcccatcctcttcctcgcttccgcattcttcctctcccacccaccccttttgcgggtcgcacagaccagttcccgcccgtgcaatgggtttttgtctggttgcttttttggccggggcgccattcccgcagggcgcagggcgagtgtgccccctggagttgtgccgcgcagctgcccggctcccaggccttcaggatggattttgacccctgccaacctccacctgtccacctgcggggttgggactgcctccttgctggcatgtttgcagccgggctgcgccccaccctgccggctggttcgcggcacgttctggatgtttcccgagggttttgtgtggtgccgccgccaccgccaccactgcgctctttgttttaattgtccagagtattggcacccaggacgggtttgtatttgatttgcatccctgtgctccggcttccactttggactgagaaaaaaatgaattaattaggtcaatacagtaatactggagccccaaatgaaaggggtgaggccctggaagtgcgcaaacagctttttaaaaaaccaggacacatcctcggccttggggacgcaggttgagactggctgctctccgacccgggttctgcggcctggcggggaggggcctccggccggcgggaccaccagctcgccgccggccttggctttcagggaagcgcttggctgtgtctagcggctccgacaactatctgggcccgcagctgctgctctgaaacagttaatccaccttccaaagttcgcagaagcttccctttagcactggtagatttgtgcggattggaactaataatagcctgggagcctgagaggccacagccctttccctgtgccacgagcataggtcaagtcacaacagacgtcggggagaggctggtggtgagacggggtgcccgggatggtttgacgggcgtggacgcgccctcagctgcttcagtacaggcctggccacaccaggcatggtggctcctcagctgtcgtccacttttttttaggtcacctaagagctgtggccttgtgtgagttccctggccttattccaccggttctcaaacttcagaattacctggagggattgttaaaacacagattcctggacttcagccctagaatttctgactcagttggtcctgggagggacttgagaatgtacctttctaacaagctcctgggtgatgttaacgcgctggttcaaacagccctcctccatttccagaactattggcttttagggaactgggctcctgctcctcccagccagctgccaccacattaaagcattttgggggttttgacagatgctcccactatctctgttccacttctgcagaaacaaagcacttaacattcttctgtgtgacgtggaaaacatttattctatcgagtgtccaagggaacaaaagatttggtggctttgtcccagatcctgtctatatcttttccatcaggtcaaaatacagactatgcttttaatgtatatggaaggaaaattgtcggccagttcagggggaaggggcttcaacaggcattgcagcatttctagggttgccacctgtcttcctgggccacgctccggagtttctctcctcccacattgtacacagattctgttggtcttc

SEQ ID NO: 317325 - DNA, 4001 bp, Homo sapiens
aaaaaaacactacaaatgttagaaaagaaatatggaaagctataaacaaccttaatggattttgaactcttacaaccagatatgtttattagggtaaccgttcctaagaaaacgtatagcctgtgttagtcacccagaacctgacagggtaacccccacttagtttttactctattgtctttgaaaagcacctgctgagataaaattgtttccatctccctgttgcatttggcttacatatccattagagcagggaagaagtggtttacaaactgacatttgataatctaataagataaatactgctgccattattttgaaccaaaaataaataaacgatgtatctcctgtactacttaaaaaaagatacctgtaatgacgacgagcaaccagtgcggatgccactctcccttccctttctcccacaccacaattgcctaagaaattgttgctgtccatgattgcaagttcatgtaaaaagagttcaagtgtactttcatcccagccattctctggacacttgcccttaaaaaaaaaaaaaaacttatgattatatttaataaaactaccgttctctagaatactacaggaatacagtttttctttttaacgtgtattttgccacgctgcttgttttctaaaattcaagcataaattcaccactgtatagagaccgcaaagaggcaaaacgtttgtacatttgattacaattatttacagatttcgagaagtgatgataaatgcatacaatgaggtttactgagatatttaaatttccgtaagtgaaactaactgaaaaccaatacaacacatccccagtgaagatgcttcaaaccagggcgttacgactggggcggtgggacgtggagaagggcggtagttgtcaaacttcagtgaaattttggccacgcgctgtagctcactcacgcctgtaatccgagcactttggaaggccaagaatggccgatcacttgaagtcaggagtttgagatcagcctggccaacatggtgaaaccccatctctactaaaaatacaaacattaaccgggtgtggtggcgggcgcctgtagtcccagctactcgggaggctgaggcaggcgaatggcgtgaacccgggaggcggaggctgcagtgagccgagatcgtcacactgcattccagcctgggcgaaagagcgagactctgtttcaaaaaaacaaaacacaacaaaacttttaatgaaattaaaatacatgaacgctggcaggagggagacctgtgaagttccgcggaaagctcgtggttcgagttagcatacagtctacaaacaccattatgtgttctgagtcgttgagggttggtgaaagatggaggtgcgaactttgccctttccgcgaataaaaaagtacactgggactttccctcacttccgcatcccgaagttagaaacagcgggactcaaaaccccgaccccaacaccccctcctaacaacaccatttggctttcactggctttggcaaggctgagaaggcacagaccgcagtcggtcagctagggcaagccaagctgagacagacttgggactagtctcaagcagcgaagagctgccggtgaggcagcaccagcggggacgcccggcggagccagagccccggggtcgcggcggctggggaggggaccgacagctcggtaccttctccagaagcagccgtatgaggtgctcatgcgagcggcgggcctcacagccctgccgcacgtaagccggcgacaccagccgctctcccgccgcgaagctctcgcggttcatgacagcggtggcgacagtggcgaataagcgggagcactagctccacacgccagacacacgacggaaccagaatgcaactcgccgcctggacggtacggcagcgccttgggacaaaaaacaaaacaaaacaaaacaaaacaaaaaaaacacttctcgttcgtgcacatgcgcagaccttctcagatggcgctccaggaggaagttggcgtatttgagcatgcgcgagggagtccgcgcttttcgctgacttttggcaaaggaaggactgaaattagccccgccccgctgcggctgattcgtctagttaaaccctggtgttcctgacacaaacttcaggaaaggattttgcacttgtgcagaccgggcgagcagagtaagaagcaggtacgtgggtttttccaagttctgtgtttcagtcctgttggatggttgagatctgtgcagggtctgtgcttccgccttattcaaactgtcagatgccagaaccttcgatctttactttgatacatttccacacttattactgcctcacaaccccataggaaatagcagtgccccactcattttccccttgacactactgtttagccatagcacttactactcaccacgtgacatgccagacgtttgtttatacacacacacacacacacccatacccatgaatgtaaactctctaacctaacggcaggacctcggtttttgctgcggtgcccccttcccccgggcacctaaaacagtgcccagaataaagtagggcctaaaaaaaaagttgatattgaattaatgaattagtttgaccattctgaaactatccccaagaacattttgtaaaattgattaaggaggggaaaaaaatccaactaggcttacagctgctgttattaagccagcttgcagtgtggccgactttcttgtagctggttgctacttactaccccaggagaatgtggcccttgtcacaagactcttcattctttttctgctctgaagataaaatctaagacattatgagaagataagctttctgtttgcattgcttctttaggtcccgcataccaacaaaactaaggacgccaacttgtctggaaggcccaataaaaagctgattcatggaggaatgcaattgtcacatcctaatgatttcatctcccttaccccaacgaatcgataaccccaaattttccagcccctcaccctccacaaatccccttaaaaaactttgcctagaaccccttgatgaaatggattgaagcttgagaactcttcctgtttcctggcttgtaacttgtgattattaaaactttctctgctgcaagcctgctgtcggaatactggtctgtttctgcacagccggcataggaacctggcagtgctgtaacagttcaacaacttagaggttcactgctggagatccctgcctccagtttccttacaatcttcatcttatgtgagcctacagtaattcctgacattgctttcacctggtggtttgtccatttgcactgagtcacacccacttgcaagagctgattgttaaatgttcagtaattttgtgagctagttttcaaatacagccactcaaaaattatattacaagcaaaagtaaaaatactcaaaatttgtcacttcctaattattttacattttactattatctatgctcttcaggttatttacatgcattttatctatatggtggaaattcaatgtaatgttatactactgcacatcttccaactcctcttttgatgatgtcacgttggccatggtgggagcatttacaccatggaaatcagtaaacaccgctaatcaggcccttacactccaacccactcccctagaagtcagttgttcaacatgtaccagctcatcactgtttctactgcatgttcccatggcatccagctattaatataaatcagtctatttatggtatttgttgaattgcatttcaattgttaattttctgtctcaactagactgtgaactcctggttcacaagggctataccaatatctgtgttcaaagcacagcactaaatacataatagctgtttgataaatatttgttgaatgacatagagcatttaactactttaaacagaaaggtaaaccacaaaacaacaagaatttagcatactttctaaaatgagtatttttcaaacttttggaaagttgtgttcctattctcaaaatgcaactatttttgcaa

SEQ ID NO: 317326 - DNA, 4001 bp, Homo sapiens
ttatagaaaatgtgcagctaattatttcttccacctcctccatccctcaagaatgcaccagcaataatacgtgttactgaaaaagccaaacacccccactgaatatttgcaatcctaaacgtttgccaatttatctaaagcagatattgttattttagttctctgaatctatgcctgctaataagtataatggggggcagggggaggagtaatttaaccagataaatttcacctctatagacctcaattttctcaccaaaaataaaacgactagcccagagactatgcaaattccctcagtaacaataacctacatgtgaccactaattatcaagagcacaatttatgtgcaaaagaagaccagaattcttaaaagagccatgtcattaaatcgtagagttgaaaaggcctaaaagacagtcatgattcgatatgaccgctgtgttttctgactgcagaaaacgtctttgaaagcaccgcgggcagccgaaccaccaaatcgaattagaatccgcaaagggacccatgaacttctcccgagggggtagggtgcaaaaggcgcgcgtatctggggaggagttaggcggggagagggggaagagccgggagcctgagagcacagccttgcatttctgggatttccgagcttccagtatctcagtaagtctttcgtctgtaactacaaaatctcccgagccaccacctgcagctgcacagctgtgggaaagggaagaagaaaaagggaagaggaggtgatagacagggaaagacatcgcccgaggcgcccccaaagccagtaaggcgagtggactgtgaacatcgacgatgaaaaggggaaagggaaaacaggaggactccgcctttcccacccagctccgctcctttcaaaaaaaaggaaaggccgccgccgccccttcctccgcctttcacttggggatgcggagcggccactgaaccgcaccctcggagtcccgctcccctccggcccggccccggggcgcggaccgagtcttgcaacccagtaggcgcggcgccttggcccacacactcggggcaaaggtatctcctccctcctactctcctccctcccgccgtggggcactcgattcttcacgcacccgcccgcccttcctcttcctcgcgtcccagcctcctcagcccgccgcccccggcctttcagccgcagaacatttcagtccttccacccacaccacaagggagcctccagaaaactttgtgtgtgttatctggggctttgtccacatcctgggcagggcccgctcagccgggtggatgcccgagggtgtccgggatctcacaatgcgctggggaggccaccacggaaatcccacccctctgacctgcttctacagcagtgccacacgcagcacttcagctcgcaattcccatgccctgagcgccccctcggcgcgggggagactggaggaaagccccgaacccggcgcccttctggctgtcacgagggaagaggtgcgcgggcagagggaggcggctgagacacgccgcgcctcaaagaattattttaaagggaacaggagaggggtcctttttctttcgcattcccagaagaggggcgcgacgaggcgatccactgttgcatcacgtaactgagcccctgggctcctaaccccgaccccagacgcgcgcccaaattcgtgcacacacccacagccgtcgccgccgccgcggggccgagcacccgcccggctcccctgtggtcctcaccgcacccgccccagagcagagaccacccggcgcccgaggagcagcaggcgaggccccagcactcacagacggtctccccacggccacggccatcgcagctgcggcaccggctccggctgcgcccgggtgctttacgccgactccggctgctgctagtgctcgggctccggctcgcctccctcgcgcctccctcgcggctgcgctctgctcgccggcgtcccgctggcagccagcggcatctgctccccccacgccgccgcccctcccgctttattagagcaacatggccacccgcctggaagggaccattcgcttccccaggaaggggtgtgagcctgcgcgcccggccgcggtggtgggcgggaggatggtgggcgggctccgagcccagctccactggccccggccgcggggctcgcccctccgtccccaaacgaccgtctccgctgccatgagatgccgacagcctgtgcgctggccgccaccccctgctccatcaggtgctggaatctgagtaaaagcctgggcgcgagctcccagccccggggcctgccaccggctccacgaagcgggcagctccagcggccgccgggagaaggaagggcgaccgggggagacgggtcgcagggacagcacgtggcggaaagttagccccggactagcacgccccacccggagaagccggcctggaaggggctgcggaccaccaggcggagcggtgggcgaccgaagtgcggctgggctggcctcctcgtctccgcactggaagaattgcccttccgcaagtcttcccttcccacatgggggccctccaggccgcacctcggtcgcccaccgcttcccttgagaagggagactaaagacaggcatctggaagctgtcactgtggcgcgcgggcagacaggggatcccattggagaggaagagccgtagtagtcgctgctgccttcggccgacccaacggccgcctgcttgggaggaagaaaaagaacgcccccgctgaagaattaaggcagccattggttgctctaggggtaaggaccgaggcctcccctgggtgtcactggagcagccacacgtgggggatcagccgacttcattcgatcgctggcgacagacccggcgacccgtaggaatgcgcgctggggctgcggctggagggcgtggcgacggcaacaggcgggtggctcgagtgggtgcgactctgggcgcgtgggactgagaactcctccgccgtggggaagatttttttcccagcagatgttggggtgttactgcgtgtctgaggggccggcggaatggaggggtcccggtgcgtgcagggcagcgaggtgtgtcagatgagctgtggatccctgcggccccacgtgggccggagaggggggcccacgacaacaagcgattgaggacagcgatggacagggcggggaaccagctgggtggaagcacagggagtgtggtgaggagggaagggctgtgatctgccctcggtacgacgccccaagggacagcctggcctcctgaattagggaaaagacaaccggtctctttagacgggcgcctcagagtctgacctgagtcttcaaacgcccagatcccctggggccttgagtctccctgtcccgctggccctgcctcgcctgcgcttcaggactccgacgcccccgcagccttgggctaagggtcagtcgtccccgggcgcgggtccggctgccctggaactgatgctggatttcgctggtaggtgggctaggggcttggtcaccccgtctgaattccactgtcaggacagctgtggaaccgccagagaaaagtctggccatgaaagaaaggtgaggggcgccgacgcagagcttatttattcagtctgtgggcggactcagacgtgcagagcaccaacctcttcaatttctgccctctagactccaaatcttttgaaattagggaccaccattttatgccaaacatacagtaggcgctcaataagtgttgaattaagattacacataaatgggccgggcgcggtggctcacgcctgtaatcccagcaccttgggaggctgaggtgggccaacatggtgaaaccttggctctaaaaaaatgcaaaaattagccaggcatggtggcgcttgcctgtagtcccagctactatagaggctgaggtgggagagtcgcttgaactctggaggcggaggttgcagtgagccgagatcgcgccactacactccagtctgggtgacgcagtgagaccctgtc

SEQ ID NO: 317327 - DNA, 4001 bp, Homo sapiens
ttgtatttaatttttacaagtaaaagtaaacgttgaagaaagagagcaagccctaacaatctgagatcatttttcctttatctttcacaacatggaggcacaagaagtcaacaacttttaacttctcagaaggctccctgtggatcaactcaatcaatgtatctgggcctcactccagtaagccccaacattggctttatttattagagagataaatagctctgtgagttcacaacatggtgaaaattttcttaacaaaaaccacagtctttaattggcttcgaagttagatgaagaaataagttttaatattggcattacattggatacttttcaagagttcagaaatattagtctgcttaatctccccttaagatctcagaagcactgcaaagggagttatgtttatgaaaacattaaaactgatttttccctagtgtaacaataaccatgtatccttatgcatttgtagtgtcgccactttttttctttatccttcgtcagaacttgtgtttatacaaatcagacagaaaccagattcaaccaacagctaaaaattatttactcacatgcttagtttaaaacattctggtatcataccacaccacactgaaaaacatcacgacgtactgtatggagtggaaccaaataaatacgctaaagagtattttccagtattcgctgttacaaaatcataacatcctatgatacaaacaacgagattgtataacgtccccacatcgttttttcagaactaacaaaaaaaaaaaaaaaaaggtggagaaactcagcaaaacaaagtggcgagaaaagtcgggggaggggcggtagaagagaaggggcggagaaacacgacactgaggcggtgatatcacccacagccaacggcatggaattcagaaagttaagtgtcacccagcaatctcggtgcggactcgcggcgcgcctgcacagcgtggcggctgcatcccagccaagcaggaagggggagggggaggcctgactgagttcgctcgggggcagctgaggggagggctgcccgcctcccggacggcgcacgttcgagtcccgggtcgggagacttgtccgtcgcccgacaatgatttcatcttttcggaagagctgccgcctgggccgcggctgccacgtgcctggtctggccccgtgcgctgcgccgggggacctacccggacggggccgcggccgccgcggggcgcagaggcagcagaagggaagggctggcggccgggaggggatcggggtggccaaaactgggctaggggattgctccgcggagtccgccggcctcaaggggctgccctgcggagtgcacccaccctccgcgcccaaaggcggaaaggccagagcgcggggcaggtttcgcaactccgagggtggatgcaggctgtggccgggcgggatggagcggccgtgcgtttccagcgcccccggcctggcggagccccattctcggcctgcgccccgccgcgcagtgcgcgctcccggcggcgtgaccgtggctgtcgggcccccgcccgagccgggcaaccggccacccgtgtaggggacagtggcggccgcggggcccggcgccgcgctgttcgcagcccgccactccttccgcgctccaggccctctgcgcctcctcccccggccccggagaaatgcttgtaccttccaccgcctcctccaccatctcgtcgtcgctatccatggcggctggggacactgcccagctcggggctgcgcggctgcctcccgtccctctgggtgctcccggcggctgagcgagctctggggctcgcgagtttggaggaggaggaggaagaggaggagcagtcggggctggctcgcactgcctccccctacagccctttcaattccttggccttcagctgctgcggcagcagccgtcgtcccccctcccttcgcccacttgcccctcgcctcggaggctccggtgtgccgccttggccgctgccgctgctgcaactttctcctgtaataccctctctttgttatcgagcagctgatccgctgacatcacccagcgccggtgcgctccctccctcgctgattgacagttccctgtccctttccagaagtaaggctccttaaaacgaaaggcgctccggggccgcgcgtattccgcgtcccagccaacccgcctccggcccgtcagcgtttctcttttgcttaggtgcggcttggcgcgccccgagcgctcaacgcggtcctgggcgctgcgggcttctcgcggacacttggaccgcccgtaggggctccgagctcccgacctcccgttgtgccgggagcaacttgaaagtccgtcgtgcactgtccgtgttccctcgagacaacctccaaagtgccagggaagctaaggaagcgtttctgacgctctggcgcctggacttcctctcaccctcgcccccacatcaccccgtcgccaccgggagctgcacgagtgcgacacgcaagggagcgcaggtgtcctcgcggtcccgcatcacatccgcaagccgatttccccagctcgggggctgttatctggcccggattccgcaggatggcgggtccaccccagcgcccccactccccgccctccttcgggtcgccaggccctcgggtgattcagaaattcatcaaatccaaatggcagcgggctctctgtcaggcaggaaacaagccgcaccgaaggctcggcaggttcctccttgctgctgtggtaatggaaaaggagccgccgagtggagctaacgaggaaggaaggaccctccgtctggcgcgcctctttcccgcgcctcccgccctgtacgtgtgatgtccccagctgtctctctgtttctccaagtgccaaccacttcacagattcaggcgtcctcaagtggagaaaaccattgggcacccggcttccggcccggccacttagtgtcgttatggcgctgcctcttacaggtggcggtaaagggcgactgtaaatagccgattaaacagatgtaaatgtacacaatgtaccgtggaattaccgggtgccgctctgggcacccgccaagaacagctactgcatggaggggaggagggagcaaaaaaaaagtaattccattttgttttctgatcaatgaatgagactttggggatttcaaaatacttccagcgcccaggagactactccttgcttttggctctgtgcttaaatggtagatatttttgtcaagtattgccggcttgtttcttaaagtcagcttttcctctatgaaaaagagaacaatgctagggacattagccccacacacttccaggaatttcagcccctttgactgttttagaaaggggagggtcctggaccagaagttaggagacttgagtcctggtgctgctcacctgcagaggtgtcttgggagcccagccagccagcctgaattcctccagattagaggcttagtctacattgacataaggtccttggggcttaggctagagcactctgaggttctttggctcaagcaagacaccctctagcttagtctatacctctctgaagtctcttggcttaggtttgacctccttaaagtcctccagtgcagatactgggagtccaaggctaaacagagaaggtgtacgtgcagtggaagatgaaagagccactttaggttacatcattttcaaacatgaaccacagaaacaggattttatatctgatttttaaaaagccatcatttactgagctcggtcactcactggttttgaattatatgatattttttctcatttaacctttttacatatcaccccctcccttgcatattatactggtgcactaaaacataccagatactcgtcttccccagtttccagttgattttcagggtgaaaaacaatgctgaaagctgaaggaagcagcaaaaagactttattctcttactcaaaggcagtgaggcagggctgggaggctggaagaaatctctcaagacgtacagaagacacagtttcatggtggg

SEQ ID NO: 317328 - DNA, 4001 bp, Homo sapiens
ctttttggagaaatgtaagatgcgtaatgttgctgctgatagtgggaagaaataaaagcaacatacataaaactgcccttaagtcccctcacccaaacaaaatcaaacatttccaattaggagctctcaggatgtatataaaatattactaacctgtattggttggtctatggtacatgttggacaaatgtttgaaaaatgccaaacatttgcaataaattagaaatctaaccaataagatgattgcaaactcatggtccctgccaggaaagattgctaaagaactttgcatttgctttaactaatgatgtctgtaggaaaactactagagattgaaagggagaggctgctgaagccctgaaagggattaggaagctcccttttccaacccaggggacccaaatcagctcagaggcattgtatatgttttcctttcagaaaaaatattgagagcccatgaggttttcattgctttgatggtttttgcacaggaactctccctccgttttctaaaaacttgggaatctcttttgcatgattttctccagctaatcaaaaccactcctaagttaaaaactgatagcaatagaaaagtgatttccagagattccctttatgccctcttcctcaagtatctgagcagttacaaccaatgttcaattttccacacactccgtgccagtcccggttttatttccaaaatctaaattgacaaaggacaaaaagacccttaaaaggttatctacttgtgcatcctggttttcctttctgtacaggaaatgttcctgtgactagaatcctgcccagtggtaggaaggtgcagaatgaggctgagcgaggggcctctggccagaatgctcaccacaaactcctccaccaaacaccacttccaacgctctgcgcagctccagtgctagcatctttaacaataatcgtgtatctatttttttttaaaccgccgttcagttcttcgtttttttagttttgttgtttttgtttgtttgttttatttttaaactgcccttaagtatagctggtacaactcgggaggagaatgcgcgagacttgggcggcgtgggaggggtgcctcaaatttgatacaggcttgttgtgatgacagaccaggtcaggcagaacttctgcccttcccgctactggcaccccaagcagggatgcactgggatgcgtggcaggggcgggatctcctgggagcgtctcagcccagcagggagtggggaagcaagagggaaggcttaccttcctcggtggctggcaggaggtggtcgctgctagcgagggggatgcaaaggtcgttgtcctgggggaaacggtcgcactcaagcatgtcgggccaggggaagccgaaggcggacatgaccggggcgcagcggtccttcacctgcacgcagagcgagtggcatggctggatggtctcgtctaggtcatcgaggcagacgggggcgaagagcgagcacaggaacttcttggtgtccgggtggcactgcttcatgaccagcgggatccaagcgccggcctgctccagcacctccttcatggtctcgtggcccagcaggttgggcagccgcatgttctggtattcgatgccgtggcacagctgcaggttggcagggatgggcttgcaattgctgcgcttgtaggagaagtcgggctggccaaagaggaagagcccgcgcgccgagcccaggcagcagtgcgaggcgaggaagagcagcagcagcgagccagggccctgcagcatcgtgggcgcgcgaccccgagggggcagagggagcggagccggggaagggcgaggcggccggagttcgagcttgtcccgggcccgctctcttcgctgggtgcgactcggggccccgaaaagctggcagccggcggctggggcgcggagaagcgggacaccgggaggacagcgcgggcgaggcgctgcaagcccgcgcgcagctccggggggctccgacccgggggagcagaatgagccgttgctggggcacagccagagttttcttggccttttttatgcaaatctggagggtggggggagcaagggaggagccaatgaagggtaatccgaggagggctggtcactactttctgggtctggttttgcgttgagaatgcccctcacgcgcttgctggaagggaattctggctgcgccccctcccctagatgccgccgctcgcccgccctaggatttctttaaacaacaaacagagaagcctggccgctgcgcccccacagtgagcgagcagggcgcgggctgcgggagtggggggcacgcagggcaccccgcgagcggcctcgcgaccaggtactggcgggaacgcgcctagccccgcgtgccgccggggcccgggcttgttttgccccagtccgaagtttctgctgggttgccaggcatgagtgggagagggtgtgtgtgtgtgtgtgtgtgtgtgtgtgtgtgtgtgtgtgtgtgttggggggctgcgtccctggtagccgcgtgtgccctgtgatggagcccgggacctgcccgcccgaggccgcctcggcgaacttcgttttccctcgaatctccagccaccgttcagcagcctgtcggtgtgctccccaatgccgtaaaaaaatcagaattataaatatattcgtatgagcagaactttacatggaaaacgaaatactaataaaatgggcttgttattctgttggagtgagtgcctaggaagggtttcgtcgttgtagaaacgcccctacaagagtctcaccagtcacacaggactgcccaccatttccccgttttggagagatttttccttcttaaatgaatggcatgactcaatactcgaaggcatcacgggctctaacacacagccgcccttgcagctgtgcgctctggaaagctggagtatgggcccccagggcactgtttgtaaagactggtggccggcacaaaagacgggcacaaaagatgggcaggctgggagggagcgaggtagaggaaggagtcctgcctagagatccacgagggctagaattagctcattcatcccctacgtaccagggggcaccatgctgggcgctggatgtgcagaaatgaacaaacaggccggcctctgctctcgtggagcctgggatctagtgtctctgactgcaaacagtaagttctgggttggggggtgggctccttttgcctaattgtccctagtctccctatggggacaggaggccttcgctctcctcagccgctgtctccgggtggctgtgaagatccaaagagataatccccggagggcgaagttctttcatatgtaaggtgggcgcattgttattacttcccgaccacttaagagtcattcacaggctcagaccccggcttcctaatttccctccttccggaagatgcgttggccttggcggctcccaggcccaagttatcaggcacactttgcggtccagctgcttagaggagccgggtaatgaatgaatgggtggcaaaagcccactcagtgttatctgctgaccgtaaacacgccaggaaaatcgtcatctggagagaatgcacattctgaactccaagaatctgcgtccctaagagcccagcttccgggtgctctgctggggaagggcccggggtagctgcaaaaggcctctctttccccaaattggttcagggccttttcgtctctaacgaaagcaccaagaggcctaaaagcccccttcccaacataaactactttgcaatgaaaccacaaaggaaacagaagcacaccaaaagaaagagctaataaagagcgtgagctctgagagatgctacgacttgggcctgggagtgggataagggccctctcgctttcacgcccccccaaccccccgccggccccggccaacccctaaatccccaacgccctccgctggggtcgcctcctccccgcagagccccttgttgggagttcaaggagcccgaagctggtctggctggtttgagccccgcgctgccgcacgc

SEQ ID NO: 317329 - DNA, 4001 bp, Homo sapiens
gtcactttatgtggatggtgagaaggataggtgtagggatgaagcaagaaatacaatgagagatgtgcttaggggccagtaagcaacataaataccatgacaagaacaatggactttatcctgaaggcaaaggggaactactgaagagttaaaataggtttcctatacaatcagatttgcattgtagtaaaatcactccaaaaagagatgaactggaactgaagagcctagaagtgaagatatcaacagcaggtttctctaagagtcccaatgaggtactgactgaggtttgactttgaagctgaagtctggggaaaggtgttaagaggtagaactgtcaggatctcgtgattgtttggatatgagtgtggcacaaaggggtcgaagatgactcccaaataggactggctatataatttgtggggcccagggggaaaagaaaatgtggggctcactgtttaaatctcaagcccaggacagcagaacattaaaccaagtgcaggtccttctcagctcccttaaaatggccttggtcctaagtttctggctaggttaaacaagtgaatggatggttgtagcctttttaatagtaagtatgacagagtccagttttgaacatttttgagtttgaggtgcctatggaaaattcagttaagttcagggctggagacgtaatgcgtaaatttgaagtggagactgagtaacggatcagactgccccacttatgtgtaaagcaaaaatagaaccagatggaaaaacaatcatctgaaacagaagctgataacttaggcgggaaatgaggaaagccaaggcacaatttaaataccaactccaagaagttttgtctcctttcagtttcactcattcctctatgttttattttactgttacaaatctgcagcctgcctattgtctttagctgattttttctgcatgtatttggctgtatgactttaagctccttgaagagagattttacgtcttttatcttcagaatgagccctccagtgacatatatctaataggtctctaaaaagttaattatctaagaaaatcgttccaaaggtcaaaacttgactcatttttttcaacaatgttttagaatgagactttttaaagagaaactactataattgttcaaaggaaaagtaagttaggtaagggggaaagttactgaaaattatctgtattacaataaatcaccctagcgattacgtgtatgtatatattaacacacacacatatgcatgtacatgtatgcatacgtataactagattttggggggatgaggagccttttaaaccattctaagttacaagtttacaatgcaggtcaggaaatcttggataaatcatttttaaaagtgaacaggagatagttttagactggtgactaaatcttcaaaaaccaaagcgtgaggggaaatctgggatgtctgcatattggagatggcagaaacaaaaaacaaagatggcaagctgacaccggggcaacagctgacccgtttcttgtaagaggagccttctcgctggggctgcggttatttttatccaaatctctgctggcggctgaacggggtacgtccctggcacgtcccagcgcaggcttccaggctggctcgaccgcctcccaggctctccggaaggagacccctcctcaccccctccgaggatcagccaggccgggccgagcccgaggccgcccctggctcctggtccctagcttgtgccagcatcctcggcggggcacagctcctcccgccccgccccgccccgatcggccccgccgaacccagaccctgcggcccgcgccccccgcacccccggccagggctcccgcgggcccagccggcaggacgcggcctcccccgctcctccagcccgcggccgcggcggtactcacagacctgttctgcagccgccgccgccgctgccgccatcttcccgcgcccgccgccgccgagctccccgcccgactgtgcccgcccctccgcgaccgcaccctgcgcgcctgcgcttgcgccctggcggggactgggggcacccgctgctcacaccctcccctccccagcccgcatccctgacgacccgcatcccagccctgcgggctcaggctctgcggcggcccctgcacctaggaccttggcctggggcgcgttgtattgcacaggggccagaaggggcctatggggattccgctccaccccgggccgcctgcagattcctcagaaagggcaccctcaaaaatcgaggacgcttctccccttcccctttgttccccatcgctgaaagatcggtgccatccggagctgtgaggctctctttgtttctcggaccaaggtctccttggctagggtgggaggggccgatatcgagaccacaagtggacgcggaccggcgtggtgactgcgtgggcagaagtgaacgagtggtcacttaggtggctggagtcttgaagactgagagtcctcaaggaggacgttgaatccttcgggctgcttgacttcggaggcctatgaagtctgatgtttttatcctgcgatactggggatggatttttcatttagtgttggagatagtgttaccatgtatatcctcgggaacctaattgaacggacatttactgaacaccgggaagccactcaaatgtacgagttacttgagtagacattcattgttccctgttgtagatataatccaataattattttagctgaaaaaaaatgcagtgaagtcaatagcaactgttcctcatgtagctgaatcacttctaataagcacctttgggccctagtactgtctaattcagtgggagtcagtacctagctggtcatcagtctctctgcatttcttttttcctaaatgctggaaccacttgactcatatctctagactcactcctctctgagtctgtgggacaaacatgcattttaggcaggaaaattctaagttaaagcccaatgatgcaggagtcagcagtaaggctctgtgttaatattctgcctgtggtctcattgatcaatttgcacaactgggcttttaactgattctgagttcctatcttctagtccttaattcctaagctttgcgtttttctctctgctgggaaagttcttcttccctggcacgcgcactcttattcatccttcaagaactattctattcaaacgtcatattttctctaaaggcttcagaggctcccacagatctgttccttaactgtgtgcctagccttttctagcacttcagattgcattgtatttttatcttgtctacctgctgatttcattcaaaagatggtgtgttctatctggaaggtaggtgtcttactcatcgtttaatctccaatgtctagcacagtaattaaacttaatagatatcttagaaatctgcccagtatcccaatttctaagccctgacttgattttgccaacctccctcccacttaggtggtgagatacctggtagccaattttcctgaaaccaaatgctcctttggctatttgaatatcaccttctcttggattctttcctcatcgctgatgtccatctctgacaggacatcccactattcttaatgccaatttctattctcttttaaagagatccaattcactcacatgaccacattttaatgtgggttattttcaaatgtactattgtcagccttttttcccctgaaataatgacatttaaagtcaactctgtgcctggcaatgcctcttttacaaatgaagaaatcaaggcttgtagaggttaaatggctgaccatcttttcaactcctaaagagccagtattgaatctaggtccatctgactagtctttgctctttctaccatacatcacagcctttaattttgctctttcttttgactgttgcatgatattagcatttggaagcacaaaacacaggtccccagggctggagtatgagtcagattatgaagacacttacacctttgttcactttgcagtggtttgaatagtgccctgcaaaaag

SEQ ID NO: 317330 - DNA, 4001 bp, Homo sapiens
tgtcaaccatccaaaacagaaacattcttaaactaaggaaacaaataccaaagccatttgctttataaatgtaacgtcagaacctagttaaagctgctgagatcaagtttatttacaaaatactgaacagttttatcttggaattcttgtctctttttgagctagtattggtagaaataggaacattttaacaatcagttccctttaaatttccttaaagaaaaatcaggacctaacattgcaaacacttcatcagacactatcacttgttgctaaccatgaagtcataataagctagaaattacccagagatcacatcaatccttcctaagactgtattttctatgagccataaagaaagaataaaaaactggtaagaggcttatatgcattgaataattgttactcttcatttgtcaaaatagtcaattttctattttctaattaaaaaacagaagtctttttaagtgaccgcttttaagaacagattcaagaacaacacattcaagatttttaaaatggcacagcctcagtttatccttttatattcagagacgcacaccatatacaagaaaagctggcagccttcaaaataactctgaaaagatacaccaagccttagctatgtctctcacgcaggtaacaagtagaatttatttgaaggataaaaatacctcactacaattggcatgataaattagtaactaacaatattttgattcagctaccacaatttctaccaaacaacagaaacgggcctccagaggaccagctcaggggactcacccaccacgacactgatgaggataactacctttggcttcagctccacaggctccagagagcacacacttctttcggacacggggcaccactgccacctcttttatacttgctagcacacagccccagctgttctcaatttaggagagcagtcttttagtcctgctacagaaaccagccacctgatgaggttttcaaacctcgtaattagtcctctccctggatacactgctcaacttaagcacaatccactgcattttaaaggacctcccccctcccctgcctccccgtttcagggtaacttcagggaaaactgaggaggacaaactcaaagtgatgacagctaagcctttatttaatgaaagaaaaaaaacacagcgaaaatggcagtcaatatgtacaggcaatgtctgtttacaattatgggtggcaaatagataaaccacaagtgtttactgtgcacctaaatgccccagtgctgaaggctatgtagggcaaattaaaaggagtgaaaaacacctgacctgaacattcagccaaagagcttgcagtctaaccaaagagacaggactaaaatgatgaaagactactggagaagactgaatggcatattgtgaaaggaaggagagggatgagctgatcactaggtaaagtgagaggtttagctgtactgtttccctgctccagggacaagatgtgtccacacacaggctctgtttctgagaaagcaaaagcatgtggaaagctggcctggtagagaaatgggggataagggagcatgagactagctaaaaggtactactgagaattataaacatctcacctttcccttgtccttctgcagagcccccagctatcaatacattacagcaggatgagaaagacccaggcctttgacatcccaggctttgacaggcccaggcttgacagtgtcttggcacaatgttgtgggaagaataagcacaatgaagaggtgcctcaggaaggtattttcaacaacaaaccttcaacaccatgaactgctacttctaacggaggtccgaagcactaacacagccatttcctgtctctctttagcagccttgcctaatccacttacagcatcttgccaaatcatcatccaaattcccttcaactttactcttccatatgtgctcctagtcttatgttcatgtgggaaagaagcttgtgattttgaaactccatttcacagtggatgtacagatggtctttataaggtagctactcggttctagaacacagaatgtggaacagaagaaaatccaattagtaaccttttttcttttttttttccaagaggacacactcagccacccacctcatgggactgctatgagaatgactgaaataattaattgtgaagagctttgtgcccctgggagtaagaacactatgtgagtacaatgcccatttatcgttattagtgttaaaattaatattttccttgggatttcattaagattaaatatacatagcacattcatcatgtgtgaacaaatcttgggacgaaatgtttgtcatcaagataatgatcacaacatattcattcctattttgaaaggaaaatatctcggggtcccaaaatcactcagctaaaggaaaaagtcaagctgggaactgcttagggcaaacctgcctcccattctattcaaagtcacacatctgctcatggagataaatgcatatctgattgccttctttggagaggctaatcagaaacccaaaagaatgcaaccatttatctcttatctacctatgacctggaaggcctctccccactttgagttgtcccacctttccggaccgaaccaatgttcatcttacatatgttgattgatgtctcatatccccctaaaatgtatgaaaccaaactgtgctctgaccaccttgggcacatgtcttcaagacctcccgaggctgtgtcatgggtgtgcaacctcaaccttggcaaaataaactttctaaattaactgagacctgtctcagattttcagggttcacattttggtaaccacagagggattctgagtggaggtgcccctgacctttaacaaatctcctatcagtgcttggttcaaccttgggctatctttatggcttaaaccaataggacaatttgctgaggcctggaagcacccattccagagaatccctgatctccccaattctggttgagatctaaagtttattttgctgtacaacctttttttttttttttttttttttggagttttagttgcttccaacacaaggcaggcaagtttttcctgcttccatgatgatggaaggtaggtaactcctttacggagtttcccttccaacagggaagatgaggtttttttttttttttcctgctcctagtgacacaggagatagaagttatttaggcagatagtgagggtaagagttcttggcaaggcttcccttctaacagaaagcagcccgagaaacttcttttgtctaatgaagagcagcctgaaaaattgagctgcagacatagataagcaagctggaagcttgcacaggttactgccagcagctgtgccaatacaaaatggctacctgggggccaggtatgttcaacgtgtaggctccatcttcctttttgtcaccatgtgtaaagaaacaggcaacatggtgtgggccaggaagataatccatttgcataataaaacattagggtgggggtggccagctttttgcacccttatgcaaatggcacacctggtccaaccaatctttcatgccctatgtaaatcaaacaccacctcctcaagctcatctataaaacctgcatttcactgaggaagcagaaacccatttgggacccctctctctgcaggagaaagttcttcttttccttttgcctattaatcctctgcttttaacctcactccttgtgtgtccatgtccttgatttcctctgcatgagacaatgaacctcaggtatcaccccagacaacaaggctgcttcactaggatagaaagcagtcttcagcctgagacccaacaacccctagataactaaattggggtttgtcttggctaaagttaaaatcaacaaccagctggtcttaatgtctttaccattagagtgctcagtaatcatataagttgtgcaatcattttttttttgcttaactgtttttttttattgtttctctttttcttgttgtttcagtctttttcccattggg

SEQ ID NO: 317331 - DNA, 4001 bp, Homo sapiens
ctttaggaaaaaaaaaaggtaaaggtaaagttagcttcctcacgtcctttcttcctgtaaattccaggttgtcactttcagccattgctctgacattgtttaaacagtaaatggcagttcccatgacacaggatggaaaccataaccttctcaggtatccgtactaaaaatgtttaacttgctgaaaacatcacttcccaatctaaggaacttgccaaaggatttcacatgctaaccctcggcccaccaggcttataaggaggacattctgtggaaattaattggttattacctaagccagctgcaacacactattatttatatataaacagctataatttgttggggtctgctttgtaccagacattatgagaagtcttttgcgctttaatcctcattattatcctcattattaatccttatttaatccaccttattatctgaagtagctataatcccattttactggttcagaatgtttaatgtgcctgagcacccaccgttaatagaggagactggtaatgaaaccaaggatttgaaaagttaggtacagattgaaaacccacgccgaatccagtgacactaaacagttgaatctcttcaaaatataacacacatgtcaaaatgattttaaggtcatttcagagcaggcaagacttgaaatagaggaccggcaacattaataaataaaaaagactacaggacataacattttgagttggtttcaagccgtggataattaatgattatccatacctctggatggatgttgacaggggttccccgccccttattttcgctgagaaaccaagtcttcccttccgtaaagggagcagctctggaatgccacacgttgaagggtttcggtgtgggctgcccagagctgggctgttactgttcacacatcatcagtaagtgcctctcaaaaaaaaaaaaaaaaaaaaagagaaagaaaagaaaaaccacacacacaaacacacacacacagtccctcctccaccaactgaacttcagccctgacctccggagtggttctggacaatctggggtttaacctgtgcccttccaacgccaggaccggggtacccgaaatgggttgcaaatgaatgagatgactgctcagaggaaggagactaaggcacacatctctcctccagaccacaaaatcgaggaagcatgccctgggcggggagggtgggggccggattagagccacgtccccgcttcgcaatccacctttcccctcccgcgcttcggaggactctccgctccccagcccatcctcctcctggcccctccgcgcgctccttacccgctggtggccagggctccagacactcccagctgaaggcacttgctcccgggaaggggatttgccaggggatggagcccgctgccgcagccgccgcgaccagccccgggcgtcaccaccctcgggccgaagccgctagaaagtttgctcggggtctcgccctcccacgccgcggcctgactaggggaagcagctctccgggtccctcccgcggccgccgcccccgaggccgcactcggcggcgctgcagcaccggccaggctccgtgcgcgccgagggctgggtctccccgccccactcggcccacggcgcggcgctcagtgttgaccgcggccccgcgcccgctctccccgcccgccgcgcgcggcccgctccctgcgccctgcgcccagcgcgctcttgacatcattcattctctcacaccctcgcccgcccactccatttccaaacagtgactcacccgtcggcccggtggcagcagtgcccgttcctgctgccgtggctctcctggcgcagagtggagctcgaaaaacctgcgcgacttcttaagaagaaaatcccagccgactctcccctcgcggctgtttaaggtgcagagaaggaggggcttggcaggcagggcagtttggctcccggccgaaaggctgagggcctggagctgacctccctgagcggcaacagagatcaatctgggaaagttctttgggtgccactcccagcaactttcaggggtggggctggaacgggatcccccacccccgcacccggcctgtttcggaaactgcttcctgacggcgtgtgagtgggcttgggagcgccagcgttgattcagagggtttatcggtgttgaccgggcctaggtcaaagaggtgggtttccaaacctcacagcgttgcctggcaaggttagtcatcagtccgcatggtatgagctggaaggttgctccaagctaatgaggtggcagcactgtccctttcgtgcctaaccatcgtgtcatttgtcctgttaattgatttacttctcacttaaggaatcgtaaccaaaataaacagtgtaagtagttatttgcttaactgaatactgcgcttttccgcagcttttggggcccaaggcagccgtgtggtttcttcgaaggcctcagtagttttttaaaagggggattgctgtctttaaaatggtaatggttctacattgtcctggagttgctattcatacacctgctgggcagttttcaaagtaaacgatggcagcctcaaggactctaactaggaatgaccaatccgagggaatgtggctaaatctttcttgacataagttttacattaatgtctccttctggacaagataattatgtttaggatttgcgctggtttatgggtgcttccatataatcaacaaaaataatgacgggaatctttgggtttctagtgcagatatcatgtgggtcaacagtcatttgtggctattaaagatgatggtaacagaaaagaatatacaaggcaggcaatccccaaactcgcaacttcaagatgtcgtcacagtacaggcaaccaaagaaaatggacaaatgggatcatattaagctaaaaagcttctgcacagcaaaggaaacaaactgaagagacaacccacagaatgggaactatccatctgacaagggattaataaccagaatatatgaggagctccaacaactctataggaaaaaaaaatctaatagtccgagtaataaatgggcaaaagatttgaatagacatttctcaaaagaagacatacaaatagcaaacaggtatatgaaaaggtgctcaggcaataaatactggcgaggttgtggaaaaaaaaaggaacccttgtgtttgtgggaatgtaaaaagtataaccactatggagaacagtatggaagttcctcataaaactaaaaatagagataccgtatgacctagcaatctcactgctaggtatatatgcccaaaaaaggaaatcagtgtatcaaagagatacctgcactcctatgtttattgcagcactactcacaatagccaaggtttggaagcaacctaagtgtccatcaacagatgaatggataaatcgttacatatacccatggagtactattcagccataacaaagaatgagatcctggcatttgcaacaacatagatggaactagaggtcattatgttaagtgaaataagccaggcacagaaagacaaatttcacatgttctcacttattcatgggagctaacatttaaaacaattgaactcatggagacagtagaatgatggttaccagaggctgggaagggtaggggggatgggtaatgggtaaaaaatatatatatagttagatagaatgaataaggtatagtatttgatagcaaaacagggcaactacaggcaacagtaattgtgcattttaaaataactaagaatataattggtttgtaacataaagaaaggataaatgtttgagatggtagatatcccatttactctgatgtgattattatgcattatgtgcctatatcaaaatattgtgtgtaccccataaatatacctactatgtacctacaaaaattaaatttaaaaaaatttttttgagatggagtcttgctctgtcgcctgggctggagtgcagtggcttaatctcagctcactgcaacctccacctcctgggttcaagcaat

SEQ ID NO: 317332 - DNA, 4001 bp, Homo sapiens
ggcagggggaagcctcctggccatgatcacacagctggaaactggtggcatctgagttcacacccaagatcctggctgagtttgcgcccttcctccctgcccctcaggaaccaaggctggccatctcgtctctctgggcccctggacttcccgtctgtgggcctgcttgtgtgcgtgcatccctggggggtggggagctccagctgactcagcaccctgcttcctctgtccatgtgggcagaaagggccaaggcaggcccagagcctgtcctccctctgtctgcctcttcaggccagcctccttggtgggctcccccatgatcctggaggcctggggactccctgaaaggccaggtcccctgtcagcacccctctcaccagatggccctggctggcagttcctagacacggctgcctatctgtcttccttctgcctgccccctccagggtgtgcctaacgcagggcacagagccaggcaaagggagcctggcgggtggcagggagaggggatagacagaatcctcactcccttgcagccctcgtcccaggcctcctgtcctgccaggagtggagtgcctggagtggggccctgaggttgggctccaagagggcccttcgacggtgtctacgtagaggagacagtggacagagtgggaagaaccaggagggggtggagcccagcccctcctctggtcccacagggcctgagccagtgagggcaggagcttgtccaggctcatggagttggtgcagggctgacctgaacccagaggcttgcttcggcaaggaggaggctgtgggccctgccttcaggcggttgtggaaacaattctacacattgcatcaccggcccatgtcacctgcaaggccacacacatgtcatccaggcaggctgtccaccccagcagcccacacggagtacccgcccctggccacagccaattcgaaggacttaagtgtggccactagaccaggaggcacagctgtccccagtgtcaacagatgagcaaactgaggcacagagaggggataggaggtgctcacggaaaggagcaccagcagaaggctccccacagcagggctcaggccctcaatacccccagggagccgaggcccagagcagcgggaaagtgctgggctgcagggaggccagcgtacaggtggaaggggctgtccccgccccctaactcctccagtccctctgccacccctgagattccctgttgcccatgagagtctcagacgcccggctatcagtcactcacacttcagtgtgaatcagcgccagtgggcggcttttcttgccctccgtgaagcgcggccgctgcagagggaagtttggattccgggaagggcggagagcgagtgcccgccgcagcctttgagtcttgtggggagggtcgcgtaaaggggccccgccgcggggccagaggggcgcgaggggtgcgaaacagacgcgtcgcaccgcctcccacccctgagcccccggcaagggacacccggcccccgccccgaagccgcgctccctcgggcactgcccgccgtgcccaggccccgtgcgtcctttggcaaggacacggaggccccggggcccgggggaggctgctgcgcacccgagacccccgacacccgcccatacctgccgggaccctgagactcccccgagacctgccaagacctgccgggacccctgagactccccggagactcccccgagacccccgagacccgccgagacctgtcgggaccccgagactcccccgagacccccgagacccgccgagagcccccagaccgccaaggcccgccgagccccttccagacgcggagaccgcccccccgcgagacccccgagacccgccgagacccgccgccgaggcttacccgccgagcgctctcctggcccgcgggccctgggtcgaggcggcggcttgactcggccgccaggcgctcccgcccgcgggacccgccgccgccgcagctccgtcccgcccgcgcccgcccagtccgccctcctcctggccccgccccggccccgcccctccccggcgggtcccgcaatcctggaggtccgagctgggcgtggggcggggccggtacctcagggtgggcggggaactgcacgtggcctccgcggccccgggacgaggcccctggggggcgaagactggcgttgtcgcgggcctagacgccgggtccacagtaggtgcttagttctcgcccgtgagtgaggtagcgtgtctgtccctcctgcgtgtccctcccagtgacaccccagtgcccagcgacccaggtggaaagggcgctgtccacccccccagccccgtggtcctgatcctgggcggccccacccctgccccgtgagtgcgacttaggccctggccaagacaggagcaggggaggtgggggagggcttgctgggcaccaggaaaccttgtctttgtttccaaatgtcctccagggtacttttcaggcacttcccagggggacctcgcctcttggaccaggtctggactccggtggcccagaggtcgtcttggggctgggaggcacaggagaccgggtgctttacacttggcctcctctgaggctccctttcctccaccatcaccctctccctaagagtaggcccagatgccttggtgtaagggcaggggcgagaagaggaggggcttcctgggaggaaatggcttccctggggagctctcagggccaggtaggtggagggagccgtggagaaagtgaagaggctggggagaccaagctgggcctgcagagcttgagggcgagcggaccccccaccagtgcgggagtcaactgcttggggcgtggggggactcctccccatgaggagtggggactggaccccaggtcccagagcccaggaagctgtgagtagaggaaggacaggatcttgctgggaacccaagggagctgggggtgggtggtggtgacctggccctgtccaggcaggcggccaaggtctgaccctctgtactgagcacaagaggccagagtccaatgacaggggctgaattggctgctccaaatcaggcaggggcaggggtgtccagggctggccctgcagcaggtgaaggactgggtttgggtcctacaggttgaaatacctgagggcctccaggagacacagccaaaccaagcgggttctcagggttgcagctggaccgagtgtgggccaagtcaccgtccacctgtcccagagctgcccaataatgggtcccaagcctcagaaaggggatccctggctgcaatagccctcctccctgctggagagacacacttgggatcagagaggttaactggggaggggagtaagtgggaggagtcagaaaactaggtggccaggccctgagcccaggcatagaggaagagccagtgcctaccaggaagtgaccaggaccaaggcagggcctctggaagggaagggacaaagcaggggatggcagaggcaggggaggatatgggagagtcttcagacaacagggccccttttccccatctgtgaaatggagggggtcctctactggggaggcggcagaagtggatggggcatgacagcaggcagatactcactctacctggcccagggccacccctcacaccggcgctggggctgtgactctacccacctacagcctagctctcggggctgaacttagaccccagtgagggagtagatgggtgctggctggctggggtgctcactctctggggtgcctgctcacatccccacctgtaagtgtcctgggcctggctccccaggtctcaactctgctcatcccagcattgggtagcctgcaactcttctgcccaccccccactctgggctatttcacattttcctagcagggaggaagagataggaactacagccattgtggaagtggctgggctcagccccatccgacgttcagtgctgccactgttagcaccgcatggggctgcgtcactcctgtaagaggccacatgcggagggagc

SEQ ID NO: 317333 - DNA, 4001 bp, Homo sapiens
cgctgtgtctctgcacacccagttaatgtcacaggtggtgcactcacacaggacgtgcacatgagctgcacagctcgcatgcacacaggcgtgagcccctgcataggagcagggtgggggctctgggaggctgggctcctgcaggatcatcctggctgtggtaagggagccagcacctcatgtgaccacagggtcaaggacttactgttagtggtgatcaggttggccccatttgtgggagccacagggcaagttggggctggggatccagcccaaagggagaagataccaggtcaccctgtgcactttattcacacgctcatatatgcgcatcctgtcacactcatgcatgtacagttaacactcacaccatccacactaacacatatatacacactcattctcccgcatgcccactcgctctcatgttctcatacacactcatgcactcatgtctactcatacgtgcacactcacacccatatgtatactgatatacacattcatcacactcactcatgcatatgcaagcactcattcacacacacacagcctccaacgaccaacaagacctgtcaagtgcggtcttctgtgtctccgtgtcctgaagcctgagcacagaatcatcaccaccactcccagccctgccagggcccagtgccaagctgtacctcacagctcactaaatcgaccagggtccacctgagctcaatactttacttctattttacagacttgggtatagaggctgggagaggatcaggccttgtgccgagcgcactgggcactccctgtgggccaagctctgtgcttctcagtgatcgccccatcatccaacaccttgagcttcaaaccagagtcctccccaagtcactgacgaagaaacttggccaaagtcacacagccagtaaatggtggctcacgcaccacccccggcccagcacagccacggcccagcttggcgcacagtgggtggccggtggtgggcgtgggatgtgcagatggggcggcttccaccttggagccctggctgccctgcctccccacagctgtctgctcttccttttcggtttcccttgtttccttcctgttcccagaatctttctctgttaacataatcaaaaccaaaattctcccgtaaaggcccagtaaccagctatgccagagaagcactgctggccaggggcagggtggcccagcctgggctctgcgagcacagccccagcccggcagtccctgaggtccctgcgggtcctccacattgcaggtttcagagcatggcactccccaggtgggcagcagggaccttgtacagctctctccgttacccccccacaacagaaacacacactcacatacacaacgtgtgtacttaggacccaaacaccaaggccaccctgcaggctgtatcatgagaagttcccggacctgggccccaccccagcaggctggcccccgcctccctgtcggccgcatgtgatgggggggtggggggggttctaagtatcacattccctctctggcctccccctgtgcctgccagctcgggggcctctcaaggcagacagaggccactctcctcagagcctgttgccttttgcaggctcagggccacctcctgtgggctcccacggccagccccgaggaaggctgtggctcccacgtggggcccccttactggttcttcaggtgctagaccagtgccgcctcccgagccccagtcctggggccgccccactgacctgatggtgctgacccaacacatggccctccgtcctcgtgacctgctcggggccggtgtcctggggcccagggaggccatgcggctcaggggccaccagcccaggcagcctacatctcccagacatgtgaggcctgacgcgcctggctgccccacagctgtgcccacagctcactcctgctgcttctgaggcctgtggccgccggtgcttcctccccacccgggacttcctgttccctgctccctgggcagcaccaagtagccggcacttcctgccttctaccctgtgaggtcctgaaagctgcctggggcccagggctgcccctcatccaccatccgggttttaactcctaccttccactgctcctgccctcccatcctgtggtcagaggccagggctctctggctccagcgcaaggtcagctgcatccctgggaggaagctccctgctgcctccccgcagggccacctctgaatactcggcttctccctagcaaaccatgaaacaacctgcaccctgggtgtcaggcccagcacagagcagcatttacaacacacacagggatggtgtcaccttaccagcatgctcttcctgccagggcagctgctgccaccctgctctgccatctgaggccacacagagggctgttatgtcttgcacccggttctatgaatttcaaggtggccatctctgtgccctttgacaccaagggactgagggactaggcctgggctctggcattcctcgattcctactctatccccagccttttcacgtccccgcaaccacaccagctctgctaacatctggtttgctagaaagtacattatggctgagtggcaaagcacgctcccgtactcaccggcccctgccccaaggcccgctcagaattcggcccctcccagggctgctctgcccccaccaagcccagtgccctgcccaggcccagagcccggaagcagggaatggggattctagccactggctgctgagcgccctccctctcctcccagaacttgcccagggaggacaggacccctgggcagaggcagctggagaaaggggctttctggggcctggggccaccctcacagcaggatttgagggtgacagaggccacagagcacaggccacaaagctgcaggggtctcatcttgcccgccaggcttcctagggcacggccccccgaaatcagcctcccaacaaaccctggaccccagccccgtaaccggctgtgcaggtcccaagctgtcccatagcctaggtgtcgggtcactcaaaaaaggcagctcccaggctaaggagctccgtctccccagctgtgtctgcagccccagccctgctgccaaggtccccctcggggcccgtttgggctgcagacaccccactgtctcctagagggtgaggagcttgggcttttaggtctggggcctccttagcatgggcacagacaccctggcgtccccagcctgtgccagcctcagtcccctcaggtggccaagggcagaccacaccttcagcagaaggctggccacagcaggcagacagacagagggcagcgaggagggcacggacagagtggggcctcttcccattctctttcctccttgcaggagggttgagatcaaacagcaggtgaggaacccctgggccactgcccagcctggacgatgaggcaggcagttctgacagttggggctgcagggtccagaggagggaccaggccctgtgggttctggactggggaacgcctcccagaggaggggcccagctttgatagaggaggaagtttgctggaaggagctggggtgagggagccacgggaggaaggggcttggggtgagcacaccccagggttgggaggaatccacaggcaatgaggtggccaacgcacagcttcagggatgacaacccatgaagataagaacccagaggcagccggcgctctcaggaacacgccaccccttactgggcaggcaaatgcaagagcggacaaggcctgagctggaagcaggagccaggctcgcccctgcccttgctccgccaaaagccccacactcatagactcggcagaggcagaagcaagcagaagacccacctgaccctggcccaggcccattccccccacagccctggtccaatgctgtgatgctacagggggagtccagcccagaggagaggagcaggccaggtgaggggaccctgggggtgggggacaaatccacaccagccccttccccaaccctatcttcccagagg

SEQ ID NO: 317334 - DNA, 4001 bp, Homo sapiens
gaagaaggcaagtgagcagccaagagcacccagctcaaacgacctgggctcccatcctggtgtgactttctgggagatcccaagcctcagatgctggaggacagagtggacacccagcccagcacacagcacactgttgtcagcagtggtcgtgaccaccatttggtgggttggctgctatccaccccaccagcccaggatatcactccccttccctctgagcccaagcgaggaccacacagtcagtggaggaccagtgactgccttggggctaacccaggcccacaggacccaacatcatgccctgccccctactccagccccccttactcatgctccagctgctctccttgagatacaccatgctgtttaatgcttcctcctctgcctgaaatgacctccaccccttcccatgcagagaacttctactcatccatcaagacccaggttaagagtcccctcttctgctaggcaccctcattgcccacttaaatccagcatcttcctcatctcttgtcccagtgaacagtaccccccgaccctgcactgtttggtctgtgcctgccctcactccatcctgggtagggtcactcctgtggccccagtggagttggatgggagcaggcctgtggccagtgtcctgttaagcccttagtggagcagctaaggtcagacccagatgcccagtggggctgggactggttccactacagctccaaccccaaaaaacatacataaagaaaactaagccagggcaacatagcaagaccctatctctaaaaaaaaatttttttttaattagtcaggcatggtggggtgcatctgtagtcccagctgctctaggaggctgaggcaggaggatcacttgagcccaggagtttgaggctgcagtggtctatgatcgtaccactgcactccagcctgggcaacaaagtgagacactgtctctataaataaataaaatagccggacgcagtggctcacgcctgtaatcccagcactttgggaggccaaggcaggcggatcacttgagctcaggcgttcaaggcctgcctgggcaacatatagagacaaccatctctaaaaaataattagctgagcttggtggtgcacacctatagtacccggaggaggcttatccaggaggatcgattgagccaggagttccaggaggcagtaagctatgattggccactgctctccagtctgggcaactgagctggagctaaaattaaaaaattaaaaacaaaataaataaaaagaaaaatactctctgcttttagcaaaccagcaccctccaacaaaagtgcaagaggaagtcttcaaggcatcaggctgtcttctgccggcctcggcctgggtcacccggctggaccccaccagctccttctgcacccaaagacagcccctctgggcagggaggggtcaggggcgggtcccagccgcaggacccccaaccacaggccaaggtttggaacaaaggcgccgccacaccccgccgcccgcccaaccgcgcccggcccgaaggagccccgcagtggggatggaggagggagccccgtgcccagtccgcccgcggggagctgcccgcagatcgacaagccccgtgccggcctgagtcccccatccgcccgccgggacggtccacgcccgcctttgttcccccaagaagcgcgtgggcgaccagcagcgcccggggctcgcggccctggtccaggggctcggggtgcggggtccagagccggaagctcgcggcccgggtcccggggctcgggggccggggctcggtactcacggcgtccacgcggcgggcatggccggcttccccggggcgatccacgcccgcctcccctgcgagcaccggcacggccccgggccgcgtcccccggccgccgccgcctcgtcccgggcgcccgcctcccgccggccccagctccgcggccgcggcccggagcccgccatgcccgccggccctggcctggcagccgccggctcctcccctctcggcgggggactgggcgggcaggtgaggatcccggcgcgcccctcccggccccgccccctgccgcgtcaccgtgcgcgggaggcacgtgagccccctgcgggcctcagtttccccacgctgcaaggaggttggtgggcgcttgggacaggaggcccacatctgttggtgcagcctggaatcaagaagccttcgatgcaaacgaggcctcccgctccactcccccaacacctgccagtccacacagcttggttggaaatccacggccggcgcgggagcctcggctctgaggccccgcccaggtcccatcccgccgggcccttgcaaccagctccctcgggaaagtggcctctgcaaaacggcacctgcatggagggcggcaacggggcaagggatcgggcacgtgccccgccctcaccttctccactttcctgcgggactccatgggcctccagccccggattctccaaggagccaggggtctggtccttggcacctcccacctgcttgcccaaacgcaggcacctcacccaggagagtcccctggggtggccaaaggccggcagaggcccttgctggcctcccaggcatcctgcctcctccatcttccacctgcaaacaagctgccaccaagatgggccagatgcaggtgtggctctaacagcctgggcctgaccctacctagctgtccatcctgggcacccaccctggtttcaaggccccacctcaggcccgctatctggacttcttcccactgcacccagccttcgaggctctgtcccatctctgtgcctctgttctcagtgcccttgtctggcctgcctcaaggatcccacctccttccagccgccctgccaggcccctctccattgcctcttggcaaccccctccacttcctctcctcaggcttcctctgcctccagccccctccacccagcacagaatcaacacgcacaccattcccatcactgctcagtgctaaacctctagggcctcctcatgccaacctggcccttcctgattcagccactcctgccctctaccttctgtgctcttacgccagccagaccctatggctccagttacctgaatcgagcaagcacccacttgcaggcctcagcccctgctgttgccacagcctaaagttgaaactgaactaacccagccatcaagagttggctcaaaagaacatggatccttcacaaacttccagaaaatagaagaggagggaactcattctatgagagcagcattatcccaataccaaaaccagacaaagacatcacaataaaactacaaaccaatatcccttatgggtatagacataaacatcctcaacaaaatactggccaactgaatcctgcaacatataaaagggattctacaccaagaccatgtgggatttatcccaggaatacaaggatggtttaatattcaaaacaattaatgtaatacaccatatcaatagaataaaggacaaccacatgattttgatagacgaagaacaagtgtttgacaaaattcaacactcctccatgataagaagagtcaacaaaccaggaatagaagggaagttcctcaatctgataaagggttctatgaaaaacccacagctaacatacctagtggtaaaagactgaaagtttttcccccaagaacaggaacaaggaaaggatgtctgctctacttctattcagcatagtactggagattctcaccagagtaattaggcaataaaaagaaataaaaggtatccagaatggaaagaaagaacaattattcactgattagattattttacatacagaaaatcccaaggaatccacttaaaaattattagaatagccatgcgcagtggctcacgcctgtaatcccagcactttgggaggctgaggcgggcagatcacctgaggtcaggagttcgagaccagcgtggccaacatggtgaaacccccatttctactaaaaataccaggtggcaggcacctgtaatcccagc

SEQ ID NO: 317335 - DNA, 4001 bp, Homo sapiens
tacatggctagccctgcccccatgccctcctactgtgcaccctaccaccccagggactcacatttcagcagctgcagctgggtaccgcccttcttgtgcaggtagccagccttggccacgcccccaggcatggttagcaggttctgggcaccaatggccttcatagggacaggccaatgcatctcttcagccgccatgaagctgcaataaaggacaaaggcacgtggctcagctacggtcaggcaggagatggctgagccagggcgctcagggggacactgccaagatccaggacacagcttggagggtagggccatgacaggcaaggaaaccccttttctgagggccttgggcttccaggtgggaccccagggagagacagagccacgggctccactcagtcagcccctggtccactcagccacaaacccaaccccaggatcctgagcgctacgtgcagccctttctctccactggttcattctgcacacagccactgagcgcaaggccccacgggggctgggtagagatgaacgaactcagaaaactgccagcccaggtaagtgagacctcaggccataactacttcaagtcccagtgccaggtgaacctataaggggcctagacaggaagaaggcaagtgagcagccaagagcacccagctcaaacgacctgggctcccatcctggtgtgactttctgggagatcccaagcctcagatgctggaggacagagtggacacccagcccagcacacagcacactgttgtcagcagtggtcgtgaccaccatttggtgggttggctgctatccaccccaccagcccaggatatcactccccttccctctgagcccaagcgaggaccacacagtcagtggaggaccagtgactgccttggggctaacccaggcccacaggacccaacatcatgccctgccccctactccagccccccttactcatgctccagctgctctccttgagatacaccatgctgtttaatgcttcctcctctgcctgaaatgacctccaccccttcccatgcagagaacttctactcatccatcaagacccaggttaagagtcccctcttctgctaggcaccctcattgcccacttaaatccagcatcttcctcatctcttgtcccagtgaacagtaccccccgaccctgcactgtttggtctgtgcctgccctcactccatcctgggtagggtcactcctgtggccccagtggagttggatgggagcaggcctgtggccagtgtcctgttaagcccttagtggagcagctaaggtcagacccagatgcccagtggggctgggactggttccactacagctccaaccccaaaaaacatacataaagaaaactaagccagggcaacatagcaagaccctatctctaaaaaaaaatttttttttaattagtcaggcatggtggggtgcatctgtagtcccagctgctctaggaggctgaggcaggaggatcacttgagcccaggagtttgaggctgcagtggtctatgatcgtaccactgcactccagcctgggcaacaaagtgagacactgtctctataaataaataaaatagccggacgcagtggctcacgcctgtaatcccagcactttgggaggccaaggcaggcggatcacttgagctcaggcgttcaaggcctgcctgggcaacatatagagacaaccatctctaaaaaataattagctgagcttggtggtgcacacctatagtacccggaggaggcttatccaggaggatcgattgagccaggagttccaggaggcagtaagctatgattggccactgctctccagtctgggcaactgagctggagctaaaattaaaaaattaaaaacaaaataaataaaaagaaaaatactctctgcttttagcaaaccagcaccctccaacaaaagtgcaagaggaagtcttcaaggcatcaggctgtcttctgccggcctcggcctgggtcacccggctggaccccaccagctccttctgcacccaaagacagcccctctgggcagggaggggtcaggggcgggtcccagccgcaggacccccaaccacaggccaaggtttggaacaaaggcgccgccacaccccgccgcccgcccaaccgcgcccggcccgaaggagccccgcagtggggatggaggagggagccccgtgcccagtccgcccgcggggagctgcccgcagatcgacaagccccgtgccggcctgagtcccccatccgcccgccgggacggtccacgcccgcctttgttcccccaagaagcgcgtgggcgaccagcagcgcccggggctcgcggccctggtccaggggctcggggtgcggggtccagagccggaagctcgcggcccgggtcccggggctcgggggccggggctcggtactcacggcgtccacgcggcgggcatggccggcttccccggggcgatccacgcccgcctcccctgcgagcaccggcacggccccgggccgcgtcccccggccgccgccgcctcgtcccgggcgcccgcctcccgccggccccagctccgcggccgcggcccggagcccgccatgcccgccggccctggcctggcagccgccggctcctcccctctcggcgggggactgggcgggcaggtgaggatcccggcgcgcccctcccggccccgccccctgccgcgtcaccgtgcgcgggaggcacgtgagccccctgcgggcctcagtttccccacgctgcaaggaggttggtgggcgcttgggacaggaggcccacatctgttggtgcagcctggaatcaagaagccttcgatgcaaacgaggcctcccgctccactcccccaacacctgccagtccacacagcttggttggaaatccacggccggcgcgggagcctcggctctgaggccccgcccaggtcccatcccgccgggcccttgcaaccagctccctcgggaaagtggcctctgcaaaacggcacctgcatggagggcggcaacggggcaagggatcgggcacgtgccccgccctcaccttctccactttcctgcgggactccatgggcctccagccccggattctccaaggagccaggggtctggtccttggcacctcccacctgcttgcccaaacgcaggcacctcacccaggagagtcccctggggtggccaaaggccggcagaggcccttgctggcctcccaggcatcctgcctcctccatcttccacctgcaaacaagctgccaccaagatgggccagatgcaggtgtggctctaacagcctgggcctgaccctacctagctgtccatcctgggcacccaccctggtttcaaggccccacctcaggcccgctatctggacttcttcccactgcacccagccttcgaggctctgtcccatctctgtgcctctgttctcagtgcccttgtctggcctgcctcaaggatcccacctccttccagccgccctgccaggcccctctccattgcctcttggcaaccccctccacttcctctcctcaggcttcctctgcctccagccccctccacccagcacagaatcaacacgcacaccattcccatcactgctcagtgctaaacctctagggcctcctcatgccaacctggcccttcctgattcagccactcctgccctctaccttctgtgctcttacgccagccagaccctatggctccagttacctgaatcgagcaagcacccacttgcaggcctcagcccctgctgttgccacagcctaaagttgaaactgaactaacccagccatcaagagttggctcaaaagaacatggatccttcacaaacttccagaaaatagaagaggagggaactcattctatgagagcagcattatcccaataccaaaaccagacaaagacatcacaataaaactacaaaccaatatcccttatgggtatagacataaacatcctcaacaaaatactggccaactgaatcctgcaacata

SEQ ID NO: 317336 - DNA, 4001 bp, Homo sapiens
tttttatgttccactggtgtttcattctaagggtttccatttgtgcctattaaaattcatattgctcagttcagtccaatcttcagaatgtcaaaggtcttggggatcctggttttaccatcctaagtatttttgactcttccaactttatgtcactcacagttaagcatgctgtcaaagtcctttctcttacattgccttatttttatttttaacagagatgagacagtgttttgctatgttgcctaggctagtcttgaactcctgggctcaagcgatcctcctgcctcagcctcccaagtagctgcgattacaggtgtgaaccaccatgcctggctgctatttttctttaagtatctaatataaaagaatcttacgaactgtttaatgattatggtggtagatacataattgtacatgcctatcaaaactagtaagattatacacaaaaaagaatgaattttaacatatgtaaattgtacctggaaaaaaaatcagtcaatattctaaatacccagctatattcttctctcagattaggtctcactaacttattttgattgacaatttctgcaaaacgcattgctattctaagcaatgaaatttttatagatcttatatttttattgattgaggtcaatgcactctagggtttgatctcttgaaaaagcaccaggatttggcttaccagagcagtcaatccaatgagtacattactttaacaattcccacaaaataaaacatcaaaaaaggtggtagaatgtggaataaaaagaaattaatattagaaaaattataatctttcatagtactgggttacaaatattaaatatagcctgtcagtcctgcctatgagaagtcagacaatttttcacctataagtttgacaaggattttttaatgtactcttcagtgttggagaattctagtgaaatacactcagtgtggttgagagcttaagtgatacaaccttcctggccacttgaaatacctaacaaaaacataaaataatccatttgaatatatacatacatatataatctaaaagtctagaaagaaatgtaccaaaattttagcaatagccagccatctctggctgatggaaggcagtctgggttttgttttgttctgcttttttcatgctttgtatttttaaaatatcttttaaatttctacagtgagcctatattagttttatgattaggaaaacagcagtacacacttacaaaaatactggttaaagggaggggaggaaaataagtcacaaaaactaataaatgagagtaaaataatttttacgaaaatatatctgtcactgatgggaattcctaaaataaaacatgttttccaggtagtcaatagttttatgtgaaattttaattcagagaatgaataagatttcccttatgaagcttctctgaatgctacagaagattccaatagacagtaactctaaagaggacacttacattgcttccaaacaatacttttcaaataagaagctttatacagaattattagatactgtaaattcataccttgaagaacgatgttctggtttatttcgttcgttgcgatctgtagagaaagaagatggttacgtgtcaaaaggttctttaaaagctctggaaagaagtttttaaataccagctgccataccattagatttcacaaaggactgttcaaaggtagttgtgtcttcctaagtataaggctcttcatcacagttcgcctgacagaggcagaaaagacacaatgaaggacaggcataaaagcttacggtttgttaaaatcatctacttggaaaatgcatcattacatgcattatttcattttataagatctttcctgtgctaaatactttgctaacactagaagagatttagctaaggaaagaaagcaaggaaactgcaaagccacagattactcagctcaaaaaaatcattccatgaatcatggttggcagaagcttctaacagaatggggagggggaaaaatgagcagtcagctacaacatctgcaaatactaagaccaatacagcttcacccttaactatctaccacccagaacatttcagaagttggatttcaatgtttctccagtaattagatataatgtgctctctatataaaatttttgatcgtcacaactgggaagaagggaactctcatgggtagaaagcaggaatgttgctaaagatcctacaatgcatagagcggtccctttcaccaaaagaattatctcatccaaaatgtcagcagtgcagaggtcgagaaaccctgctatagggtaagaaataagagcacagatgcttgaacttttcaaaagtgactctctagactgctgtaacatgctattaatcaaccttgagactatcatatacaagagaaccataaaacccacaggttgtcttttttgaacctgagtaacaatttttcctccactatatgcttaagaattaaaaataaatgaagtaaaaggccgcagtgttatgcaaaaataaacaatatgaagcaatatacaaaccacaatatatcctaagcaatgacgttaagaaaaaatcctatggaatattatcaaaatacagttttctatagtatcttctgaattaatgctaacaagatagaatttaatggcaacgtaaagattaagacaggaatgcttttagtttttccttaattttattgctgttagaacagaataagaggattatgaaacatactctaaaacttctagaaagaaatatggaagaaaaggaataggatttacacagttaaacgtatgtaacaattctttctgaatgagttcataataaaaaagaaatgtttttcaaagccaaagagttagtactcatgaaaacactgttctctgaaagactaataagtaaaaagattcacaataaagcatgcctgcttagatataatgatttccaaacacatagtgttagcacatttctggttccaatttttctacactgtgacttagtattactgcagcttttaaaacttttctgttttaatttaacttggttttacccctcccttaaatgaaaatatcatgtttttcatttgatgagtattaagattttaaagtcatagtaacgcagggcacatttaaatcatttctctcaatcattctccagtttttagcctgctagcttcgctacaaaaatgaagtataatgtctcaaagtaaagccagaaactgaatacagattagctatcctcatataacaaagcaacaactcttacctgtggctaaagccgagctaaaactctgtccagaacatcatttcctgtggctgtgatcctagttacatagtttacttaggcatgtaatagcaaatttccccactaatcttcctagtggtacaacacacaagaggaagggagaaacagagtcacgatgcatgtaaacaagactcagtatccaagggcttccctccagggcctgttctgattggcagatgtgctatgaccagtctgcacagctggaatgtggccactcaggaagcaaatggctcacagctctccttcgttcttggttaaaacaggaaattctacagtcatttttatactttctgctctaagaaaatacaaatgtcttctcatagcacttttctattgaaccagtaattaaaattcaacaaaagacttgattatctgctgggggaaattttaaaattttccccccaaattcactattagtgttatctgtgttacattcctgtgtaaatatagatacgcagtacttataaaatgttactcctaagaattcacatagttgataatttgagggtaagggtaaattatccattactcacaatatttcccatccctcacctcttgaccatgaaaaacaaattgaaacacatgttcttggcttgatcttttccctcaaagtatacaaatatttggatttcacattttgccataaagccatcttttagcttaaatacatataaataatggggtgtgtgttgcgtatctgtgtgtcttata

SEQ ID NO: 317337 - DNA, 4001 bp, Homo sapiens
cagagcattaggtacactgcagaagcttaatatattcaaatgtttttccttccaccctttatggacaaaagccatgtatgtcttttagtttatacgctaaaatgttgtgtgtcagttacaatgttctgtgcatgatgaatatttaataatgtgtatgtttgttttcattttaaacacacctgtgctatgcagaatgtggctgtgaaatcacagagcctgtactattttgatgcatgttaaacatttatacagtgacagttaagcttttgaaaattctattaagtttatatgttcacaaattccacccaaataagtcaacagcagtaaaagaaatcttatcaatgacaagtagagcagcttagtttgacaaatcaaagataagctttaccatcacactctccaacggaacagttagaggaaagaaaacatactctctgccttctgggatatttaattgtactgatcttggcagctaacttgtatctgttgtattttatttacaaaacttttcactctcaagggaagatgttctgtgaagattaaaggaacaactttgcaacatgtggctgggtcctcattccgtacattttcgagtcctcccctggagctggcccctctcccagcactcccagctgaggcccatttcatctgaggagcccctctggggccactgcatgacttcccatctaagagaagcttcctctgcatccttctacatgttccataacctccctggatcctttcaatgtgaagtctgaacttctatctgccaagagtaaggggagccagccccacaacctattatagtttagctcctagccccagtctgcttacttctggctcatataatagtaatcgatgcatgtgtctccccatttctgactccattacccccatcccatattttcccttccctccctgtctccattccccacatagctcccatgtttcttgatctgtctgttcattcctctgtttctatacacacacatgcatgtgcacatacttgtatacacacacctcaataacttatgtaccagaaactaaaacagcaagtgccatttaaaataccctatcatgagtttagattcccctccactgctgatttttcactcacctagaaccatctctgaaccaacagattcttcagccaggttccccgatggggtgggcaaaacatcatcatcaaagctgatgagatcgatgtccaccaagggcttgctctgcagaactggaactggggggttggctgggggcccttctcccagtgacttgtatgctttggcttgtgatgcccctgcgagtcggggaggaacagtgacaggtttcagtggagctgaagggtaggtggggttttctgaggaaacagatttcttcagcagcaaaggccgcggggcaggagttggcactttcttcccactatcagagctctcagccaggggccctcttcccggaatctcaggattaacacttcgtataaggccagggtttggtttctttggcaattcaggtttggttactgggatgcttcccgcttcttgcaggggagggtatggggtgagtccttccttggaggtcaccttgagtctgttctcagtcccagagtcccactctccagaagctctgttagcagctggtttgggagctacagaaggtttccctgaggaaacagtaggctttggaggaagtgaacgtggagtaatttctggtttcttgggcagtcctgaggtttctatgtttgtctgaccctcaaacactttaattctggaaacaatactattttggctttgttctgtgttcataatgttcatcactgcctgactgtctgaggtgctagcgttgtccagcagagactggggccggcctggggatgactcctctcctacggctgctgggctgattttctgttgactttgctctttaatgtgagaatctctgggtattggtctgaggttgctttttgatcttggttttggcactggacatcttgtagcactggggttttctggacaattcggttcttcagaaatatcaaagacgattaaaggtgccacatttgttggaagattgccagacgagactgctgagaaaggctgaagaggcttgagaggtgcctgtagtgctgacgagaccaaaacaaaaccaaaacaaataaaaacaagccataacgttaacaatgtataaggaaaaaaatagaagatacacagatttaaaactacatacatggaatatcaagagattttggtttcttttaattagtaaaaagtgattcaaaaatggaaatgtttattctgtttcctgtaggagtgctcttcatataacacttttttttttttgagacagggtcttgctctgttgccctggctggtgtacagtggctctaacacggctcactgcagcctcaccctccagtgctcaagcgatcctctcacttcagcttcctgagtagctgggactacagacacataccaccacactcagcgaatttttccatttttttgcagagatgggatttcaccatgttgcccaggctggtctcaaactcctgtgctcaagcaatccacccgccttagtctcctaaagcgttgggattaaaggcataagccacagtgcaacactttaaaaaagcctaacaggacaaccacccttagcatcctatcaagtataagttgctaaatataagatccttctcagagggaataaagggaatcaatggtaatacccaccatgaattatacggataatgtttttgtgatataaactagggtaagctcaagagattggggctgcagtttgtaagaatgatctattataatcatcactgcacacccaaataaagcaagcacacagtgatcacactgactgggcagcagagctcaatgaattatgcacaaattgcaaattattttaaaggctggaagcctacggattacttccctagaactaggtcagaattagggaagacaaattacttgcattactttgaggcagatcgttgtctatttcttctgaaaagtcagtctgagttgcagaagtaatagtgtgccttggagtagcagcagcattattattatttgtagtattaacttgaacttggttgatttcttttataacttgttcataagatggtgggagctgaaaagtaaagaatgaagattttagacatctaagggcaatagctaaggtgttgacagtctcactgttcttatcttccaatttcatttaaaaaataaaatgcaaagagataatgtaatgtttattcacctcagcaggaaccagctcattaggcctccaagagcctgctgcagatgatgtaggaaatcccagtcctgggggtggggttcctggaaaccacgaggctggcctcagtggctcagctgccacaatggtgatctctgggcgcctagtggacagaagcctcagtgaggttttgcagaatggtaacaagctattgtctatctataaatgttcaaagattcatgaaaaccaccatcaaccaaaaaagttgtaagaactaacacagtcacagaaatgacctgtcaggcctgggctgtctctgacagtacacccagacaggcttcaagagagcaaatgacaatcatcctctatgactttggcctcaaaaagttagagttggaccctgggcacacttggctctgccttggttgataaggataagaactaagtaaggcctatacaatctcttcattccagggctatctagccttagggcaaacatacagtgtaaggtataaaagcccattagtcaaatggaattgtttttctgttattattattattatctgagacagagtctcactctgttgcccaggctggagtgcagtggtgacgcgatctcaatcttggctccctgcaacctccgcctctcaggttcaagcaattctgacacctcagcctcccgagcagctgggattacaggcatgtgccaccatacccagctaatttttgtatttttagtagagatggggtttcaccatatt

SEQ ID NO: 317338 - DNA, 4001 bp, Homo sapiens
tactgtaaattcataccttgaagaacgatgttctggtttatttcgttcgttgcgatctgtagagaaagaagatggttacgtgtcaaaaggttctttaaaagctctggaaagaagtttttaaataccagctgccataccattagatttcacaaaggactgttcaaaggtagttgtgtcttcctaagtataaggctcttcatcacagttcgcctgacagaggcagaaaagacacaatgaaggacaggcataaaagcttacggtttgttaaaatcatctacttggaaaatgcatcattacatgcattatttcattttataagatctttcctgtgctaaatactttgctaacactagaagagatttagctaaggaaagaaagcaaggaaactgcaaagccacagattactcagctcaaaaaaatcattccatgaatcatggttggcagaagcttctaacagaatggggagggggaaaaatgagcagtcagctacaacatctgcaaatactaagaccaatacagcttcacccttaactatctaccacccagaacatttcagaagttggatttcaatgtttctccagtaattagatataatgtgctctctatataaaatttttgatcgtcacaactgggaagaagggaactctcatgggtagaaagcaggaatgttgctaaagatcctacaatgcatagagcggtccctttcaccaaaagaattatctcatccaaaatgtcagcagtgcagaggtcgagaaaccctgctatagggtaagaaataagagcacagatgcttgaacttttcaaaagtgactctctagactgctgtaacatgctattaatcaaccttgagactatcatatacaagagaaccataaaacccacaggttgtcttttttgaacctgagtaacaatttttcctccactatatgcttaagaattaaaaataaatgaagtaaaaggccgcagtgttatgcaaaaataaacaatatgaagcaatatacaaaccacaatatatcctaagcaatgacgttaagaaaaaatcctatggaatattatcaaaatacagttttctatagtatcttctgaattaatgctaacaagatagaatttaatggcaacgtaaagattaagacaggaatgcttttagtttttccttaattttattgctgttagaacagaataagaggattatgaaacatactctaaaacttctagaaagaaatatggaagaaaaggaataggatttacacagttaaacgtatgtaacaattctttctgaatgagttcataataaaaaagaaatgtttttcaaagccaaagagttagtactcatgaaaacactgttctctgaaagactaataagtaaaaagattcacaataaagcatgcctgcttagatataatgatttccaaacacatagtgttagcacatttctggttccaatttttctacactgtgacttagtattactgcagcttttaaaacttttctgttttaatttaacttggttttacccctcccttaaatgaaaatatcatgtttttcatttgatgagtattaagattttaaagtcatagtaacgcagggcacatttaaatcatttctctcaatcattctccagtttttagcctgctagcttcgctacaaaaatgaagtataatgtctcaaagtaaagccagaaactgaatacagattagctatcctcatataacaaagcaacaactcttacctgtggctaaagccgagctaaaactctgtccagaacatcatttcctgtggctgtgatcctagttacatagtttacttaggcatgtaatagcaaatttccccactaatcttcctagtggtacaacacacaagaggaagggagaaacagagtcacgatgcatgtaaacaagactcagtatccaagggcttccctccagggcctgttctgattggcagatgtgctatgaccagtctgcacagctggaatgtggccactcaggaagcaaatggctcacagctctccttcgttcttggttaaaacaggaaattctacagtcatttttatactttctgctctaagaaaatacaaatgtcttctcatagcacttttctattgaaccagtaattaaaattcaacaaaagacttgattatctgctgggggaaattttaaaattttccccccaaattcactattagtgttatctgtgttacattcctgtgtaaatatagatacgcagtacttataaaatgttactcctaagaattcacatagttgataatttgagggtaagggtaaattatccattactcacaatatttcccatccctcacctcttgaccatgaaaaacaaattgaaacacatgttcttggcttgatcttttccctcaaagtatacaaatatttggatttcacattttgccataaagccatcttttagcttaaatacatataaataatggggtgtgtgttgcgtatctgtgtgtcttatatacttatactttttcatatacttacattttaaagtaattttcatgatagtcaagattattgtgcaattgtcaagaaatatattagtagaaataaattttttggcaaaataataagtggttattattttgttccaaaagccaagactgaacaaaacaaatcactgagggtggattcagaatctgctttcttgccaacaataacaaaacatttggatgaaagcccaagaatgagaacagatctatagcaaacatggaaatttaatcttggctatatatagtgctttaagtgtatggattttattttaaatcaaatactcttcagcacattctctgaattttttcttttctttttttttttcttttgagacaaggtttcgctctgtactccaggctggagtgcagtggtgcaatcacagctcactgcagccttgagctcctgagctcaagtgatcctcccatctcagcctcccaagtagttgaagtagttaggattacaggcacatgccaccacgcctagctaattaaatttttttttttttttttgtagagacagggtctccctattttgtccaggctggtctcaaacttcgggactcaagcgatcctcctgccttggcctcccaaagtgttgggattgcaggcatgagccactgtgctcagccttccaattttttagtttctaattttcaaattaattgggggagaatatttctaaaggttttctgaacttctgcatatttagaaatcatatgaataactttctagcccaaagtctcatcatttctatgaaaaaaagagttattaaaaataaaatgccttaactctaaaatttgccaaatgctacacatttgctgtggatgatatacttattccaggggcctgcccagcagagcatgatggtttaggtcactcaaagaccagcagtatatactcagtgtgagggtaaccatggctgggtaaccatgtaatggttttatagatatgtatcacacacacacatacacacacacaccccgctcttccattccctgtccctctcatccatgcctcatggttaataaggctaactgaggaatagaaaagtactctgtaagtagaacaaagacagaaaacaaggcagaggctgggtgcagtggttcacacctgtaatcccagtactttgggaggccgaggtgggtggatcacctgaggtcaggagtttgggaccagcctggccaacatggcaaaaccgcatctctaccaaaagtacaaaaaaattagctggacgtggtggtgcacgcctgtaatcccagctactctgcgggctgaggtgggaggatcacttgagctcgggagatgaagggtgcagtgagccaaaatcacgccactgcattccagcctgggtgacggagtgaaactctgtctcaaaaacaaaaacaaaaacaaaaaacaaggcagagctggcacaaagactattggttgtgtgtgtataaatgctgtgggggagatgtgagggatgcaatgggggaacccatggtatgtc

SEQ ID NO: 317339 - DNA, 4001 bp, Homo sapiens
cagcaaacatcgcttgcaaaacgtatgctggcaaggcaagaccttcgcagaagcatcaaggcgctctagacacaccggacactccaaaagatccaacaaggctgattcatccatctttatctactttactgagaaaaaatcttcagaaatgttcatagttgtgtgcatcccttaaaatgactcatgtaacatccatttcagactttgctctagagtcatggggaaaagggggaaaagagaacatgagtgttgttatctagggaaaaagttcaaaggagccaagaatcaaaaagtacccaaaagtacactattccctgtctgaatagtgtagctttgctttggaatgtgggttcctaaactccaaagtcaacaactgaaaacaaaacaggctttctaaacaacgcaaaattaacccctaaagatatctagggattcactgggcaaacacaaggcacagagtattacataattcccgcagaaggatttatgaagtgcaataaggaacataatttcttaagctctgaaagtggtatcagctgccttaataaagtcttcaactcataggagaagctgacagaggccattgaaagtttcctctacctgaaatttacttttatatccaactaaattcccttttttaagccactttagcgtttaagaaaccatgcctcatgtaatcgctcgtggtaaatgatcccaatattaaatacatatgtttcttcgctgttattaaaaatagaactgtttaattttgcccaaccaaaaagagctgaaggttgacaattctaaaagacacagatttgcttgaaagcagctaaaacagaaaagcgcccttcagggcagtagttgataaactctgaaacacatttctgaacggcctgtcctaatcccattcagaaaagctggcaaaattatcaccaaaagaattcgacaatggaaggttggactggaaactgtgggcatatgaaaatgaggccattcaggaaaaagcaagccacttactgcgccgctctccccccaccgccaaaataaatgtaaaagtgaatgcccaggagaacgggagtaaaaagatttggctgggagcattaacagctgttcttgacaaagccggagcgggggagccccagggctgcacccccgctcccacggcgccaagcacaggtactcccaagcccgcagggaggcgcggcggccgctcgccgcagacacaccccggggccaggtgtcggcggcacccggcaggagccggtcgcggcctggggctgcggcccggccggtcccggcgtggggatctcaccctacagcctccctcatctccgcctccctttagctcaggccggggacacaaatccctctacacgactgcgggaagttttcaaggacttaaaaataaatgcgcaggcttaagttgcgaaactcagccccacagagtgccacggggaagcagctttctagcccagccaagataaggcgacagtccccagagagaccgcgccatccgggaagcagggggtgctgggctgcgcccggggagaccgcggcacggagccctggcagcttcctgcccggagaaggcagaggccgcgggctgctccgcttccgcaggtcctgattcccggcccacggggacccgagggcgaggggagagagagaccgacccagggcggggatgggggaatgtcgagaccaccgccttctccgcggctaggggtccgccgacgctgggtccccgtcgaccccgcgccggccgcgcgccctacctcgcgcctcggctcctcctctttgttcgcggccccgcagcggctgcggcggctgatgcagatgcggccccaccgcgctcgccgctcgcagtgtctctgacgccgcggcggcaccgggagactcctctctgctgcccccctcacgcgcgcacacacaccacgccgccgccgccgcctcccactttcccagccaaggagggcggaggaagaggaggaggaggccgggacgcagccggcgcccggggcgcaagggggcggccccgcgccacagcgccttccccgggagcgggcgcggcacctctcggagccacccgccgccgcgccggcctcccgcgctgaggtgacctgcgcccagtaccccgccggagcccgggggcgggattggggcggcggcctgagggggcgctgcaagagcctagaggatggggagcggggcccccaggggactacgaggggaaggctcggggacggacgccttctccctgaggagaacgcgcctgaaaaatggagccaccggacgggaaggcggcgggagtggaggctgggggaagcaggaagaagccccgggacagggtcccgccgcctcctcctccccccggcggggctgggagccctggacggacccttcctccccaggctgggcgagtcgcggcgcgggaggggctgggtccgcggaggcggcgggagcagccctggcgggaaccgatcccgctgcgctttgcgtctggttgcccaccccggacacttacttggtagagtcggagcgaagtgttgccccttagggccgagagcggcgtggtgaatcgatggggacagtgccgcggccacctgtccgcacccagccatcagtcaccccaggacccaaaccggagcaagcctggaggaccgctgaccccaaagcccaagactaggaaaacggtagtacggacttccaacccaggctcgggggctctgttatccctgccctaagtggggagaattgagtctgacctcaggtgggctggcaccgcaaagcacgctgagaggcgcctcttttatctgagcctgggtggctgccatcatcgcagtaatctttgttttggttgccccaagcacacacctgtaaaccgaagtggagttttgaaaaacatcttgtccataggttttgaggtttttcagtctcgatttagtggagaagcaagttaaaattttgtcactgatctaaagttgacattactatatttgcatttaccatcaatttacaaaaagttatcccaaatacccctcctcaaaggtgggcagaaactaggtggttataagaagaaagggttacaacagatgatgcaagaaatctctgcccagccaccaactaggtttatgatttgacgaggagtctcagtttatcctctagtctccagctagggccacagctaaaccattcaagacataaggatcacataagcctgaaaaaattatgacagctaacaatgatcactcactgtaaatcaggcactgtgctgaacatttttcatgcatcagttcaattctctcagcaaccctctatgtcatcttttctcagccttgttctaaatagattcatatgctgagagtcataatgtatgaaaaccaaaaataatagcccacttccccttccattagaagtgagcaaatacatgggcatttgagctgagaaagacgacggaaggaatgaatggaatggagaatttctagtccagtttgcaaactgaaagttactacttagttctgcatgtggaactgggcagatagatgaagatgaggctgaccagaagattacagtcaataaacagatagggattatttgcagttattaaaactgaagctcaaataggttaactttcccctggtcacacagtaagtaatgttgaaccaagactcagtcccagctctctggattccaagtccagttctctttgcaccattccaaggccctgtcttttgcacaggaccgtcatatccccaccctaggcaaagcaaagcagtgtgtctcttcccaagggaaagaagaaactgttaatcatgtaattactcgaaagcaagggacagtttttattgtgttcttattttggtttcctatgtatttttagagagcagcacacaaggtcatagatagaatggtgcagctcttgaaactcctggcaaaagaaaatcaatagtcacacccattttcttttcttttctttttttttttttttttgagacggagtttcactcttattgccc

SEQ ID NO: 317340 - DNA, 4001 bp, Homo sapiens
ccatgcctcaatttactgagccagaaaatgagaatgagcacgcacaccgcacaagtgggtcgagtgggttaaagggacagtgctcctggtccacagtcagagtttggtgaatgtgggttggaagaagaagggagagggccgcggccagccctgaatgggtttgggaagctttggccaagctttcgccaggctcttacggaacaaatacttctagggccattgagacctcacctatgccaccaagcacctccggagggttggcttgtcacctcgcatcctggggtgacactgtcctttcaaaattcatgcccccagaaacctcagaatggggccttatttggaaatggtctgcgcagatgaagcgaccttcccttgggatgagggtgttccagatgaggatggccctaaatccagtgcgtggtgtccttgtaagtaaaagagaggacacggagacacacagaggagccgggcaggaggccatgtgaccaccagggcggagagtggactgatgtaatcacagccaaggagcgccctgagccacaggcagcgggaagaggcagggaggagccgcccagtagccttctgagggacgccttgagttcggaattccgacctccagagccgcgagagaacacgaccgagagggctgtgtcctgcgctctggcagcaggggaaaccggcgcacccgtgcgctgctgggccctgccttgctcttctgtgttgtgcggccatcgtcacccgtgttgctggaagagtgagtgacgtctccatgcaaaaaacgctggcccagcgccccacacgggacacagttgtcatcactgtcaacaacagtgttgacagtcacataattatggccatccagggtgctcacagcatcctcggctcacctggaggagggaggcacagctgtgcccctttcacggatgagccatcagctgcggtgactctgcctgcccaaggtcacacagccaagcagcacaggtggggttgaacccaggtggtcagagcccagcccccacatacccatcctaaacccagacctgactcgggcccagccttgcctccagccacaagctcagccgcagccccgctgcctggcgctgggaggccacaccctgagtggccggcccacatgcaggctgcccctggccctggcactggccgacaccgctaacaccccccagcgtcactttgctattcatctcatctgagcctcgtcaacggcaaaaggttggaaactcccgcttcacagacagggcagggctcccagggctcctggggatcacgcacaggcccagagggggtctcagtggtgtacacacacaggagcacacgccccggcacacctgcagttgaaggctgggcccagaccctccctggaattttcaggctgaagcccctggtccagttgctggtccatttggttgttggaaaagaggcccaggtggcggcatcagagtggccagttatagccactgcggtgccgggtgaggctgaggcgctgggctcgccctggtaggtctggtagtgtggcccaagctaaccgggcgctggggtcacacctgagatccgctggacttggaatccagcgacaggctggctctgctcccagacccccagggccgctcatgccaagggccagcacggggtcaggccaggtcccagaagcaagggtgcttggtcaaagctgaaatcattgccctcaatcactgcggattggcactgccagcacctgtgagctctgagtggggtctgctgagggtgccgacgacctccccgaggcccccagctcgcagtttcgctccacccccatcccaaacaggtcagaaaagtcctcaagaaagtgtaaagatccaaccatggcaagactggcagacagcagcctgctcggccagtccacgccccgcctgccccggagccccccatacctgcggcgtgttcctcagaggcagctcccaggcccacagggccgtagcacgcaggaaccaggtggccgctcctggcccagcgctggctggccccacggggctgtctccagctggacggagcaggcaggggccgcccacagccaggctgactgcacagcggcctccgccccctgcttcctgccctacttcctccctgcgcctgagggccggtgacggagaggcaggcccagggcggctgcacagacaccgcagccggttgatcattagctctttcctggacgaggtccaggccctgtcctgcctgcccgctgcccagcccccaggctctgtagtagaggctaggggcacccagtcccccgccaggctgggattggggaagtccaccagccaccggctgcctcagccctgccagcctcagctctgatctctgttcctcttccatttactgcacacacacacacacgcatgcctgcacacatacatgcatgcacacacacacgcatgtgcatgcagacacacatacatatgcatgggcacacagagactcacaagcacaagtgtgtgcacacatggacaggcacacgtatgcacacaaacgctcacgtgcaatttcttccgtctctgcccgggtgccctccgggccactggctccatcaatgggaacatttaggggaagagatgggctcccctcctcctcaccgcaagctctccttgctagcctggcctgtcccaacgggtctacctctttaccctcccaccgtctccaggcctgagccaggtttgagagcagaaaccttcccagccaggcagacccaaggccaaagcacgtaatctcgcccctgcctgctgaggaagcctggcctgggctcacgtcagctgggacaagaggcagaactgaactcaaattgccctgttggtcccgcctgtctgcctgctctgatgcccttgccaacacaggagtgtgagcacccacgtggtgggtgtgggctgcgggctccggcccagctctaggaagtgggaatgggagggatccctccagcctgtgctgtgataggtcggagctttacacacacctggtttgagaaaaccaagaataatccctaagtcaaatagttatgtatccatctcacagacaggaaaactaaggctcagggaggtaatgtgacatgcccaaggccagtgaccaacaagaagataagactggaaccaggtctgactggttctgaaggctttagggctgggcttttcaaccaaggcactaccgacatttggggccgcatccttctttgttgcagggcggggggctgtcctgtgcactggagggttttagctggtccctggcctccacccactggatgccagtagccccctcctctaatcatagcagccaaacatagctcagatattgatcccctgggggtgaagtcaccccaggctgagaactcccagcccaggtgagctactcaggtcaaagcccctccagcccacacctgcgtccttcatcctcgccctcccgtcctgttcacctttctctaatcacaggctctgcccaggggctgacgcttacctcaagtccctgcatcctgcacggtgagccctcaagtcacaccctccctccgccccactgaggccagggcccgggatcgggggtgcagctgcagatgccctaggcatgcccctcgctgccctgaaaagaactcgaggatggcccaggtgaggcccaagccccttaggggcccagcctccaggctccccggcccggcctggccaggccccaccttccatgccatcaacatgctcagtgagcacacggtgggttggagggttcagaggcaccaaaggacactttgagagaatccccagtggcagcaatctgaaagtctgacccacaggcagaggggccgcagctcccagaccagctcttcttccctgcggggacacggctccccagccccggctgcgtctgaggaggaagatggtgttctctctggcctcgtcgaggggcagtcactctatcagtttcatggggctgccacaactgtgtgccacaaactggggtctccagacagcaga

SEQ ID NO: 317341 - DNA, 4001 bp, Homo sapiens
taactaccatttactgagccctgcgctccagcattcatacactctcacgtcaccaacaacttaactcctttgagagcaatatgcccactttagaactgagaagaggtatccagagcagttaagtaacttgcccaagttacaccgccggcaagtgacagagccaaggtccatcagggtttgcctgatcccagactcagtgagtgtggagactgcctctcccttctgctgtcctctggcatccgagccgagtagggagcgcagaggaagcccgtgctgcagactgggcaattgcacttactcccagagggcagctgggtcccccagggtgagcgagtgaagccgtggggaagagtctatatttttctaacaggccaggagggcctagatttccctactttccgctgagcatcttttctccagaactacttccagaatcctctagattggaaatgttgacccccaacattcaccctctagtggagcactaatggagggcagactcccctgtcctctgggttatcagtttgcggggaggggccgttggggaacccttaatgatctctccagcctctcttccctttcccggcgaccttctcttgcgggctccagacctcggctctctggagtcctggggtgtcacccgctctcagctccgcccgcttctccggtttccctggccataaaaccctcgcctcaagctctaaagcgtttccctgatgttccgattcaggtggaaaactttttttcaaggtgtaaattttctctgctggggtcgtgatttattccgctctgaagtcagcggaaatttgacccgtgttttccgaagtgagaatagggggcggggaagccccttcgacccttgtttctaaatctccacctcgaagacctgggcatttctgaaaggcgtgacaatagggggtgggccggagagggtaattcgatgcagagaattgaaaggaagtctgcagaacggggccgtggcttagaaacgctatcattaagacagaaaaaaaaagtgactggggtttcttagccctgaagggctgcaaatgagcgcgcgacaagagtcgcgattccctgcattcggcacttcccgaagctcccgaagtgacaagggcgagcaatgggacaccctcggcccctccaccaaaacccaagtctaccctggctttacccgcactacccttctcccgggagctccagctgtcttccccccggctaccaggcacaagccccgcgctcctcactgtccctggcaaactttccctgcgggccgacccgcagagaccgcaagtggcgggaagcgggactgcaaatgaatagaggaccatgatctgaaacgcgaccacccactcatcccttgattcccccacccggccgcgtccccctggcgcacagacccaggaaggcgcatagacctgcctgggtctgtgcatcctcccgcgcacacatgcagccgccgccgttaggcgggcggggatatgtccccgagggccccgcacttacgcgcagtgatgcctgggtgctccagttcgcggcggtcgttggtgcagccgccctgctccagcctggcgtcggccgcggcgcaacagtagcggagcgcgcaggagccgcagcagatggtagcgtccagcgtgtcgaagtcctctgggcactggaagccctcgtggtagttgccctgcacgtccacccagccgtggcagtactctccggactgctgggcgcccgccgggccccagcgcagccagccaaggagaaggcaaagcgccagcagtgccctcatcgccactgggctccctgggcggccgggagcaggacgcagctggaaagcgaagggctgagcccgggctcagggcgcacagcgattccgcctccccagggacacgtcgcaagctgctggccccggcggccgaagccagtcctgcgtgggatagcaggggccggggaggcgacaggggctgcactacgagttccgcaggccgggagtcagcatggtgcgcggggcgagttggcgagggcctgcgggaggcgccggcagaggcagttgctggggctgtcgctgccgcccttcgcccggctcatagcgctccccgcgcgaggggcgcgccaaccccccggccacctccctccccactcctcaagggagccatagcgcccggggctgccaactccagcgccgcacagagtcccaacctgtggcgatcgccgggtcccgagaggagccggaggaaaagaatttgttccccacgtgcgagtaccccagacaggcggccgctcagccccagcccctatctgtcacaggagcaggagtcagctccgccgcggccaagtacaaacggccgcggggttgctgacagctctgcccgcaaggcgtcttttaaaaaggaagagggaggaggagacaatgagggttaagaaagagtccgccctcccggatcgcgcctctggagctaatcacagcgggtgcggcgcgggccgagggtcctctgcgctttctggttcgcgctccatcctccgcctccccccggccacccccgcccatgccgctcccccaggacttgactctcaacctgaagatatcagaccctcccctcccccgccgcacaccccaactctctcacagcccggaaatctctgcagagtgacgttgagggctgccgaattcccgcgtttatccacgcacgtgggcgcgcgagtggagacgctggatttacttttcaatggatataatgcatgaatgcggtgcagtcattgaagtttgtcgaatcatctgtgccctgttgcacagactcagactcgttcctgggataccgcttctaaaggttcaggaccgagaacatggtttttaggtgtcgccaacatgtgctgagctttccacctacgtttccactttttctgggaggaacggcacattttcacaagcacacacacacacacactcgcactttttccgccggctgaaggattgccggtcacctctgccagccaaggccagctcgcaaaacctcaaagagcacgacttctccgttcacgcccgcaaaggaaataaaggagcaaaattaatgataattgagcagaactgaacttctgttcagggaaagaaacacatttatttaaatgatgtgtcccctgtgggctattttcaggggcactgctccgttagcggcctaagtgccttatgaaactggtgttatgtgaaacctgggccaaacgcaagcatttattttgactgcatcctgaacttccaatcatcgtctattggtatgtgtgaatatgttcggtgtatctcggcttatttgtcaaacaagctgcatacccgtgtccctgagttagatgtcggcaagttgagtgaaacaaaaggaacaaagtgttctcagctccagcgacacaaggtgcgcggtcaaacgcatttatcacgttcgcagcttcctgatgaaccgagtcgattccggagaaacttttttaaaaatctcctattaaaacgatttcttttttttttttttttatctaagttaaagtatattccaattaaataattacttctgatttctaattttaggtattgggattagcatttagttatgtggctgctgaaaatacatgtccatttcacacgttaagtgggaccgtgtaaatatttaactttattgctctcttagagttacatatttcttaggacaatacgaagctattaagtaaaaacaaattaagttggagctttcaataacaaacaatgaaacagttttttagttaaatagtttaagcatatgggaaattgttttgcagaaatttcttagatattgggttttttatttacaaaaaaaaggtcttgccagacttaatcttttttttaactctagttgttttttaggagtgttgtttcaattgtatatatatcctgagcaattacaggaaaatgtcacttagaaacacagcaaaaatgagatatagtgattataatcagatgataaaaattatgacatgtttactgctaataactt

SEQ ID NO: 317342 - DNA, 4001 bp, Homo sapiens
atgaaaagtaacctgaaccaataacagagctcaaatgcaatccatattaccttcttcccaccctcaaattaaaaattttttctcccttaattacaaatgtttcttgatgaatgcacatgtgtgaaaagccattataatctattgtatcagactattaaatactctaaaaatttaaaagcaatattataacaagtaatgttaatctgtagtttaagagaaaaatagaaatattaaccccagtacataaatatttcattggtatgactacccacaccaaaagataaatgaagaattgaggtatgctgcaggatgactaaggtttaaaaagggattcaaatatacagataaataggagaggcagaaatgttttgatcttgagttatgctgaaagctgatttaattctcctttctgagtgtggggaaaaaaagcaacacatggtatttatgcaatctattatccagaattataagcaaacttaaaatatttttagatgctattttcagttgaagagagaaaaagcagatatttttgaatgcacaaatatataccatgccaccatcttaaccatgttattaatctttaatctgatttataactgaaaagctcatgtggtaactgattgtatgcgatttcattcacaaaaagagaagattatccatcaaacaggcatatttttcttcggatttcatagaataaatgagctagacacatttttctttcaaatcccaggctatccaaaatatttctagataatcagaaaggcatgaaacagcaaattaagttatattaaggcagttctcattattttgcatttttgacaaatctgacaagttgaaaaaaacaatttgaataaaggcaatattggaaaaagaaacataccttagagatgattaatggttctccgtgctccaggccaccctttagagtaaaaccccagggagctcctccctccaggaatgcctccagataaatgtaccttcccttggtggccgtgttagagtttaatgtggcactaggcttgtggaagtcttcagtggtcctcatcatgccaaacacatgatccctcaagttaaatttaaaatgcctgaagcaaactcaggcaagcagtgcttctacagcacaagttgtcccatccttcaggacacacaatggccaaaagagaggtttggagaagcaaattcttccatacgtaaaatgttcttccaagctgaactccaagatgctgaaccagaaggaattttcacttcaacatttctgaatgtaaatcctcctccaggaattctgggttctcactgaagcccccaagtggtatacatctctactccgttcgtcaaaacttccttcagtggcgctctgaagattgcttttctgagcttttatttcacacatacacacactaaaaccatttctgcctattttacagagaaaattaaaagcatcttacaatatagtaagaaaatcacaaatactcaaaggaatacctcatttttgattgattatcaaccctttcttcctctcggagtgaaatttaccattacaatagcctcctccctccccagaagtagcttaaaaagaaagaaagcacttactatgcttcggctcacttcagaattttctaacttgtcccgaagagacagagaagctgtgctaaaactttttacttctttttttcaacaatcagttcatagtttgtttcttaggagagaaaaaaacttttgcaggatgtagagaaaatgaaaaagcacggtaaattaatcctcaatggaaaaaatatgaaggaggcagctcagttcttttctttggtattttcagtgatgatcagccactgctgcggccgccacagccacttgcctcctcttgagagaaagagtaaggaagttagaggaacatggattaaggcaaagtgaggcattgcaacctttctgcacagtaagcactgccatgcagaattcagctcaccacaaagacctgacaattcaaacagtcttacagttaataacacgtaggaagttaaaaatactatacagatggctaattgccaagggatagaaaatagttcctagaatagccccgcctcgtaccaattaaaggagaatttcagggagtgagacataggcatttgtgtttttaaaaaccctccaggcaattctgctatgcagccaagtttgagaagcaatgcctaagtgatttgggtaaacgtttaagtacatgtcaaggtggtggcacaagggctttttttttttcgttagaagaaaatactaccagtgtaatatatgaaatgggactttccaatcaaagttctgcttgtttgactcaataaaaacaggaggtgggtttttttttctaggttttcattgttatctactccaagattgttatccactctttaaatgaaaagaaatctacaatgccttgtgggtaagtactaggtactcgggaaagaatgttgttctgatttcatgttaccagtgtcattttgtaataatgttatatacaaatttaacattcatgctttgtattaaaaatttgaacagtagaagataaccatatctaacccagaagcctcagctatttagttattggaacagattagaattacttccaggtaatatatgtactaaaacttttttctgtttaaaagtatgggataatgagaattaagttgaaaactgaagttaaaaactactgtggggcttgataacaattattttggtgtttgtacttataattaatgaaaggctgatatggaaaggcaggtatatgatatcaaactacacgatatttaatttacaacactggacaggtattgtttgattttcaatggtaacttcacttgaagggctcaaagacaaaaaaaaaaaaaaaaaagtaaaaccttatgtaatggtagtatgtgaatggaaacataaggaaacctaaggtgtaccaaatgaaagtatgtggtaaaaattggctgattcttaagggtaatttacgcaatttctattgtggttttcttttacagcttaatttgtaagttagaataaatggagaaacattagcttttctttcatttcaaagaacatatgtattttaaataaaagtcctaggtaaatgaacagctttctttctgaaaaaattaatttatgaggctcttattatgttactcctaatacattttgtaaaaactgggattttacagaatccacatttaatattaaaagtaacatagctatacaaaatttcagttaggaggcataagctcaagagatctattgtacagcatgatgaccatagttataacaatgtattgtatatttggaaattgctaagattagattttaagtgctctcaccacaaaaaaaattagtatgtgaggtaataggttaattccttgatttagccattttacaatgcatacttatatcaaaacatcatgtggtacaccataagtatatataatttttagttgtcaatttaaaaaataataaacaaaaaaagtaatgaagctaaaggcaaaggaaataaggaaaagataatatgaacccagtgcttgcagactgatgaaatctccattttagattatcaccaaaaatattgaagaaacaaacatagaaccaaaattgatatgtaatctgaaaaaaaaatgtaaaacttcattttgtggaccttcactatagcagttgatagaccaggtttggaagaacttttttcctccatcttctgttgatcagattcaaagaatgttaaagctgcaagagacaatcctcccacacccttgattttagaggtaaggacacagaggccaccagaaggttaaatgatctgaccagagtaatcctgcaagcaacacaggcaggcatgaaatttaaatcttcagacgtttaggaatgaaatcctagcttaagtcaggtgttctgcatagtttacggtgaaaagacaactttcttttggcatagcactgctaattcgtaagaagaacttctgttaggatatgtgatttggatgcaaactcttaatt

SEQ ID NO: 317343 - DNA, 4001 bp, Homo sapiens
tactgagcactgtcagtactctttgttctatcactctttgggtaattcactgtacactttctagtttatttaactgcacaaaacttagttctcaacaagactataactgccttatgaacagggatcaacacttaagaatcaccagaatctcctacaacatcatataagaactgtttcttgatttaagtaactaggcttaagagtaacaaatagcagcttgttttagacagtttactatgtgccagatccagcgctaaatgcatacataattatcttactaaattttcataactctatagaggtaagtgctattattttctccatcaaatacaagaagaaagtgagcctcagagtaacttgctcaaggtcatactgctagtaagtggcaaaaccaggggcgaacccaggaaagctcttaactacctcagaacactgcaaagttccagccctgcaataccagagtctatgaatgatttcgatttcactgttagaagttttaatttcaatagagcagagacattttagctaaaagttaaaactttaagaaaaatgaattaagacaaataattgcccacacacatctttataataaaacgagaggaaaagcctcccatgtcctatttatgaaagtgatattaaggtgggggggccacaatttcatcaagaagtggcttatgacaatatagctttggtttaaatttttaaataggactctttttctctgcccctagaaggacgtggaaatgaaagatggatgtgataactgtcaattcagagctctgcaaaacgccagactcaattcttgttttagaaaataagagccagggctcgttccacccttgactcttcacacagagtaacaaaaaaaaaaaaaaaaaaaaaaaagcagcaccatcctctgccctctcttcacacaaagcaaggtttaccccactacccaaaggggagtgctgattcatacggtctccccatccccgccagaaatgggtcccaaacaccaaccgctgcatagacgtagacgactctggtctgcccctgacccccacacctggtgatacctcatcaagcagacccctctcctacatccagaatgcccagggccaccatccgaaagccagtatcttacacaaagcaggatccctgcctacaaagcagtttcccacctccgactcctccccaggcgaacagcccttctcaagctgccccaacccacagaccccaatagggtccagcactcagaaggtccacaatccaaaggacaacgagctacaaccctgttacttgcgcacgcctcgaacccccaactccagctgacgttccctctgccaaagcaagaaaaccacaagtcgccacaggagagcggacccggctacacaaagcgaggcgcccgaccagagggaccctcagaggacgctctccgcccccgggcccgtccccgcccagctcctgcccggcgcctcgcgctcaccagctctcctcctcctcctcccagcctgacaggcgctccagctcgtcgggccgcagcggctccacctcgtccagcaagccgccctcgcccgccgctagcaaggaggtggcgtcccgcagctcttcgctactcgtccgcctcgggcccgacccgggcccgccgcccgacttggcgctgaggcccaaggggaagccccgaggagacgccgcgccggaggagggaatggacgcgccggcccgaaccgggctgccgggcccaagggagccggcgccctgcacggcccccgagcggctcctcagctgttcgttctgcttctccagcttcttcaccagctcctgcagcttccgcacctcctggtccgcgttcacgttggagttaacgtcctccatcccggccccgccgccgccgccgcctccgccgcccgctcgctctcgcagcgacagggaaagagacggaggaaagaggcgtcgccgccgctcactctagccgaggcgccggcatatagcaggaccaggccccaccgccagggtccccccacctcgggttccaaagcgccgctggccccagccgaactgcctcatctgcgccggctccgggattgggggaggcggcgccaatatccggcccctgccgccatcttccctccgtccctccgccccccgcgggccggcccagtcggtgacctcagagcgtcgggggtggacgcggccgccggcgggcgctgagaggacccggcgccagctcgcggcggggcggggccacggacggggcctatggggcggggccggtgcttgaggggcggggattaggccggaaggggcgtgtcggcggatgtgggacgcggccgggctggctagggagggtccctgcagaacgggaggccagcagaaggctcgcggcgggcggggctgaggtggctaacaaggtcctcgaacagcctcgcctgttggtctgggcgtgtgggcgtgttctccaccccttacagggagtgtgggacccgcgggccagtctcgcccttgttccgggccggatctcgagtgggcgctcagcccggcggtggagagacagtttactttgttcagcaaatatttaatcgatgccgacttttaattggagattgtctcggctggcaggagcctctagactgcctgtgtcctgtttcttcccctgaaaataagaaaccccagtttcagacagttaagagaggtctaaggtcaaaataatcataatttcttgagtgcttcctactggccagacagtgtgctaagcacttttaaaggcattatctcatcggttaaaacatagttttcccgacttaaagtttacagcacactggggcggaagcgggggatagtaaaccgcttctctactccctttctccgtttattgactcacactctgttctttggatcacttccttcggaaaaagttcctcgtagtgtgtcttgacttttttaaaagttgtatgttaaaagtagttaaacacgctgacagatactgaagaatgaagaaaattgtaagaatgtgaagtctgcctttagaatgcggcaggaaacctaaacaaaacttaaatgctttgttttgatcacattatcacagtcgttggtcttcagaggtcaattgtgaacggctttggcttgtgtttgcagcttttcttcagttgccgcctccacccttagtttaataacaatgatccagtcctgttacacctgagtgtggactcatgccatgactgacttgcttctaccctttagcttttctagtgccatattctccgcctgccatatctgattcttttcttaaatcccatactctctcattcaggaaacctcttcccaacaattccacaaagatctaattattctgcatattctagcactacgtgatcaatagttctcaataggtgtttgcacttttttttaaattgcttttttctctaagaattatttttcgtttgtttttgtctgtttacttgatttaaggacacttcatttttgcttcccatgtctagtacactgacacagtggacactcaatacttggtttgttgaaagttaagtagactataagttctacttaaaaccacgtagctatttattcgtagcaaaaaacgtatttgtgttaaaagtttgctggctaactataagtcgagtatttttctagctatacagacctagtcaaaggatgtgattgtttgctaacataattgtcaagtaatatatattatctgtgtaatgctcatctaaatatcattgctctttctgaccagtctgaacttgttgccggagggttaaaaatcatgactacttcacgtgtagcagttttcacttgcattcaatgctttgtaaaatagattccaactagtcagtttctataaggcgaacccttcaaatatactccttgaaaagaacagttcaccggacattatgaagttagcactaatgtttgtggggcaggaaaagctgttgtagtgtggaacaatgaattaagaatcagaaagcctgatgtcgggttctagctgtagcataaatgca

SEQ ID NO: 317344 - DNA, 4001 bp, Homo sapiens
cttctcaagcctcacaacttcccatgcctagctgctccagcccatcttctctatcttagcaaatggccccaatcaacagcgttcagacctaaaggcttgagtcattcttgatgcctctttcctgtgtaaaccaaaaagtgtctgagacaggtctcaattgctttaggaatttagctaatgttaaggacatacctagaagaacacgaaattacagaaagagtctgtggtctgtgcctttctccagagatgactgtcagggcttcaatatttaaaagagaaaagtaggttgaaggagaaagatctacatgttccaagagaaaaggagcaggtaggggaatagtcaattatgtattcctagtgtgctcagtaagtcgccacttaaagtgaacagagttcacccgtggagatatttaatcttgtatctgtaggtatctgcttagaaaaaaaaaaagaaacacaaaggtggccgggcgcggtggctcacacctgtaatcccagcactttgggtggccaaggtgggtggatcacttgaggtcaggagttcgacaccagtctggtcaacatggtgaaaccctgtctctactacaaatacaaaaagttagccgggcgcggtggcatgcgcctgtaatcctagctgctggggaggctgaggcaggagaatcacttgaacccgggagggggaggctgcagtgagccaagatcgcgtcaccgcactccagcctgtgagacagagtgagaccctgtctttaaaaaaaaaaaaaaaaaaaaaaaagtaacgcaaaggtagtttcttgcatgattccgcgctcagcataattttttccttttggcacagtgaagttgggtccgatttttttttttcctttcacgcctcccatccccaacccatcagcaagtctcacaggtcctgccttcagaagcctatcccgaaccacgcatttccctccaccttcactgctccatctcggccaagtcaccacgcctttcagggaactcaggagcaacaagcccccagtgcgggacgagccaccccaaagcccctcgagaagttttctctaaccacagccccgaaaagccccgccactacgaccactggcacccctgcttatttcctccagaccctcctcggccgtcccaccccatcaagccctcctttcgctcgcatctccaccctccctgcacactgcctaacccagaaaatggccaagcaggtaagccctgtcaactcacttctcctcgggactcgggtgtccctgacttccacgtgttcacgagaagctcgtcagagaccctgacctctcccgggagcacaacacagactcgaactggctaactcgggctgacgccggttcagctgactcccatcctggcaagaggcttccggagtgttccagcgcctcccaggcctgctgcggccgccccagtccacgggccgcgcggagaccaagataaaaggacgcagggtgccgacctgaccgatcccggcaccgcgagagcgcgacgaggtccctggagcccgcggcctcgtcaagggccccaccgcgccccgacccccgggtcccgcgcccacctctcgggtctgcgctcggcgccgcggtgctctgcctcctcggcgtcttcgggcctccagcgcctgccgtcggctctgcgcttccgtcccaggctccatcgcgcgggggacggcgggctgcggggagggacgcggtcggctgggcacgggaggttcgggaccgccttacaacctccgccctcccacaccccggccccgcacaacccccgccccacggggcacgcgctccctcgcccgccgcgcagcccggcctcacctggcgtcaccgtcgcagcggctctgatgcctcggcgggcttcgcgggcggcaggccatggcagcacgggccgggcgcgcagcgcagggccgaggctgaggcggcggcggcgcgggcagagagcgcagagtagagcagggcagggcctgaggcagaaacccgcgtccccgcgccggcgctcacgagctctgcgcgccccgcccccaaccgcctttatgtgggcgccgggccccgcccctcggcctcccgcgcgcgccgggtcgggcgagaccatcgggccacgccgcaggggtccactcagctgtgcgcgcctcgcgagccgactggggctagggcgaggcctcgggaccgcgggcagccgcgaagcccgactgcccggccctcggctcgggagccagatggacgccgtgggctgaggagaggcctgaggaaaaggttgcccccacccgcgggattgaggcggccgggccgccgcgggcctctgcgacgctgataggtcgcgccttggcgggcgggggcagctttggcgggagattcggccgcgcgcgacgcggcgcaggtcgtgggggaagggtaagcggcacgtttctcggcctgggtcgtggcgcatctcccattggttccggcctgggtggagcgcggctctgcttggttcctgcccaggtgggggcgtgtctcctccctggcgggaacccggaacccggaacccggaaggcgcggcctgtggcgggtactgactgcttcccacggtcccgtggccgctgcaggccccgtacgcgccgtctattgttttgagccgcttaaagttttggagtaaccttttaggtcgcaacagttgacaactacactgagtctttccggtcccactgccctggccgttgaccgcacaccggccaccgactgagccgctagtttcggttgccgctgcctccctgcccgtccatgacgtcctccactgtgtcgccggtgcatgacgctcccaccctctgcctggagttgactgggtttgtatcctgaagaatccctggctcagcaggtaggttccacctggaggcgaggtcctgtagatccgcaccatcccgtcccgcttccccgccgtcacagttgcagctgacggccccgcggatccagccaactagaaccccaacgggtgcactacacctgagaacaggttcccacagcttcctgttggggacaacgtgagggatgcaggggagagtggaaccagccaaaagagtgggcagtggggtcaggtccaggaggctgagccccagggatgcttgggatccctctaaggccttacacctctgggagggccggacttttgcacctgctgccctcaggactgtgccttggtgcgtccaccgcccccttttgaactcaaaaaagtcatcctcagactaggacggacacatcctgtccccttcctccccaggccctgggcatcccataaccctcaacactgtaaactaaaaataaaatcctggcagggcgcggtggctcatgcctgtaattccaacactttgggaggccgaggcgggaggatcatctgaggttgggagttcgagactagcctgaccaacatggagaaaccctgtctctactaaaaatacaaaattagcctggcatggtgacgcatgcttgtaatcccagctactcgggtggctgaggcaggagaattgtttgaacccgggaggcagtgggctaagattgcaccactgtactccaacctgggcaacaagagcagaactctgtctcaaaaaaaattaaaatcctaagcccccaacaactgaatggacccccttgcggtcaaggggacaccagtggcaataagataccaaattatgaataggacctaaggtcatgccaggcaagggttaagtcacacaccctacatttaaactatattcctactgccacactgcttttcttttcctcttagtagctcaataagcactggccttgagctaagcaatattggaacagtgcagtggccgagatgatggctcatgcctgtgatcccaacactttgggaggctgaagcctccaaaaggattgcttcaggtccagagtttaagaccagcctgggtaacagcgagaccctatctttacaaaaaacttaaacaaaaaggctaggcactgtggctcacacctgtaatcccagcattttgggag

SEQ ID NO: 317345 - DNA, 4001 bp, Homo sapiens
taattaaagctgtcattctaggaatcccaaaagtggaagttatctttgtagcataaactttttaaaaaaaattttatccatgcaactacttccaagtccttttcttcctttccgccttctccaaacttcctaacatttctgctgtgggtcagagatcaagggctctccaagctagtatggaaagggaagagggggccttaccttcacaatgtagtcagccacccggctgtatttgtagcgaatgaagacgcccaacccgataggtatgagagtgctgcagagagtcagggtcacggtccctaggggtagtaactgcacgataggggtgttgatccaagcccagctgtagatccacaggcacaggggcatcaagacgagggccagaagcgtggaggagatggtcatgatgatgctgcagaaaagggaatgtgcagaaatcagaacgagctttgagtcaaacagccagctaacctttttcttgtatgttgagtagaggtggaacggggagactgcaagtcccggggttgaagtctgggcagaacctacatccgaggagagtgccaagagagcagcacgtctaacaccgatggaattatgaacccaaggcagggaggaaaaacaagccccctgtctcggtactgctgccctcgacattataaagtctattgagcctggatgattctgaggggaaggaacgttcttccttgcaagccccctgcaaggtaagccatggtaaagctgctgactgctacttgttggtcggactcaacaatcctgcactctatgtgagattactttctctgacgggccagtagccctattttacttttacgttgccggcgagttctagttcagactcccccttctctttgtcttccactggacaacgacctgcgctgccaccccgacgctcggggaggacggcgagggaccctgctgaagggccgcgctgcgcatggaatcccagccttggagcagctccctcgccgtctagcttgctcccctagcagcacaacctgcaggtcggccttgacttctaaagccggggcgtcatcaacttcctctccttttctcctccttcctccacgcctaattccaacccctccactgcctctgtccttcgtcgtgagcccacggccgtaaacgcgcgtctgggatgagacagatgcccaaggaatagacagatccgtacctgaggttcatgtcgccgtcaaccagcagggacataagattggagagattgccgccgggacagcagccacacaggagcaccgccacggcggccacctcgtccagcttgaaggcgagggccagcaggaaggccagcagcggcaggaggccgaactggcagagcgctgccagcagcgcgcccacgggccgacggacgtgcgccccgaagtggttcacgtccaccgtgcagcccaggcccagcatggtgatgcacagggcggcgcccacgaacacgttcagcccgtggttcagcggcgtgtcccagaacgggagcgcgtggggcgcccagggccgagggaacggggaagggccgtggctcgccgcgccgcccgcgaggccgctggtcgtgggctccggggtcggagtggggccggggctgaagccgaagctcggacccggcccgaggctgagcccagggccggggccggcgctggaggcaggggcgagggcgaggtccgtgccggggcccaggctgctggcattgggcgccagggtgtagttgtcccgcagcagaggggcgaagagcagggtcacgttgtcgttgccgtccatggcgcggccggagctgcggattccggtcccctcccgccgcgtgcctctcgccgtcccgcggtcgccgcagtcgccgcccgtcgttctgcccgtcggtctccgagccccggctgcgcgccgctgacgtgctcggcggcgtcgggggcggcgggccggtctccgctcccaggtctgcagccgcccgcagcctggcactccgcgcagcgcggccccccgggtgaacccaatcgctgcgccggctccgcgccgcggccccgcgccccgcaggccccgccccgccctgccgcccggtcccctcctgtgaatcgccagtaagtggttctgttatcgagtgtagccaggggcggaacaaagacctgacaaaggaccagagcaggaaaaaaccgttcctggctgccgatcaagttctctgatgggctctgcctctttataatgaaatctggagacccagacacacaaagtggagggggcgggtggataacctcatcgatgcacgctcatggcagaaactgttcctatagcctgcagccctaagaggggtgcttgacttaatatgagcgattctctagtaagcaggacacgatatctggcttgaatttgcaaacaattttttgcatgattttcagtcttaaagtagaatgtaataataatatagcgggttttgtgcaagtgcgtgtgcattatttcattcgattcttacagcaaagccgtgagatagataccatttttacaagctcgatttttacaaacgaggaaactgaggaacgaggaattctcagtcttatcaaccgaacccacaagtacctggctgaatctgcacggcgatgtgtccctaaagagggcagagaagagcttggctaataacaatttccatgaaaaatgtgtgtttaagaagttattggcaggtggagagaggatatttcagtggccacagatttacgaagctttatgagtaaggccctggcattaggattaaaggactgaaaagaaataaagtgctgagattccctgcttgagacaggtttatcccaaaacaattcaaaagcagagctcttaggaatggagatgcaacaacttttaagtcagtcactagatggcatgtagaaaggaaaataatttcgctgcttaccaaccaggtggggcctgttaaggaggcatctagctccctgggggtgaccataaagtgatagtcagttgagttgtaaaaaccaacaggaatttctagaatgaaatcaaggctcagtcttagcccagggttgctttcacaaggagccaagatatagtgaattcttctatctgggaacttttccctaactcctgtcctggcacagagtgacttctattacccaagggtgggctgagcctttcctcctccccaaatctcatgaagatgatggagactatgaaaagtaagactttgcaaatgcaaagcatattgcactcttcatcacaaataatttattttttctcttttggactgtaaattccacgagggcagagcttttgcaagaatctaggaggataatgtacccttacacttttccaaaacactaaacccagaaaaaaaaacttcagtgagctaaactttaaaggaagtgggttgtgaccaaaaatattttaagttgacatgtcaccttatgtaggtaaaaagaaagatattcagatatacaatgatccatgctacccaaccgttacattagtagacccagggaagatgtgtggagaaacagacaagataaggagggaaggcactgctgagccttcacagtcttgaaaccacagaatgagataagccaagaacacaaatggcaagggatccagctgaagccaactgtgcaggcaccactcctatttgcctcagaaaccctcatcatgttaatgatattaaaattcacaatcacattaaataagcagtaattagaggcagaccaactcaactcatccaactacctcctctcagggtttagggagggacttgggcggcaacttgtgcaatgggcgaagactgaaaacagaaaggggcctggcatcatggcttttgtctgcaatcccagcaatttgggaggctgagacaggtggatcacttgaagacaggaattcgagaccagcctggccaacatggtgaaaccccatctggactaaaaagacaaaaattagttgggtatggtggtgtgtgcctgtagtaccagctacacaggagactgaggcaggagaattgc

SEQ ID NO: 317346 - DNA, 4001 bp, Homo sapiens
gaagaaaataagcatgaaagcatctatcccatgcctatggggcacttaataaatattagtttcctttttctttccaaaaacttttaggtcctggaatttatctctgatttatgaacttcatgcaaagaatatctatcatttcccagttaaataatcaactttactgaatttgaattagcaatgtatattaatggcttttaccattaaggtaaaacacaaaagcagtgtatattagtggctttgtatatgagtggcttttaccattaaggtaaaacacaaaattcatcaagttatttttttttcaaatctctcataagtgggtaaacaaaaacactgccttgggaaagttagttcctattctgcatggtatgagcccattaaaatttataggtgaaatatgttccatacgctaaacattcagcacaagcggaaaactggaaacacatacctgcagctgactctcactgatgtcaactcccagctcagtcattacctctgattcattcattcatggtaaagtgaatctcaactaaatgacatacacatgaaacaaatacttaaatttataagcagttcttccccagggcaggaagtgaaacggcatgttcacaagtaagcaaagagtctcgagagaccattgtttttagctctttttccagtgctatccctctactctttcctcaaatgctctttttttcccccatcaaaacatgtaatccagaaaagcatgtgactaattcatcctcattaaagtgtaaataagggacaaggcttaatgtctcccagaggtatttatctacaccataattgggaataaggtcactggcttaaagggaaggaatgcgaatctagtgatgatgttaacgatctgcaaagcaacaagaaagaacaattttagtcctgagagccttcgcattgctcctgaagtcaaatcgacaagccatctcagcacttaaagctggatatggccaccagacacccctaaagctcctttatccagtcctctaaagtgcttctttcctaaagtaggtgctcaggcatcactgactggagctacgggagtctcattctgactatgccactgacacaaccacgacggctgctaccaaaccacaatcgttagcttcttgggattcttggtttaagtcctaggagttgctaaagaggccagtgtaggtaagaatgagctcaagcttaggaagggccactgggtgaggtgcagacctgcctccactgctcagaacgcatcccactgctcagaacagtagccaataaagaaaatgatcatcagcaaagtaacttttgagcactgaaaggaaagcccacccatggctgaacaagtctctgtgatatttgtaacatttcccactagaatctctaccaaaagattagaagagtgtttaacacaagagtttcagttattccccctaggcaggataagagacagactgctgagcttccctggggttacttacctgagatccatatctccatcaacccagaaggtgaaaatgttagagatggtgccccccgggcagcagcccatgatgagaacagcaatagcttggactggcttcagagaaaagctaatggccaggagataagctgtaaaaggcatgagcccaaactggcagagcagtcccacagcaatgccccagggtctcctgatgtgcgaccacagcttccggatctccacggaacatcccaaagagaacatgagcagccccatcatcacagtggacaccactgtgaaaacgagctccaggtttccatgcacctccagtcccactggcagctcctcctctgaactgttggcagggcaggctgagctgctggaacaattggctctcatctcctcatctccttaaggcagcattacaaatgaacatcggcaacaatggctgggcaggtctatcctgccacattttgtaatagtgcaacgaagtcacacatggagaatcattccaataactgttggccagcaaggtgattcatcctaatctgatcaattttttcacaagtggcattataaaagtaattatcacaggcatgaaacatataataaactgtggtaagtaaggctttccacttctgttcttactcaccactgaatatgtatgtgagatgagacaaacaaacttgttgtcaagtggagtgaccgggctatgtcgtcagcatcacattgtgtccctggaaagtagggtggatgccaagaaataatttctccaaattcagttgggatttcaaagagccaggatgcacagacagaaaagctaactccggaaaaaacaacaaagccaaagccacaccttgtagcattagcaaagcgtgtctgctggaaatagagcaaaaagaaaaaaaacgccggtggaggaaatgtcaggagggactaagaataatttcaaggagcttcagaatttgtctcagtttttcttctagttctattagaatttgtgtctaaagtcaataattaaacacctgtgagaataatatggtattaggcacctaattatgtctcatgaaacatgtgaaaactaattccttcacccaaaataattcaagggagctctcacttgcttttggagataagagtctactttgagatacatacccctggcctcctagggacatctgggaatcctgcaaggggatgtggtaaagagcttggtctgaaatggagatggggtctgaggacagcctctgaccacagtgcccagggcccctctgtgcattctaagcaggcactgctggcaaaacccaaggactgtatggttctgtgaaactaaacctctgaaaaagcaggtgccacaccccttctcacagcagaaagtttatttgtggggcacaggctagtaacaaggcacacttcataaacgcctctacctgtctcaagagggatactagctatgcattgtttattcatggatgagcaaattcttctccatgacagaatgctcaggacatgctgactgtataaaaatacaagttagattcaaatgtgaagtaaattctaactatttgaagaaagaataaactgcctttggcaaacaaaccctgaaggcagctctggccatccagcctccctggaggttgcgtataaggggtcagtcagcacagggcgtatttacgcagagccctgcagagaatggacactgaggaacgggaaaggtctctggaaggcaaggtgttcccagcttgaatgatgcagaggtgtggtcaggctgaggaggaagggaggagggagacagctaacattttctgagcacttctcaggggtgacagaggtggtgatatggtttggctgtgtttcccccgcacccaaatctcatcttgaattatagctcttataattcccatgtgtcatgggaagaacctggtggaaggtcattgaatcatgggggcgggtttctcccgtgctgttctcatgatagtgaataagtctctcaagttctgatggtttgataaaggggagttcccctacacacgctcttgccttttctgccaccatgtaaaacgtgtcttgcttccccttccccctctgccatgattgtgaggcctccccagccatgtggaactgtgagtcaattaaacctttttcctttataaattacccagtcttgggtatgtctttattagcagcgtaaaaacagaccaatacaggtggctaggtgctttacacatatgtggctatgtctggtgaagcagaactttatttacttatttagcaagagaaggggtcaggggtgtctgcctagataatgtccaaaagccccttagtcaaccttctttttttttttttttttttttttgagatggagtctcctactgtcgcccaggctggagtgcagtggagtggcgcgatctcggctgactgcaagctctgcctcccgggttcatgccattctcctgcctcagccttctgagtagctgggactacaggcgaccaccaccatgcctggctaattttttgtatttttagtagagacggggtttcagtgtta

SEQ ID NO: 317347 - DNA, 4001 bp, Homo sapiens
ctatggaacacataagtttgcagaatctatctcatacatgccactgcagaaaagccccacggaaatgattcagcattcaacacctttcttcccacagaatatttaggaatgcaaggtaaaagatattttgccaaacttagcccctgcagatttaaagttaaagatcatacatcctctgtaatttcatctcaaaactgagcaaataagagatctaacacgagaagcgatagctagtgaagtgtgcattgcagatcatgcaaaggtactctaagtcttactattcatttagctccggggatagggggtcttcatttgacagacctgatcttcacaagagtttcccaaaagttcacagagcagcagtgttaaagaagaaactattaccatcaatcagagggagaaaccaccaggaataactgctttattctcacagttacatattctacacattttgttctaagttgaatacagaagaacaaaattttaaaacaaacaatccttcatctccacaattttggtttaaataattccttttaaaatgttcccggaagctacttctaaacagagtaatggggtggaggttaaggggagaagggaccactgctgttctcctaagagatcatttcattcacttccatcatgttttaacaaaaagataaaaataacttcaaatatcctcctgagcgcttcctactatgaaatattgtgcctgttcacctctatccttatttgctccggttgcatgagttaggtattaaacctgtcaataagcttggaaactgacaaacaaggtcaaaaagacaagcgaattgaataaattcaattaatgtttatgaaaagtagtacaagattgtctaaaggtgttggggggggcataaaaaactaatatttctaatgttcccaccagtgcccatcatctcctgtacaaagctcccactattcagagatctaagtatgctttcagtccatccacatttccttgccaaaacacacactacactacactacacatagtctaacagtctgtatctgttagactgctagtatagcaactgaatcccggcagcacacggaagtatgctgtaatgaagtgtcctgtaatcaaagagtgcaacgtgtcagtcggcttgggagtttctggagcaccagcaactacagcaaatcatcactctccaacatgtgggccataaaatctgagttgggggcggaggtgtcccttttcttgtttttcctccacttttttttttaatgtgggggcggggaggactcgaaagtagactcgataatgaggtccactccaagatagatacggaactcttagcaacctagattcccttgggataggatgctactttgaaggcaagaggagtaagtttcattctctgtaacctcacttcttgacactcaggatagtcattgtttgtctacggaaaaggctacctgccctcaaattcctttgcctcgttcctaattacaagttccctctggggttggtaaattagaaaatcagcaaaagggccaaaggctggtcagtgccccctgaaattggcaagcgcttgcaatgagggttgccccacctttccaagactcacaaattagttctgaagtgggagccgcggtggagccggcagaggtgcagcacttacccccattcacccctatggacggctccagtttagctccagcgatcgccagcactattccgaccatgaaccagtctttcctcattctctccagcagcctcatatttgttagggtgggtgggttttgtttatttgtttggctttttttcttttcaagctccgatcacctaatccttggagcgtctccacactttccttggtccctccagacatgcagcagagcaagtcaaattgccgattgtaaagtaaagacctgggggttgctccggcggctttgaggagggttgggagtagtagtagccagtgacaggaaagtctcactgagcgccgccatcactaccacgcgcctcagaatacacgcgcacaaacgcccccagcgcctctggccgcgggctcgcaggtgcagatgctttgaaatgaagaactcggaccaggccgacaacgtgggcgatccggcaagggaggctggccgccggatggggctgacaagcgcaccgctgtcgagacctgcggaaccttctgaatgacgaggggtcggggagagcgtcgtaaggcgccacagccagcaagcctcactgactgtccttttctaacaaacctttaggcacagccacccacccttctggagcatatctccatggagagcctctcttttgctgtgccatgactccgcgggcagggctgacgtgtgcttggggcaagggatttctccgttgaagctgcggcagcggggtgcaagtttggagacgcgcttcttcgggacattacggcgcttccacgacgctagcgctgacgtatgcgcgggggggaggggaggccactctggatctccgagttcccagcctgagctgccggagttagaggtgtccgcgcgggaaagtggctcgctggtgggcggggagccttatctctggcggtgggttgaaaatccggcgccgggcagatgcccacgttcgctggacccctgcttgccggcgtccgctacaacccaaggaaggtgggcccgacctcgccaggtcgctcgcctgcgggtgggcatttggtccggatccccttccctctgcggcccacacctgtctccgggactggggagggctgcagggatcggggcagatctgcctttgcgggccgagagtgacagctgaagtctccccaccaactaagctactcgcgggcggagtggggtctgcgctggcaagcccctgggcgcgcgggtgcccgctctggctcgcccccagggctgacctacccaagccacaggaaaactctgggaagagggtcgcggattccaacgcggaagtggtgggggattgagtctgagaggttggggagtcctaccttccattgccacgagtgctagttctatctgccagtttcttccttgaaatgtcttgtggcaaccagtgacattgatggtttcatgaatggacttcctaccggtagaccctgcaagagcatgaactccactgtatcattcatccaaatgaagaaagaaagaaaatagtatgtgatattttgaaataacctggcatctgccacttaaatggttaaaaatagaacttaaggtttggaagagattgtttcgtgatgacagactttaattctgaatttattcaaagctggaaagacactcgtcgtgtcatttcctctatttaatttagctttatcttgatggcaagacttccagaaactaagccactttaagagttgtgctcccagttgtaggttacacagtaccaagtgtcatctaattatacatcaggcaacatgaaaaaaaattaatttcaagataaaaagaacttaacagggagacatagatgacattaagcagtttactctgaaaagagacaggtacatgaaatataaaatttgatgttagttgtcaggcagtcagaagataagtgaagataaatgaaagatagtttacaacataattattttcttatagtaatttcttagtaggttaaagagtcatacgtctcagtcattgaagggatagttttgtattaaaacatcattaaacattaagtttacagaaattgagctgttttaactgtacagctattcacaaattatttactaatacctctttgatctgtgtagagcagaatctaactcagagatttttttgttctgtttttaatggtacttaaaggaaaagaatataatgtaccatgaattatattctcttaaggcctgtatttgtttgctgtggatgctgaaacaaatactcgaacttggatgccttcaaacaacagaaatttattatctcacagttctggaggacagaagtccaaaatcaagattttggcagagccatactcccgctgaaggctctaggggagagtccttccttgc

SEQ ID NO: 317348 - DNA, 4001 bp, Homo sapiens
gagtggagagaggcaaactatgaaagacctgagcttagctcccagatgatgcattaagtttctacccctgaccccatatactccacgccacaggtctggaagagttgtaaccacatccctagcattcctagggtacaaggtgcttttttaaatgggacagtatctggccctagaacaggactaaaagaaaggtctgcactggagttgaagccacttcatttcttgagaatacacaataaatgtctatttctttttaaaagatcatacagatttttctattgaatccaactatatgggtggattatataaaatatctgatagacttatccctttagctaacttgggagccattttgcagcaatggttcacaaagcactttcgttatttctttaaatcattccaatattaatagaaaaaatcaatgatgaacaaaaatgaaattttaaataaggacagtgcttgatgcaaaaagaaaaactggtaatactgatcccatctttattttaaacttgtatatattgtgtttgttatgaattcttttgcatgacttgatttttaaaagattgcattaaaatagtttaaagttttttttttttcctgtttttaggagtggaggtttaatagaaaaaataaagagaaaggagaacagctctctctctagttgaaagagaggggcttcggaaacggaaggaccctaaagttttgtttgtttttttgagacagggtctcactccttcatccaggctggagtgcggtggcgcgatctgggctccctgaaatccccgcatcagggtcccgcaagtagctgggactgcaggcgtgcgccaccacgcccggctaatttttgtatatttagcatagactgggtttcgccatgttagtcaggcttgtctagaactcctgagctcgagctcaagtgatccgcccgcctcggccttccaaagtgctaggattataggcgtgagccaccgcgcctggccttaaaatactttttatcttgatgactgagggttgggttttttttttttagggcccccttgaattttgggcagaacgaagtacccccttggtcttcagtagaataagcagaacctcttttcactaataggtttcagagtactggtaagccctagtgctcccatatttgtacttctcttagacatactatttcaacaaatatacatatagattttgactcaaggtctcctctgtcgcccatgctggagcatagtggggtgattataccaacaaatatttaagcaacttagagcactagttatagcagagtgcctaatggcatctccctcaatcctgggaggtcaaccactctccttctggacctggcacaggtgcaccaaggtgtaaatcgcactgcagatttagagaaagagaaggcagtggtctccccggtaccaggacttggtcaggaccaacgcggccctggaaaagcagagcctgttaggttcagaaactaaattctggaagggtaagaagcaaattcatcaccgacagctgtagctgtggttgtggggcccacaatcatgcccctcccagccaccctcttctctgggaagctgacgagggcgccgggagaggctgtcggggcggcctgccttgacgcaccctgctcgcgaggaatccgcaccaggcagtccaccatgcctttgtaccgcgcctcggggctgatctgcttcgacgacgcctgcacctgcagcagcagcttcacccgctcgatgggcgccaccgctgtcttggacacagctgccgcgactccgccggccagaaggtccttcccgaaggatgaggcgtcaaacagccgcttttctgccttctttttcgcaggctcacgatgcatgatggagaaggatataaaaaccggcagcagtggctaaaaatgagtacgggagctacgatgaagggaagcggaaaaccggaaaaccgctgcagcatcgtactggcgagaaagtggctcttgggacgctgagagagccgcgcgccggcgaggcgcgtgcggaaaagctgcgcaggcgctccaacggcctccagccacgtgacgcctgacacgtgacacctgacacgtgactcctgacacgtggctcctggatgcgcggtgacgcctgcgcacttctacgagcggagcctgggctttctgatgagggaggggtccggaggcggtgagcattgagcaggaaaggcgaggggaggggccgaggagagccagttctgtgtgaagaaatttagtagctgagactaggccagagcagtaaaccagcggtgtgagattaacagaatttagttttagttcctagtgttacccccttcactttcttaatcgctttaatccgttacgttttttttgaccagagatggttcctttgacctttcttggcatcttaaaaaagacagtcttacctgttgtgtgattcaagtgatgttccccttaaatttcaccctatgtgcctgttaatgcttcaaattcccttggaaattgctttaatctgttcctttaattaagcagggatcctttgtctagtcactttctgtgtcgttttgatgattgtgcccccatagcataatacatgttcctctttttcatattgtatttaaattgataatatccagagcagtggttctcaatccagactgcacattcaaggggatgaggggtgttttgttttgtttttcaaattgatgcttgggattaggccctgcacattaaatcagaacgtctagaagtgaggcctggcatcagtatttaaattctccaggtaattctagtgtttgaagtaattctaattctagggttgagggccaatgacctatctagaagagtagttcacaaacttttcgattgcaggacccctctttttcactctgaaaaattattgaaggccaggtaccagtaatcccaaaactttgggccaagtccagcctgggcaacatagtgagacccctcctttacaaaaaaaaaaatagctgggcgtggctgcacaagcctgtagtcctaagtatagctacttaggaggctaagacaggagaaatgcttgagccctggagttgtaggctgcagtgagttattatctcaccactgtgctccagcctgggcaacagagcaggaccctgtctcttaaaaaaaattattgaagacacaatgaagcttccgtttttattatgtatattggcatttaccactcagaaattaaaacacgatttaaaaatatttaattcatttaaaataaaaataatccattacaggatagcataagtacgacttttaaataaaaaatgtagtagaaaaatagtattgttttatatttttgaatctctaatgtctgatttaataaaagacagctagattcacattactgcttttgcattcagtctgttgtgatatcatacatgtagccactggaaaactccactgtttattcaggacagaatgaaagtgaaaaaggcaaataatagtatcatttaagaaaatacctttgacttcatggtgttcctgtctccgtgacacagaggggttttctaaactgcactttgagaactcatttagaggaggttggcagattcaggtttgacttctttcggcaaaaatactcagtagaggtacgtctagcctgtacataacatttgtctttttctttcacctcacttttttcacttaatatatcgtggagatccttctatagtagcatttaatatatccctttttacagctcgtttggtgttttgaaataaatggagatcccatcttatcacctcttactctgtaggacctgcagagccttacaacacatctataaaatgtgaaatgagtttttagctttttttgaatgttaggttctaatttttcctttgtcttatgtgttataacccttctactagtacttgtcactagtaaaaaaccatttaggtcagaaggattccagaccaggaatgttgtcaatattttgattacctcacataaaatcagttggcaagtcctactgatatcatat

SEQ ID NO: 317349 - DNA, 4001 bp, Homo sapiens
gcccctctctcacccttggcagtatcatagactccgaagtaggcagctctatagataatgatgccttggacagagacgttgaaaccctggtagagccccctcaggccatcagacttgaagatcttgatgatacagtcgcccagaccatggaactcacgctgggcggcgcccttgcccacatcagcagccaacctggtcctagcaaagtccagcgggtagacaaagcaaagggaggtggccccagcggccccaccggacgccaggttaccagcaaagtagcgccagaactgcttatgccgatccacaccccctaagaagagctgcttgtacttgtccttgaaggcgaagttgagagcttgggtggggaagtaacggatcacgttggccaggttacccctccagaaggagaggaagccctgctccttagggattctcaccacacaatcaatgatccctttgtactgcttctcagcactgatctgtttgctggcatgctggacctggtggaggggagggtgggtgacagaggacaggcagggtagagagaagggaagaggacaggagaaaaaaaaaggtttgcacttcctagattttttttttgaagaaaaaaaggatgaggaaatcaaatggatactgaggacgtgtaaatggatactgttatccatgttagttactggataacaagccaaaataatccaatgttgcttcaattattagggtatttgagggaaaaggtattgccccaaataaactgaaaaggtgattgaattatataaagctatagccatttatttatttcactttccctaggtttgagaactgtatgaggggcttactgggggacagaaatgagtaacactccctgcttcaaagggctttggatttaatagacatgatggccaaaaaatgacaatttctcagtgtcactctgatcaccctggagatgaggatctctactagatgctctaatagaggaaggagaataaatccactaaacattaggcctccaaagttttcaagcagataatccaagtaatcaattattaagggtttgctgccgttgtgagcaatttgtgggggttttgttgttagtaattctgactcccaaattgggctcttcctcattgaggggccctgaccttttgggcaggtggaggaaaacacgagaggatgataaaccattcagcgaccaggtaggggaggaaaagatttggagacaggatgatctgagtttattccgaaaattgtttcttaatatttcaaaacctcagcttcatctgtaaaatggagaagaataactctctcacagaggttacataaagatgaaggcgtcagcctacatacagcattgtgcatgagatacgataagggaattcttgggtgatgattattttgatgtttttattgtaaaggtgcgtgcgcataagacggtgccaaaaatactggcaatcactaggtgcctccgggcctgagtgcacgcccgtgctgtcacgggcgcaggatctggcacacgtaaaccggctccgggtgggtttccatatatagacacccgaacgccgggcgccacccgacaccaggaatctgcgactgacgctggacctgtctctacgcagagggcaccttcttcccccgcgggcgggcgggcgggcgggcgggcgcccgggcctgtggcctggcgcagattttccgcggcgccccgcgccctgcagctcgcgccgcatcgcgcgccccgcccggcccgccgcgcccgcgcccgcctcttgcaccgcgcggtcctcacctgcagcagcagtttgaccctctcgatgggggcgaccgcggtcttggagacggcagcggcgacgcccccggccaggaagtcctttaggaagctccaagcgtgatcacccatggtgacagctcgacgctctcagcccgcaggcagcccgttcgtgctctcgcccacgcccggcctggcaccgccgcgcagtccccgaccctgcgcgacgctagggggccgccgcctggcccgcagctcccccttatatccccgccgggctctcgcgagaggaggcgggtcgcggccggcgctcgcgccgcgcattggctgggcaggtgcggggcgccccctcctcccagctgcagagggcatcgggggcgaaggcgcttccgggagcgaggctgggccgggggctgtccctgcaacttgggacgtttaaagggcacattcatgttatctgtcccgccgagcccagggaacaccgtgtcaccgcggcatgtgggccgcgtatttatagcacaggcagccttaggccggggcgaagccggggcagacaccgggccgctgccgccggtggagagttcttgaccctccggcctgcacgggccgcgctcaggcccagggatttcgagctgtttcctccttcttgcatctaaaggcgccccccaccagagctcactgcctggatatgggcctctttagagccgtgcgctcccgagaataaatggcagtcctctcaaatagatactaaggtcacctgatgctgtgattgcctcatagaatctgacaacctgctgcctctcatttcttttcattcaatcgttcgttcagtcattcattctgctattacatattgatgtgtctggcactcagtgcccacaggaaagacctggtgcagggggccactaggtgaattcatacttgtttctgcaaaactctgtgactctaaaacacaggacacttcttttgtaagcccctaaagggttcaatgtaccactctgctctcagcggaatttcagcacatattagggcagaatgttctgtctgtcagccggtgccttcttgagggtcagtgctgtcagccttccggagatccagtccttggctgtatttgcctctttttaatgacagctggggttgaggaaatgctatttaatcccaggaaattaattgcaattaatttcttaaaatatataaatctgagctttaattttccttagcttgttttttaggcagttcatgtaaccatacaggttttcaaatacaactgttccttcccctagaatgactgcaattcgtttttaactttaaactcttcactcaattatcttcccatgtttgctaattttcatttgtacctttaacaaagtttattcattgttttataaactttttttttttaatatttgctgacatcatgttagaggtttacggagctgcagctgcgtgtcaccctgggcgtggagactttggtatagcagaagtcactaaggttccagggccacagagggcatgcgtttatctaagagtggggcaggctagagttccgaaatccaggtaagcagaatgaaagctagaaactagtggaaagctgccagaggtcagagcagacagaagtcaagaactcggaagagacaaacagataaaccatgtatgtgttcattcaacagactcttgctgagcatgtactgtgtaccaagaactaggtgtagccctgtggattgaatataagtagacgtggcccatctccaaagaccttacagttcagtgtattcgtcacttgctccactttatcaaaacttcacttactgatttccatggatcagcataatccacacagtaaacctttttaattataatagtgtactgtatcccatcctgtaatatagagcacttgcttttatacctccattttccttttaattgtgcattagaattgtgtcttatttttatgatgaaaaataggccgggtgtggtggctcatacctttgggaggctgaggctggcagattacctaggtcaggagttcgagaccagcctggccaacatggcaaaaccccatctctactaaaaatacaaaaattagcctggcgtgatggctcatgcctggaatcccagcagctcaggaggctcaggcacgagacccccgagaggcagaggtcatggtgatctgagatcactccactgcacttcagcctgggcaacagagaaagactctgactcaaaaaaaaaaaaagaaaga

SEQ ID NO: 317350 - DNA, 4001 bp, Homo sapiens
atggcctgcggcaccaggatgatgccgatgaccagcccagacatgacgtcgcctgccaggtactcccgcgggcggtactgacgcagccagcgcgtggcggggagcaggtcctgcaccagcgcccggacgcacagcacactgcacgagcagctgcaccacagcctggccttcagcatctcacgcagaccccggggtgctgggcgctgccgtcggaccggcaccggccctctgccctgctgcagaggctcaggggactcgtccatcctgttgcgtcaggtcccgtggccgacctgcggccgagaagagggcatggtcacaggagcccccggatccagggccaaacgacaaggtccccggcagcaacgggccccttggggcggacccctcgcccacccagggccggggattggtgctgggccttctcctggcagcgcgggccccagccccctgcccggtatggatggacgctgggccctgctggatccagaatccatcgtgaggtgagatgggattacgacaccaagcccatgccatggggtgtgctgaggccagcagtgctgaggggcggcgtggcggcaccctgtccaggctcagctccggcctattggctctgcggttcctggctgaaaaccaccctgtagcctcctgaagctcacctccccaacggggcaggaacaggctgggctgccaccacgcacatgtgcctaccgtcagaatgtcacagtcactggacacaggtgcaggcaagcctgagtccagctgctccgtgtccacctccctggctccccaggttggcaaacggtcctgctgtccaccccatgcccacaccagagccctccctcccccatccaaaccatcgcctgctctcctggagacacctccacccacccctctgtcacctgccctgtgggtcctggggctggcggaagtctcaggaagaggcctcctatgtccctgccaagctttgtgggtactgggaccccaagtctgctgggggagcagcactcagacactagcctagcccatccgcctggacttgggacagaattctgagaatatgcctggacgggggccccatcagggccagctgggaggggaggagggtgactggcgtctgtctcccctgcccagacagttctgggacgtgaggcgccctttttcccaggctgcaccagctcactgtggaacggccatgacacactgtcccgaggcagcaccgagagggcccagcccgctgcacacagtcaccctgggccggcagagccggaagggcacctgacctttcccttgatctcggaaaacaccgtggcgttagggaggcggtgcttagaggcctgactggtcccacgtgaggcctcgggtctgtcctgtttgcagactccaatgtactttcactttaaacattcttctcagcgacgttaggcaaagactttgctcccaggacaccaggtgcccaggacaccctggagcctgggctgagcctgctgtttgcacgctggcccagggtgtgcgagctccagtctcctggcgggtgtgttggggcagtgagcccagcctggtaggttgacacatgcaggctgggcacagcacccctggggcacagagcgggggtcctggccctcaggcaacattgcaagagttgtgtccccttccctggaagaccccaccacactgggtccctggatgccctgaagcccaccccaagcccctggggtccaggtgtgtggaatggggacagtagggccacctgccttgagcctgagggtgcccctaagaaaccacgagtccagggcatttctggcctcggctcccacgcccccctctgctgcagctgagatctgggcccaggatggttcttacctgagggagtcctcacaggcgcggagggccctgggatgacgaggggctggcaagaccaccgaggaccgcagggccctctggctcccgcgagcagcggggagagtgggggtggtggcgccaacctgcaggcagtggtctgtgccctggactctgtagttcaattatttacctacagattgctgagtcatgggtttctccagccatgttacctgatcggctgatccgggagttgaactgtaatcaggggcttgtaggagttagagctgtgtgggcctctgaggagctcccagcctcccaggagccgctgcagctgtggctctgcggccctgccgggggggcttagggaccagcgggaggcgggggctcaggggctgagcacaggtaaaccttcagctctggggtctggggtcgagtgcagcagccttcaaacccaggcggggctgagggaggcttggtctccgtgtccagtcgccggacaccctcctggtcctgcaaggagccagcctggtccaagctggagcagggcagaggctgacagccggctcagcccaaggctgccggtgcgtgcatatgcgtgtgtgctcgcgtaagccctgtgtgtggtgctcaccgcccagggcgaggactgccggggtcaaggtgccgtgactggccaggagtcctggtctgactggacccagcaccgacccacagcgcctggtcaccctcacggctcctctgccctcccctctaccacagaccaggaccggcagtgcctgcctcatagggctggggtgaagataaatgatttttttaagtgaactaaattaggcccacacgtgaaaataagggtaagctgctttttaaaaggaattattagccaggcacgatggttcactcctgtaattccaacactttgggaggcctagacaggaggatcgcttaaggccagcagttcaagaccagcctggtcaacatagtgagacgccccccaccttttctttttttttttttgaggcggagtcttgctctgtcacccaggccggaatgcagtggtgtgatctcggctcactggaagctctgcctcctgggttcacgccattctcctgcctcagcctcctgagtagctgggactacaggcgcccgccaccgcgcccggctaatttttttttttttgagacggagtttcgctctgttgcccaggctggagtacagtggcatgatctcggctcactgcaagctctgtctcccgggttcaagtgattctcctgcctcagcctcccgagtagctgggactacaggcacccgccaccacgcccggctaattttttgtatttttagtagagacggggtttcaccatgttagccaggatggtcttgatctcctgacctcgtgatccacccacctcggcctcccaaagtgctgggattacaggcttgagccactgcacccggccgccccctgccccccaacctttaaaaaattaaaagtaaaaaattagctgggtgtggtggtgtgtgcctgtatcccagctactcaagcggctcaggtgggagcatggcttgagcccaggagtttgaggctgccatgaggtatgattaggccactgcaccctatcctaggccacagagcaagagcccgtctcaaaaacaaacgctgtcattggcccagcactttgggaagctaaggtaggaggattgcttgagccctggaggtccaggctgcagtgaggtatgtttgtagcgcttcactccagcctacaagtcttttttttttttttttgagatggagtctcgctctgttgcccaggctggagtgcagtggcacaatctcggctcactgcagcctctgcctcccgggttcaagcgattctcctgcctcagccgcctgagtagttgggactacaggcgtgtgccaccacgcccggctaatttttgtatttttagtagagacagggtttcactatgttggtcaggctagtcttgaactcctgaccttgtgatccacccgcctcggcctcccaaagtgctgggattacaggcgtgagccaccgtgcccggccagttctgtctcaaaaaaaaaaaaaaaattccttgggagcctcaggtccccccgactttgacagtgagtactgggtgggagcctgcacggggcacctgtg

SEQ ID NO: 317351 - DNA, 4001 bp, Homo sapiens
gtaatcccagtgctttgagaggccgaggcgggcggatcacttgaggtcaaggagttcaagaccagcctggccaacatggtgaaacccagtctctactaaaaatgcaaaaattagtggatatggtggcaggcacctgtaatccaagctactagcgaggctgaggcaggagaatcacttaaacccaggagatggaagttgcagtgagccgagatagcaccactgcactccagcctgggtgacagagtaagactctgtctcaaaaaaaaaaaaaaaaaaaaaaaaaaattagttcagacaagtgggtacagccaggccacggaacaaagtgttcctctatcacttggattcttccattaaaatagatttcaatcaatggaactactgtgtcaaattcaaggcaaaagaactaaatgcaatggacattttaaagtcgcttgatggatcttgatgttttacaccaaggttttacgcaatgacatggagcatgtctgcttcacatcccgggagagcctcggacggcaagctaaggatcccgaacttgattcttaggcatggagggcttttaggcaaagagcaccaaggtccctcagtcactgtcaaacactcattcacacaaaacagagatggcagcacactagagcaggatcaacatttttcttaaagggctaggtggctaaatagtctcatctaagctagccatggaatttctgttgctctcacaactctgccgttctagtgtagaagcagccgtagacaatggttaaacagatgtgcatgattgtgttccagtaaagctttattttaaaaagcaaggagctggcccagttggcatgtgagtcaaagtttgctaccctgctctagagtgttcatgtgagctcaatgaatctccgacttcatgcttgttgcagaaatggacctggaatgtcccttaacagttttcagtagaactgccttactcagaacttttctctgacagtgtaagtgccgcacacacttaacagtgcccagtggagcaccctcatgcacatgcagtgtgagccttttggaagctggtggagggccagtgcatggaggagggaatgaatgaatgtccatctgtgctcaacagcagatagtgcaagatgggacgtgaagggccagaggaaactggaaggtatgcaaaagccatttccaacaaaacctgtagtttcccatgaagtgaacacttcttttcccccacctcctcgtcctccgctattctctatcttcatgaacaataacatcaaacacctccctcctgcttatgctaggtgacgcctaaataacttgcctcatcctcctcgctgccttccttctcctggatccccacattcagggggttctatctctgaagatggttctaacttggtcccctccatccccactgtcatcctcctggtccaagcccttgtcttctccagcaggctggacatcagcctgctgactggtctcaccatggcccatctccactctccagtccaattctctacagcatccctggagtcatctttctcaaaagcaggcagtgtcattgcttctctgctccaaacccttagatggcttttagttgctcagttctagattaagccttcacttaaagaaagaaagaagaaaggaagggaggagggaattgcaagcatctgcaatgagcgccagttccagggcagcactgtgccagtgacatctcctctgcacccacctgcccctggcacatgacctgcagagacaccaccggctcccagcatagagagctccactttgcccacacaccttgccctgctcccgtcgttgccttggcattcaacattcccccaaccaggagcacccttgcctgttttcttggcctgaccaattcctactcacattttagggttttcctccagttcgaatcttcctctgcatctccttcaggaagagttttcatgcccctctggagtccagaatgtttaattccagtgcctggtgccagccctagagccaacactcagccaacaggaactgagtgaataaatgacagtcagcttctatttgtgagaactgatgttgaccaagttgaattgtaattgtttgagtaacttttcaaaattaatcatcgggtaatgccaagcaaagaaacagaaagggagattcacactgcgctatgccattaagtaaccctctttccaggtggctgctcacatccccagggagaaaactgacttttgattacctgttagtgtaagtgctttctacgtgttgtcttgtgtactcctgtgatacagaagctctaccattcccattttatacattcagagaggtcaaataactcgcctgaggtcacacagccaggacctggaactgaagttcggcagcccccatacccttgatctttccccatgcttagctatccaccagacacaagagaaactgctgtgcagttgctctgtgctctctgcatcaacccagtagcaaccgcagagccacactccttttctgaagcttaggggattttatctgtgagagctgggaagtagctctggggaacattggagggtcagcttcctgatcatttaaagattcgaatgtccaaagaatccagagaaaaagaacataatctctagtatcagaagcctggagattagttccactgtgttggtgagcagccttctagagtcttttttaagctataggcatcttgcctgacatacagtatctgatgactgctggcctagccacagacaaatctcagctcaaaaatcttccatcccacagtgaagtagatttcagtcattacccctttgtgccttgagtgggaggtggcggaagttcctactgcaaacaacactcagggagtgtcaccttaacttcatggcatctgggacccaggtttcaagccaggctcttttctctgtgtgctgaagaatgaagtactgccaatcacttctccctttgggggtgtcagcccctggagccgctgctccttaccatagctattggtggttggctttcctatgccaaggcaaaaatcaacaaaccccacgtttctgaccccggtttttggtgaaacacctgctgggtcttctcattacaaccaaataccagaccgatcgttccaaacacaggaattgacctttccttcacttggttcccaagaaggccaaaattgaaaaaggaaaatgcaatgagacctggtttttcaggcagaagggggaatggggcaaggcaggccagaaggccatagaatttgcagacaactgaacaatttgagtaaaagctattagtgacatgccattttcttcttgccaagaacagtcttcccttcataaatatctgcagggtcatgactgaagtaaacaggtggtttgtaataattgtatcccttttactctctggtgcagccaaagtgcttgataaataaatgagtgattataagccacacacttaagaagttagaaagaaaataagaaaaatgttcacagtattttctaggaatgtgtttggttttgattccatataaattttcatggtttttttctaattgtttttctaatcatggaaacattattttgaagtgaaaattaaactattttaaaataaggtgcttacaatgatttgcagcattcaaattgcctttaattctattcaaagcaggttacactctatttccttcaacaatccttttgaaaccattatgataattatatttggcataaaatgttcatatatgccttgataatacatgactttaaagacttaaaaataccaaaaaatggccgggcgtggtgcctcacacctgtaatcccagcactttgggaggccgaggtgggtgggtcacaaggtcaggagatcgagaccatcctggctaatatggtgaaaccccgtctctactaaaaaatacaaaaaaattagctgggtggtggtgggtgcctgtagtcccagctactcaggaggctgaggcaggagaatggcgtgaacctgggaggcagagcttgcagtgagctgag

SEQ ID NO: 317352 - DNA, 4001 bp, Homo sapiens
ttagatcagtgctgttatgtcctgtattacaggtgaggaaagaggggcagggagcgtggctggtgctgtctaggatggggactgaagtccaggtggcctggctgcagtgcccctctagtcaccactgcactgtcccctgctgacccgtcacctgagtgccgttgtccaagggcctgagactgccgacagccagacagatgtgcacacacgcttacatgcacatactgttccagtctgaggcgtcaaactacaggggctggtccaagcctcaggacaaggacctgcagacgtagagatgcaaggtttggcacagagaacagggcgcctgccttggtgttgtcctgccctgcagccccatctaaggacagccaccaccagtacagggccatagggcagaaacacctggatccctggcaaaggctgacaagctggcatgagccagggcaggagggatggctgtcctcagctggtcagggaatacaggccaagtggacaggggccaggtgctccggaaggcaccttctttgccatcatttgacatatttgtgagtgtgtgtgtgtgtgtgtgtgtgtgtgtgtgtgttgtaggcgccaggccctgacaaagctgtgggggtgcaacagtgaagaagacatatggatccatggttcagggacccatatcagtcaaatcccgtctggaagggaatgcgggtctcttgatggccacttacctgctctgccagtctcgtttgtctcctctagtgccaccagccacgagatagagctttggggctttgagccaagtgatatcagctttacctccagggccagtcccctcagctgtaggagtctgagcaagtgacttgacttttctggggctcagcttgcccacctgtgaaatgggatcttaatagcagcactggccacatatgttgttgaggagcctgctgcagaggaggtgctccgtagaggctgctgatcacatgcgggggcaagagggaacatttataagccttggggatgggtgctgccaattgaaatgtagtaccagaatatttttctgcagtgagaggagcttgagctgaatggggatccctgatggaacagaatcacatttcagatgaaacgcctgttctctatcactctttctctttaaacctatcctctgagtctcggcacagataccacttcttctgagcccctgggctgtgctgggcatcgtttctgtgctctgtgccttctttgctcccagccccgatgaccttagaggacacaaactcctccctggtctgcaccccatcagattgggagcacctggtgtgaagtgcccctgccagaggctggtgaagggcaggtgggggccatcttctcctgcctcagctgtgctccccggagccccctgcctgtgtggcccgcctgtgccctccacccgctccccactcactgcacgggcagagggtgcccactgaccgacggtgctgctgcccgtgccatgccctggggagggtgagaagagggacaccaccatgcaagtgcggggcagggcagcctgccaccatagcctcattccatgtacacacccagtctaccagagacgctgttggcccagtcagctggggcttggagagagcatgccaaagtcacacagatggagaagtgcaactcaaactgaggcctccctgcctcaaagccccagatcccccagctacacgctgccaggctggggctgagcactgtcacacggctgccacccaggcctgccttccccacagcccgccagccatgcagaaaagctgtccgtagttacctttcttctccttccacctggcaccccactcctcaggtggtcacactccagcagtgccctccctggccctggaggcccggcgtggctggtgtcatctgtgaggggaactaggcccagttccttggaattcctattttgtttccttgccatgggtctcagtgacccagctgatggctcagtccagggaccccagactctgccaaggcatttccgtgagtgaggaggcagagtccactggaaggagggcgggagttcctgacaggaagtgtggcaatttgatcatgcctgaacaggcaacggggcaacatttttttctctgctcctaagttattacagcaatgaaacagtccaaaaagggaaatctgtcctctccaggattgccacccagggggtggaattttttttttttttcttagcatctttttatttttctctggtaacaaagcctggagcagggtgactgccattaacctaggatacctccctaatgcttggaacagaatggagaggtggctgactttgactcagaagcctgcatacagctctgcccctgactcttccactttttttttttttttttgaccgaatcttgctctgttgcccgggctggagtgcactgatgcaatctctgctcactgcaacctccgcacctgggttcaagcaattctcctgcctcagcctcccaagtagctggaactataggcgtgtgccaccacgcctggctgatttttgtatttttagtagagactgtgtttcaccatgttggccaggctggtcttgacctccttacctcaggtgatctgcccacctcagcctcccaaagtgctggaattagaggcgtaagccaccatgtctggccaactcctccactttttaactgtgtgtcctcaggcaagtcactttattctctgagctgcaacttctaccactgcaaaatggaatattgaccccactctgactgtcctgcagacttattctgaagctcaaatagaaaacagccagccccaagtggcgtgctgtaaatgagtgtgggctctcctgtagcctagaacaaaggcgagggctgtgggtttggaagaaaaagaatttgcctcttagtcgttactctgtcctgctcattcagcactggctgaggggacatgtcctgtattccagccccaggctggctcaaggacagtactgagaaggcaagggcctcatgcacaccaggaggttgtgggaatcagttcatcacatggccatgttgcctcagacgccagagaagcaccttcaattttggctagaacagtttgctcccagaagcagagagcagtgcagagtctgggccagagccagggacaggcttggtgaatgcagaacgtccaggaggcaaggtagggctcagtccacaaaagagagatcgaaaagttagcaaagtacgtttagtaaaaagcacacaataaaataaaaggtgtggagtacggcagacattccaggaacctggaatgtgaaacgcacgtggaaacgtccggccctgacatgcacggtggtgggaatgtggctgctcaaagcaagtggggaatcaagacttccaaagaggaaaaccaccctcaggagttaggttggggatgtattgagcacgccagtcattcagtgcaatcgtccttctgtgtgttaatcagtcaggcatgccccgggagaagtggctgtttcttgaactggatttcagctatgcagcctggtttcctcattgagtggtgggcctagagcagcattctgatgtgcaaatccttaattataacatgacctaaaaaggcggaggattccccaggacagtgtggaggaggcaccacatcaatctcagctggatcttggagaccccgctggaagaggcggcttctgagcggacagagaaggatacggggtgagaggacaaggagccaaggcctgcaggcacagatgcctgcagtgtgtgggaggaagtgaaattgtcagtgaagcatggttggggcctgaagtacaggagatgggcagaggaggggcagggacagctgcatccctgtgcatggagggcccctctgcccctatgctgtcctgatagggactgcattttcatcatctcatttacccctcctcatcccattgctgtgactcccctctctataccctccctgtttcctcatctgtaacagtggggacctcaccagattttgctaaagctcaaattggatca

SEQ ID NO: 317353 - DNA, 4001 bp, Homo sapiens
acttaaagggcagtttagactaaatttaacagccactgtaatttcagtgtaaaatgccaaaattgcttggtcaatagaaacaattgtgttagaaacttacttggggattctggagtacagtataaacgtatgattcatttttctttttcttttctttttttttttttgagacaggtctcactctgtcacccaggctggagtgcactggcatgctcaaggctcactgcagcctcaatttcctgggctcaagcgatcctcccacctcagcctcctgagtacaggctaggattacaggcgcgcgtcaccaaaccaggctaattttttgtagagaggcagttttgccatgttgcccgggctggtcttggaactcctgggctgaagcgatccacccacctcagcgtcctaaggtttacaatcttcctgaggattagcagcatgagccactgcacccagccgatgattcattctgtccataagggaacctggcagtatattgccaatatggaaaaactcaacagttacacttttctatcactaccaaaaaagccctgggaatagtgctgttaaaatttatccgtttgaaattctaagattcagctttacatttattgcaaataaaagatacgaatatattctaatttatatccacagcatagttactatagcttatattacataaaatctcgaatgactgcaacttccgacttctttcaggaggtcacgaacatgttacaggttttttcaaacctatgtttttacagacagctcactatgttgccaaggctagcctagaactattgggctcaaaagatctgcctgcctcagtctcccgagtagctggactacaggagcgcaccaccacacctggcttcgaacatgaatgtttcggtaaatactctctgcatcccaagaatggagggattaggttaagggtggacttagttctgtcttctccctcagagatcctatcagttctcagtgtcaagcaatgtgtgtcaagctacggcaaaaacgaaggtaagcctgattagttcaatgttattttggaaactctcaaaccatttaaatttgagtcagaaaagaatgttgagagagacgaaaattctcttcaaccacctttttttctgggttaccactacaactgccaccttttcaccaaaaagactgctcagccgaactgaagagtttctttgtttttcggacccaaactgggttcattcaatgattgtcggatactttcgtacttcttccaaaagatccgtagtgagtagcacccctccttccttttagaaaatttaagaaaataagttgggagagtaagaaaaagaaggccaagaaaatctcaaccaagtgctaaatgaaggtgcgctggaaagctccaaagaccctggaactttgcggagtccgcaatttccaaccgcggaggtgagtaaccgcgggacaccgcgatgcgcacgtaacattttgtttggtacaaagcggtaggcttcagaggtgcaatccggcccgcgaggtgcccacaagttcccgcgggggccatgctagggctgcagaaggcatcagagtcagagacctgtcaggacccccgcgggctgcgcaggctgaactggaaaggcggaggccagaaaggaaggttctgaggttggcgaaaggcaagtgggcgaattgccccaggcgaggcgccgagcccagcctggccctccagttcggcttctacggagccagcggccagcgcgggacactcaccctggcggtcgctgggattacaggccgccgccctgcatcgcagacggagccggcacagggaggaccagctacatctgtgggccgcggcggcggccaagccgggtaacatcctggtggggcagaggcccctactcggacaccgccttctgcctccgcgccgccaccggtaccaactgactccatagactggacatcagcgaacaccgatggcttcgccgccacaagctgcctgggtgacccggaaacggcaacgtcatttagcgacgcctgccgtggaggtagcggaagtgacgtaacacgttgagcaccaatagggaggccttccttcccggggacccagactcccaaagtggggagggcgtggctgcaggggaagtttggtgtctgccgtcttcttttgcacctgtacttttgcgcttggttggaaatcacgtaaactgtttacatcttgttcagccaggaaagctgtcctttgggagttctacttattcctttttttctggactcgaaaccggggccgtggtttcggaaatgggaggaaagatgggaaggatggacgcaggttttctgagcctctctacctagagcctgccaggataaacccaaattagaaccaacatgtccagtactctccgaacgtctgccacgtacatcgttctccttgttaacaccagtgtgtatccagtatcataaaggcaagtacacacttcggaatcagctacttgccctactaatctgtgaacctcagatttttgcctgcaatataagaggttttatgttcatgacaagttagggtaaacggaggtatgcagacttcgaaacattttggtcccagggagaaagaaacctgaacagtatccacgttaactgtttctctctgccatgctcattcagctcttaactcaaactcaagagaggccttccttgaccaccctagctatggtagtcctggtcattctctacccggctgtcctatatacttttcttcaaaacgcttatcactatttgagatttttttttctattttgtgtcctagaatagaaaataagcatcatgatgctggaatcttgtctattttgtacatggctgtataaagccgctaaaacaatgcctggcaaaaataaattgaatggaatgtatggtggtttgttttaaagttaatctgagtcgcttatctatattactgcaaaataactatctcggggaaatttagtatgtccttaatttttaaaaaaatcaacaagtctcttatactaattgagataagtataaccaaatgaggaaagagattatcgttaagaatggtaagcaaatttaatttcctatgacaaacataacttaaaatattcagtggacaaacattaaaaaatgatgtcccataaatgtaggctcaatattactaaaaaatctgaatattactggaaagttactttccctttcttgtaatagattttaatagaaattcaactttatgaagtaaaaatacataaaggcttacctcttattttatggtaactatgcaaacatctattaacttttatggataattctttttgaacaaaactaatctcatattttggattcttaaaatggctttggtttcaactcgttttaggcaagcctgatcaaaacttctcaggttttatttttaatttgtgcgataggattattatttttattttgtttagctgtactaatcatttttagaagaaaatgttcctttcttgataaaacttttaaaaaaaatacattttgtgcagagttcttaatttccataacagcccacctgatgtgtaaaatatgttggtgcacagtaaaatttcacagtgtgtgctttcctgtccttctttttcctggtatagttggggtgtaacttgacttagacactactaattgttataaacctccagtacccttgatttgccaaataagtttgaagaacaaagtgtatcattttctgttaccttaactctcacaatgctgtatcacataataaagcctcaacagacttggattaaaataactctgcagttgtcttggtatttatacctacatatcatgatatacttatccttttggaaagtctttgaaacttccccaagtgctaaaacttaagataatgtcagttttagagttccttaggggaatttcctttgaccctaaatcccatccttaccaagagactttgtttttatgctccatttgagacacattcagcgttgcctacctatacataacaggtaagattctagtat

SEQ ID NO: 317354 - DNA, 4001 bp, Homo sapiens
tgagaccagcttagacaacatagtgagaccctgtccctacattactgctaataataatctcttcaaggacacaatggtggtagtgatgagaggagtcaaggaagcaattggcctgggcctcacattgatagataacttgagtttacatttttgatgtggcacactaataaactttaaacttgggccatatcaccaaaccacaccctcaccatgcactatcaatttgtatttatgatatcttaaaataaatcctgtaaataacttgtaactatatcagttgtgctgcattgtattggggggggaggttaaagcagttaaatttgtaaatataaacatcttaaaaataccgcaatctttttatagccctctttttgtacctttgcattttaaaaattcactgagatgaataaattccctgggatgtcctgattgctccctgcggtccccagaatggaagtgggggtgtgggtgaggatggaggagtggaagatgcctgaaactggttactaaagcccagtttattccaaagcactctgattctgtgaggctgttttcctcattgcattgaattcgggctatttttttgtcccctttgtgtctaacagcaacaatcagaagcccatcctcataccacaggggacttgcttcattgagacagttgagcaatttggggagttttggatggggcaatttgtttagcatccaaaccttttacaaagcacgcctttcttatcacccattccccaaattacaaaagcagagaagatcatgatcagcgggcatgggacaaaagaggcaatcttttttatttttgtttttctttaacaatctgaaacaacggccactcctacaagcacagttttccaagaatacccaacccaggacaagttaaagaactgccagcacacaagggaagaaggaaaaaggaaagaacgacaaggcccagagcgatcagggctaacacagaaaccccctggggcacccaaacaggaagaggggactcgagtgatgaaatccacaagctgcttccatgaaatcaacatgtttgaaaaagggacctcctcaaagaaaacgagattccaactctcttcagcgcagtgcgagccaccggtggcaggcaccgttgcagggaacctgaactaactccatgccatgcagcccccaactttctggcctgaggatgcgcagtccccgaacccaaccactcctgtgcacatctccttgtaagttatctccccagcctgctcacccatttgtggcttggaaaacataaattgcgggctttgctccccaagacggctgaaggacggacccttcgctgatggccacgggccctaatagaaacaaactaagactgtctcctaggcaccttaaataactgcaaacaagcactgtaccacgtggaagtcacacttgggtggggggcagtgtcacatcaccaggcagccaccacaaacctagaattttcatggtcctgagatgtcgcattccccttcttataaagaatggaagacggcagcccaggggctcacagggactagcgttgtcacatggctagttggtgacccagccacaaagagcctagctatcctgattcctaggtggagatttctatcccctgggcctttcctcttccaaaccacgactctcaaaacagtgatcattttagaatccacaagtgtggctgattaataacactgtcgatcgtaagagtgtagcagcaaaagctgtaataaaagcaataaccgtaacattaagaagaaaacaacttgaacattgtggagagctttgtgtttttcacttctgcggcccaaagccagccaagttccttgaagtcagcaccgagaggtatttgcaagaattaagtgaatcaaagtccttgaaagagcgaggaagcgcccctgccccggcggcggtactcaccagcgctccctccgcaggtgctgggctggaggcggcggccaggtggagcgcagcgccccgggtatatatggcgaaggtgttgcgcaaagaggctggccgctgtcatcacgcccctcgcacattccaggaccgcctgccgcagccgccgccggggcactgcctacctgccgccttaatgaacccatcgcgacttcgcccgctgcgcggagaagacgcgcggccagccaggctgccgagagaaaagctccgacgggccccgccgcgcgaactggcccgaacggccccaaacggccccgcgcccctcggcgccccgcgcgccctagcctggctggtgcgcgccctctcccgccccgactcggtccgcacgagattcccgcaagtggggctctcccgcccctgccttctcctcaagaacttgaaccttctagtctagctcctgtgaggctcaagaggtcagagacgtgaagacacagataaaagccagttggaaagtcagggataaagcccttggaaacaaagcctggattgttcacctttatcagtctgtggggcgctttctgccctgggagtctgggctctaggtccgcaatgggaaaggctgggaccgtcaagctgaggaaaaggaagggggctgttctcaccactccgtcctaagcctgctgcgggtttggcaaaccactgcgctcgtttcacatcctgctctgcctcgtgtcacctgcgtgtgtatacaacagttctccaaactgctgtgagataggatctgtcccagggagagtccacccccatgcttatcccaacagctccccagttctgtgccgggcactgctgggcaggctttgtctccaatgtgcacacgaaagccttccctggggctaagactggcgccctctctagctgaggtttaaggggttaggggatatgatacaattacccaggatttgctgagcaggaagaaaacctgcttcttattctgaaacccagaccctctcctctgctgcgcactctcctggttttatagtggagcacagtgaggctcagtgagcttactagttgcccagctcctcacaacagcggaagcaccctactggaattagctggtttcattccaacatcgagttctctccactgtgcaaggggaaggactcgggagcacgacttccaggagcctagagctctggggctggtgttggcggtggctaagcacactgactctgggccgaaactccgggaaatcagttccctgttctgccccttgctttccctggctccatttgcttatgtgcaaactgggaataatggtccccgttggagtaaagtgagctaaaatatgtaaagaatgtggaatggtacttggcacataaatagtattcagtgcgagttaaccatgatcgttttcacagggaaactctggtgttgggagaagatgggtgggaagccttgattagactcatctagaaccttcactggagaaatcaaatctgcttgggttgctgttattacagggatgatggttttgctagtgggtgttggccttcagatccaactctcagacaatgatcaaccagtacctttgcaacaagcagcttctaaagcatagtccactgatgacaggaatcccctggcacctgttcaccaagctcagctctgcctccagccctgggcaaggcggactgcagacaccacttggctttacaatgaggaagggctctactgccagggtgcagaggaggaagcgtgctgcacacactgctgtcggtgaactcgacccggattcggcaaagcctggctcttagttcatgtcctgctctgccctgtgcttgggggttcacaggagcaggtcttaacaggacagtcacctcaatgagaatcccctcctgactgtgggctttcatttgggacacagacctaattgcctttccattactttcaacaaggagtgaatgtaggagggagaccaaaatttcaaaaacttggagaaagaaaaaggtatcccttttgtgttccgattaaaaaggcaaaacaggttcaatcccgaacattgttctcttaatgtgtatagatcttggtagtagatcagg

SEQ ID NO: 317355 - DNA, 4001 bp, Homo sapiens
ccaaccaagacctgttcctgggccccttgtgcccagagcagcagtcaaggccatctgaagaaatggggagaggaggaagcccagggcagtggtcctgtgaggaaccagaacatggacacacagtctcccatcagaatggcagccttcacaagcacagggactagagtatggccattgtatccccagcacataggacagtgctgggcacatggtagccaagtagtgtttattaaagactttgtgcctggcacttgcaaattggtgcacaaatttactcacagcatttcatgtatctatgtaaacttagagtctcctttaaaatgaacagtatcctcattctatagagggaaaaactgagccacagagaggttaatggcttcaaatcacataggcaccacaacactgcagagataatttcaacctcatgcaggccagtgttctcgggatgcccaggaaaactttcttgtactttgaaagaatgactctgtgcttcaaaaattcccaagagggtgacgtctccttttcctctgcttcccttacagccatcacaaggaaaaataatcacccctataggctaagggtggtggctcacacctataatcccagcactttgggaggccaaagtgggagagtcccttgaacctgtgagtttgagaccagcttagacaacatagtgagaccctgtccctacattactgctaataataatctcttcaaggacacaatggtggtagtgatgagaggagtcaaggaagcaattggcctgggcctcacattgatagataacttgagtttacatttttgatgtggcacactaataaactttaaacttgggccatatcaccaaaccacaccctcaccatgcactatcaatttgtatttatgatatcttaaaataaatcctgtaaataacttgtaactatatcagttgtgctgcattgtattggggggggaggttaaagcagttaaatttgtaaatataaacatcttaaaaataccgcaatctttttatagccctctttttgtacctttgcattttaaaaattcactgagatgaataaattccctgggatgtcctgattgctccctgcggtccccagaatggaagtgggggtgtgggtgaggatggaggagtggaagatgcctgaaactggttactaaagcccagtttattccaaagcactctgattctgtgaggctgttttcctcattgcattgaattcgggctatttttttgtcccctttgtgtctaacagcaacaatcagaagcccatcctcataccacaggggacttgcttcattgagacagttgagcaatttggggagttttggatggggcaatttgtttagcatccaaaccttttacaaagcacgcctttcttatcacccattccccaaattacaaaagcagagaagatcatgatcagcgggcatgggacaaaagaggcaatcttttttatttttgtttttctttaacaatctgaaacaacggccactcctacaagcacagttttccaagaatacccaacccaggacaagttaaagaactgccagcacacaagggaagaaggaaaaaggaaagaacgacaaggcccagagcgatcagggctaacacagaaaccccctggggcacccaaacaggaagaggggactcgagtgatgaaatccacaagctgcttccatgaaatcaacatgtttgaaaaagggacctcctcaaagaaaacgagattccaactctcttcagcgcagtgcgagccaccggtggcaggcaccgttgcagggaacctgaactaactccatgccatgcagcccccaactttctggcctgaggatgcgcagtccccgaacccaaccactcctgtgcacatctccttgtaagttatctccccagcctgctcacccatttgtggcttggaaaacataaattgcgggctttgctccccaagacggctgaaggacggacccttcgctgatggccacgggccctaatagaaacaaactaagactgtctcctaggcaccttaaataactgcaaacaagcactgtaccacgtggaagtcacacttgggtggggggcagtgtcacatcaccaggcagccaccacaaacctagaattttcatggtcctgagatgtcgcattccccttcttataaagaatggaagacggcagcccaggggctcacagggactagcgttgtcacatggctagttggtgacccagccacaaagagcctagctatcctgattcctaggtggagatttctatcccctgggcctttcctcttccaaaccacgactctcaaaacagtgatcattttagaatccacaagtgtggctgattaataacactgtcgatcgtaagagtgtagcagcaaaagctgtaataaaagcaataaccgtaacattaagaagaaaacaacttgaacattgtggagagctttgtgtttttcacttctgcggcccaaagccagccaagttccttgaagtcagcaccgagaggtatttgcaagaattaagtgaatcaaagtccttgaaagagcgaggaagcgcccctgccccggcggcggtactcaccagcgctccctccgcaggtgctgggctggaggcggcggccaggtggagcgcagcgccccgggtatatatggcgaaggtgttgcgcaaagaggctggccgctgtcatcacgcccctcgcacattccaggaccgcctgccgcagccgccgccggggcactgcctacctgccgccttaatgaacccatcgcgacttcgcccgctgcgcggagaagacgcgcggccagccaggctgccgagagaaaagctccgacgggccccgccgcgcgaactggcccgaacggccccaaacggccccgcgcccctcggcgccccgcgcgccctagcctggctggtgcgcgccctctcccgccccgactcggtccgcacgagattcccgcaagtggggctctcccgcccctgccttctcctcaagaacttgaaccttctagtctagctcctgtgaggctcaagaggtcagagacgtgaagacacagataaaagccagttggaaagtcagggataaagcccttggaaacaaagcctggattgttcacctttatcagtctgtggggcgctttctgccctgggagtctgggctctaggtccgcaatgggaaaggctgggaccgtcaagctgaggaaaaggaagggggctgttctcaccactccgtcctaagcctgctgcgggtttggcaaaccactgcgctcgtttcacatcctgctctgcctcgtgtcacctgcgtgtgtatacaacagttctccaaactgctgtgagataggatctgtcccagggagagtccacccccatgcttatcccaacagctccccagttctgtgccgggcactgctgggcaggctttgtctccaatgtgcacacgaaagccttccctggggctaagactggcgccctctctagctgaggtttaaggggttaggggatatgatacaattacccaggatttgctgagcaggaagaaaacctgcttcttattctgaaacccagaccctctcctctgctgcgcactctcctggttttatagtggagcacagtgaggctcagtgagcttactagttgcccagctcctcacaacagcggaagcaccctactggaattagctggtttcattccaacatcgagttctctccactgtgcaaggggaaggactcgggagcacgacttccaggagcctagagctctggggctggtgttggcggtggctaagcacactgactctgggccgaaactccgggaaatcagttccctgttctgccccttgctttccctggctccatttgcttatgtgcaaactgggaataatggtccccgttggagtaaagtgagctaaaatatgtaaagaatgtggaatggtacttggcacataaatagtattcagtgcgagttaaccatgatcgttttcacagggaaactctggtgttgggagaagatgg

SEQ ID NO: 317356 - DNA, 4001 bp, Homo sapiens
tccaatatcagctgtcagtgggacaggagtaaaggaaaacaagtcaaagcactgagttaactgagttttaaaagacggagagcagttttggaaggatgcagaaactacactttgtctacttaacaattttaagaactacccaatcacagagtatttattatagaaataattaggaataatttgattttatgtttacaaagaggtatgatgtttaactgctcctacgtagtttgaagcttgttcttaaacccaaggtattgccaaatgcctagtagtaccctgtttattactgaaaaaatttttttaatcattttggataaatactagaatcaaatatttgacctgacatatgacaaggaactaacaatataagcctagtctaccaccatctggatgaccaaattagaatcttagtctcaaggccgcccctgtttcagccctgaatgcctcatgtaatgtacacaggagccagaactacattatatctcgttttcaaatagcactggttacgcaccgggcaactgttaaccagggtggcatgtgataatcttccttgctaaccttgtaggaagtgtgcgagccgttatctttctggcaagatttaagtaactcattcctatctaaaaagcatctgttaaagtggcgtcacaccctcaactacttcataaagttttctataaaatgttaaaatcaccagagtcggacctctcagttcatcaggcgtaaaactgcagtttccggctgccaaatcccttaacaacgttaaccttttaatccttcagcctcgtctagtgaaaagcaagtgtcaccagataccgccttctacttgagaaatataacaagattctttctcctgcacttttcccaaataaaaacggctcatatacaaagtgaagtctagggacacccacagtacggagggctgcccggacctggcggccttacctggttgaagtgcagctggccaggctccgggacgcccacgcgggaggcggctcccatctgctccagcaagtgctggagctgcgccgccgacaggctcagattcgcgccgaacacgctcagcacatcctcgctgaaggctagccctggcccctccgccactcctccgaggccggcggccgccagcaacaggagcccggccaccgcgcgacccggggccatcctggcctgggcttccccttgagggcccgcgacgggctgccgcgcagagggacgcgcgcgggcgcactggcgtccttgcccaagggcgggagcgtcagtgctcggcgctgctccgagtcagaggtggcgcgggacgcccctggttctccgacgccttcgaaagaacagcagctcgcgacctgcggggcattgaagtggcagcgtagccgaggggagcgataggcggagtgggccccccggcctcctggagagcctgagataaagaggacaaagggggacagagataaaggccaccagggcaccagccggcaggctccagaaacgctgcgtggcagtagccctcaaacgcccggccgggcatggggccagacgccccggatccgggtttgcaaacgccccaggatttgcgtacatatgctcctcccggatataaagccccaaaccacgccacttcttaggaaaaactaaaaccacactaactgtagaactccacctcctcttcctgtctttctgctttattctctccgccgcaaacttagaagtgagacgtgcagtccccaaggagctgcagaaaagggctcttccggagtcctggggattgcgcgtttaaaggggaccctccctctccccggatcttctctgagcttggcaagttaatcggaagcactcgctggcctctcacctctcctatctgtttgtttgtctgtctctgcgtctttctctctgcgtgtcaacgtaagactcggtctctggatctctctctctttctgtctcccgcccccacaacctctgtatctctgacaggtccgcggtgaaactccgcgatccgctccggcgctctttacaaataaggggaggagggccctgtccccgcctccgtagcacgtggtgacccatttccccagcctgaactcccgcgcgcgtccacgccggggcgcaggaccgccggccttccctccgcgggcgctgctcattcccagcatcagccatgccctcttccccaccctcactcctgagggttacctgatgccacctccgtgtcggggtccctaactcctctctggtctcggggacgcatgcatcttttcgtgatcttgatgaaaccaacttgctgaaatggagcctggagacccttgcattgtctacataattaacaggaattgcttttttttctcacttcttaaaatcagaggagaaagaggaaatccaatggtagcggtggcgggctagctgagccagcactgcccaagccggcccttcctggcgggatatccgcagatcagaggaatgtttatttgttcatatgggagctcaagaaaagctgacttaggtgtgatgtcaacaggtttgtgtaaagtgagtgtggtgtttgaggcaaagtttgtatctggtggatatagtggttcaagtgtaaagtgaaaccatgcttcactgttagatggctgtgaaaggaaaataaatcttgagacttcaaaatcaccaagctaaagggaaacatcaagaagggaccagcttagggcaaacctgcctgccattctattcaaattcatccctctgaggctcacctgagacaaatgcatatctgattgctttctcttctccatcgtttatgcaaaaaatgcagattcactgggccagactaaactgtctattgagtggaaggctgatcatggcctcaaaagaatgcaaccttttgtctcttgtctattatacttctaacctggaagcccccacttccaattgtctcaccttactggactgaaccaatgtacatcttacacatattgattgatgtctcatgtctctctaaaatatataaaagcaaactgtacccccgaccaccttgggcacatgtctcaggacttcctgaggctgtgtcaggggcacatccttaaccttgccaaaataaactttctaaattgactgagacctgtctcagacattttgcattcacgtgactaaggacaataaaaagaatacaagatgccgttcttgcctttcatcaggagaatgcacagcctcctaaaatagcacattttaaagagacattaagtctagacaaaggggaaaagatggggaaagggaaaaaatcttaatcttagaagaggaacctaaagacataactgcagaagaaagagacaggtagagaacattcccagaggctaaggatctaggcagacgaagctgaaggattgtcatatggaagaaggtttaactatattatatctaacttcagaggacagaaggcagcagtcatggggcaaagtcacccagaggaaggtttctgtggaattataaggcatggctgccttggaagatagtgatttctccatgatcaaaagtgattcaaatcaacagatcctgggtgaccgcctttagtaggtggtaggaggattcatgcctgaagggagatgaactaaatgatcttaatactgtgctctttccaattataaaatctacgtatttgttaataataatttacagaattatgttgatgctaaaagggcaaatatttcatctaagggccagaagtaagttaatatcacagttgtcctcttaaatcactcagctcgtgggactcttcaagcctttcattggattttaaaatatagtttgttgcctatttttcctttggacctccgtgatgcaaaatgatttttggaaattaatgaatgctctaaatggctaatctatacccagcaagttgtttatttccagcttttctaaaactaaatttgtccataaagtgttagattttaacaaatataaaaggtttttaaaaatacaaatcttggctgggcactgtggctcacgcctgtaatctcagcactttggga

SEQ ID NO: 317357 - DNA, 4001 bp, Homo sapiens
ttaattgtggtaagatatttctaacaaaaagatcaatctacgtataatgttattaacatggaatttatttgattacagtttccctaactgtaatctaaagtcatattcattaggaaacgccaaatttccaagagcagagtataatatgcagcatttcccaaacatcttggaccccaaaaacttcttgtaacaaactaacatcgtccaaaaatgacaaacgatatggaaaataccgtattctaccctccaatatcagctgtcagtgggacaggagtaaaggaaaacaagtcaaagcactgagttaactgagttttaaaagacggagagcagttttggaaggatgcagaaactacactttgtctacttaacaattttaagaactacccaatcacagagtatttattatagaaataattaggaataatttgattttatgtttacaaagaggtatgatgtttaactgctcctacgtagtttgaagcttgttcttaaacccaaggtattgccaaatgcctagtagtaccctgtttattactgaaaaaatttttttaatcattttggataaatactagaatcaaatatttgacctgacatatgacaaggaactaacaatataagcctagtctaccaccatctggatgaccaaattagaatcttagtctcaaggccgcccctgtttcagccctgaatgcctcatgtaatgtacacaggagccagaactacattatatctcgttttcaaatagcactggttacgcaccgggcaactgttaaccagggtggcatgtgataatcttccttgctaaccttgtaggaagtgtgcgagccgttatctttctggcaagatttaagtaactcattcctatctaaaaagcatctgttaaagtggcgtcacaccctcaactacttcataaagttttctataaaatgttaaaatcaccagagtcggacctctcagttcatcaggcgtaaaactgcagtttccggctgccaaatcccttaacaacgttaaccttttaatccttcagcctcgtctagtgaaaagcaagtgtcaccagataccgccttctacttgagaaatataacaagattctttctcctgcacttttcccaaataaaaacggctcatatacaaagtgaagtctagggacacccacagtacggagggctgcccggacctggcggccttacctggttgaagtgcagctggccaggctccgggacgcccacgcgggaggcggctcccatctgctccagcaagtgctggagctgcgccgccgacaggctcagattcgcgccgaacacgctcagcacatcctcgctgaaggctagccctggcccctccgccactcctccgaggccggcggccgccagcaacaggagcccggccaccgcgcgacccggggccatcctggcctgggcttccccttgagggcccgcgacgggctgccgcgcagagggacgcgcgcgggcgcactggcgtccttgcccaagggcgggagcgtcagtgctcggcgctgctccgagtcagaggtggcgcgggacgcccctggttctccgacgccttcgaaagaacagcagctcgcgacctgcggggcattgaagtggcagcgtagccgaggggagcgataggcggagtgggccccccggcctcctggagagcctgagataaagaggacaaagggggacagagataaaggccaccagggcaccagccggcaggctccagaaacgctgcgtggcagtagccctcaaacgcccggccgggcatggggccagacgccccggatccgggtttgcaaacgccccaggatttgcgtacatatgctcctcccggatataaagccccaaaccacgccacttcttaggaaaaactaaaaccacactaactgtagaactccacctcctcttcctgtctttctgctttattctctccgccgcaaacttagaagtgagacgtgcagtccccaaggagctgcagaaaagggctcttccggagtcctggggattgcgcgtttaaaggggaccctccctctccccggatcttctctgagcttggcaagttaatcggaagcactcgctggcctctcacctctcctatctgtttgtttgtctgtctctgcgtctttctctctgcgtgtcaacgtaagactcggtctctggatctctctctctttctgtctcccgcccccacaacctctgtatctctgacaggtccgcggtgaaactccgcgatccgctccggcgctctttacaaataaggggaggagggccctgtccccgcctccgtagcacgtggtgacccatttccccagcctgaactcccgcgcgcgtccacgccggggcgcaggaccgccggccttccctccgcgggcgctgctcattcccagcatcagccatgccctcttccccaccctcactcctgagggttacctgatgccacctccgtgtcggggtccctaactcctctctggtctcggggacgcatgcatcttttcgtgatcttgatgaaaccaacttgctgaaatggagcctggagacccttgcattgtctacataattaacaggaattgcttttttttctcacttcttaaaatcagaggagaaagaggaaatccaatggtagcggtggcgggctagctgagccagcactgcccaagccggcccttcctggcgggatatccgcagatcagaggaatgtttatttgttcatatgggagctcaagaaaagctgacttaggtgtgatgtcaacaggtttgtgtaaagtgagtgtggtgtttgaggcaaagtttgtatctggtggatatagtggttcaagtgtaaagtgaaaccatgcttcactgttagatggctgtgaaaggaaaataaatcttgagacttcaaaatcaccaagctaaagggaaacatcaagaagggaccagcttagggcaaacctgcctgccattctattcaaattcatccctctgaggctcacctgagacaaatgcatatctgattgctttctcttctccatcgtttatgcaaaaaatgcagattcactgggccagactaaactgtctattgagtggaaggctgatcatggcctcaaaagaatgcaaccttttgtctcttgtctattatacttctaacctggaagcccccacttccaattgtctcaccttactggactgaaccaatgtacatcttacacatattgattgatgtctcatgtctctctaaaatatataaaagcaaactgtacccccgaccaccttgggcacatgtctcaggacttcctgaggctgtgtcaggggcacatccttaaccttgccaaaataaactttctaaattgactgagacctgtctcagacattttgcattcacgtgactaaggacaataaaaagaatacaagatgccgttcttgcctttcatcaggagaatgcacagcctcctaaaatagcacattttaaagagacattaagtctagacaaaggggaaaagatggggaaagggaaaaaatcttaatcttagaagaggaacctaaagacataactgcagaagaaagagacaggtagagaacattcccagaggctaaggatctaggcagacgaagctgaaggattgtcatatggaagaaggtttaactatattatatctaacttcagaggacagaaggcagcagtcatggggcaaagtcacccagaggaaggtttctgtggaattataaggcatggctgccttggaagatagtgatttctccatgatcaaaagtgattcaaatcaacagatcctgggtgaccgcctttagtaggtggtaggaggattcatgcctgaagggagatgaactaaatgatcttaatactgtgctctttccaattataaaatctacgtatttgttaataataatttacagaattatgttgatgctaaaagggcaaatatttcatctaagggccagaagtaagttaatatcacagttgtcctcttaaatcactcagctcgtgggactcttcaagccttt

SEQ ID NO: 317358 - DNA, 4001 bp, Homo sapiens
tgtgcaccctgactcttaagttatgtgggccaatgaattccctttcggcttaagctaattaaagttgattttttttcactcttacaaataaaagagtactgatggatacataaagtaattatttaaaagtcacttttaaaagctagtgaatgaatgctacatcataacctataggaaaacaaaaagataagcctttccactctttaaagcttccacacttcttcctgttctccacacacaggctgttttgtctgcttggttgtcttatcaagtggcacccattaaataatacaatacagtaagaccatctgatcctgtaccattataccaaggccttcacatcacaccagaaatgaaatatcatcccattcaaaagccaccccagaaatggtttcagattttgttttgcaatagattgagattctgtgggaggctgagtagctcacattcccaataaggaaagtgctaggtgtggttgtattctctctgtggaggtaaaggcagggagacacagatttttgtaatgcatttagactcaatgacaatcaactttaaataccattacaaagccccagagggagcaagcagcagaactggggttagaatccaagtctgaaagagctctgtctagcttcttttattttagtcacctctaccctgcgctgccctgccagtgattgctacagctgttgctattcagtaagaactacagctactttctgaaatttgccatgtatgcagctgtgatgaaagccatgaaacccatccttcccccaccccaagtaagtggcgatctcctgttctttaaagagatgcaacaagtaagaggtttaataagaatccacctataatcttcatctgttctgctcttatagaagcccattccacttctccttcattctcattcatttattcattaactgaacaggttgctcacaccttctctgagtcaggtattccagtaggtgttgagaataagacatggttttcatcttcaacaatctcatcattcagcatagaaaggagatacatataaaacagataagcaaataaaaatatgcacaacatatcatgtgattaaaggaatgaggtcagggaaggcttcctagaggaggagatacatgtgctaagtttgttattttgatgcatctgattcttggggaaataagacatgatacacaaaaaaattaatggagagatcagtaacgcaaatgagtatgcaattagttggtgaataaattttataagcaatagttatcataagagttctgggaagcatataaggactacagtaatagcaaaccataatatatgcttaacacgtataacctctttaatcaaccacttaaatagattttaggttaaatttggatgaagaaatcctgtctagaaaggtaaatttctaacggtacaagattaaacaatgtaaaagtgttaaagacagaattcagatatatgtgttctcatgccttttgacttgtaagccagtattctggctgctatgtcttggtccaacactgagaaggattcaatgaaagaatcattgagaccctggcagagaatgcactttgttgcccctaatagtgagttgaaacacacaattaaattaactgttaaaccatatttaggatcccactcagagacagacttcaaaaataaccctacaataagaaattacttaatggacacaatatgtattattcaggtgatggctacactaaaagcccagatttcaccactacccaatatattcatgtaacaaaactgcccttgtacttacatttatacaaataaaaaagtccggccagctgcagtggctcacacctgtaatcccagcactttgggaggccgaggcgggcagatcatgaggtcaagagatcaagaccatcctggccaacatggtgaaaccccgtctatactaaaaatataaaaattacctgagcgtgttggtgcatgcctgtaatcccagctactcggaaggctgaggcaggagaatcgcttgaacccagaaggcggaggctgcagtgagccgagatagtgccactacactccagcctggtgacaaaccaagactccggctcaagaaagaaaaaaaaaaatcctacagttcaaacatcagccaacttttctcaccagagtgagaattttaggtatacttcgctttctgcacttcatttcttttgctttttcataattttgtttagtttgcagctatgaacttaaaccatttttgcagttggctccaaaaatgctgtgaagacaagtgagagattcattcatttatttactcattcatacattcaacacatatttaccgagcactactgcatgccaggtacatagcaatattagtaatcatcttaataaatactaaagtagatatgaattccaggattccagaggtttctttcccattaaataatcattgggatacctaaaagtgttttgaatatggcaactggccaaagatcccaagagagcaattgaaatacatacatttaaaatggtagtttgaatttaacaattgggagaccacttctgacccttgaaacaagtgaaccgtcccattaatttatccttttagggctcactgaacaatggaattggtgacttacatgttccacactcacagcaggaacattcaaagcacgagtgactgaggaaattgcttccagatttgttcttcctgcaataatgaaactgcctcaattacaaggcactcaagtttcacttccaaatctccctgatatatacatacatacttatatatacatatatatatgtatacatatatacacacgctgaatctctctctccaccttctcttgaagttttcccctctttaaagtcctcttcaaagtttactcattattattctatcaagataaaagacagttttctaaggtttaagccaagaacactctataaaaataatctctaggtttaagaggtggccagtcaagtgaccccaactctgtttccccaagattaatttttccatttttcctcaggttttcttacacttcttactgaagtcactctggcactgatgccaccaacacacatgcactctcacatacatgcacactcacactcatatacacacacactcacatgcatacacatacatacacacacacttacgttcactctcaaaactctttttgaagggaagatgaagaacgcttttcctgaatatacaatttaaaggataaagatgccttgttttatgatgcactgctagggataaaaagattattatgaaacaatatatagagaatgctgctataaataaggataaatctgtgctccaaatgttaacagtgtttatctctgagtggtaaaattatgtgtggttttattttttttcctttctgcttctttatatctgccaaagtttttaacaatgtacttgtatttcagtttcttttaagaaaaataaaattaagtcatgttttgtttgtttaaaatctctttttccaggttcccctaaacaaaaggcaggctggaattcttagagattttactaaagaaaaagaaagaatgttgaaagctacaacaatctttttaaaagaggtttacaacattttctgtctttgtcatagtgatggacaagtttcccagccctaccccattccatattcagcttttcgaggtcttgtcttgaaaagagaaggtgttcttttagactcctaaaagtgtggtgtggtgtcagagcacagacacccaatctagatccttcgcttcccacccctgacatgtcttcagggggcagaggccaccctacttcccatcatctgctagggaatcccatgggcattatcccattttgccaagatcaaaagcctttgtttccttgatgtacaccaagggtttcccactcagtccttctgaggataaagtgtggagggcatgctgcttcttcaactcagggctggggagttgccacaagaaatgagtgcaccttggccgggtgcggtggctcacgcctgtaatcccag

SEQ ID NO: 317359 - DNA, 4001 bp, Homo sapiens
agagaccacctctgacatgccatggcatcagaaagttctacttttcttaagagccatatactttaattgtggtaagatatttctaacaaaaagatcaatctacgtataatgttattaacatggaatttatttgattacagtttccctaactgtaatctaaagtcatattcattaggaaacgccaaatttccaagagcagagtataatatgcagcatttcccaaacatcttggaccccaaaaacttcttgtaacaaactaacatcgtccaaaaatgacaaacgatatggaaaataccgtattctaccctccaatatcagctgtcagtgggacaggagtaaaggaaaacaagtcaaagcactgagttaactgagttttaaaagacggagagcagttttggaaggatgcagaaactacactttgtctacttaacaattttaagaactacccaatcacagagtatttattatagaaataattaggaataatttgattttatgtttacaaagaggtatgatgtttaactgctcctacgtagtttgaagcttgttcttaaacccaaggtattgccaaatgcctagtagtaccctgtttattactgaaaaaatttttttaatcattttggataaatactagaatcaaatatttgacctgacatatgacaaggaactaacaatataagcctagtctaccaccatctggatgaccaaattagaatcttagtctcaaggccgcccctgtttcagccctgaatgcctcatgtaatgtacacaggagccagaactacattatatctcgttttcaaatagcactggttacgcaccgggcaactgttaaccagggtggcatgtgataatcttccttgctaaccttgtaggaagtgtgcgagccgttatctttctggcaagatttaagtaactcattcctatctaaaaagcatctgttaaagtggcgtcacaccctcaactacttcataaagttttctataaaatgttaaaatcaccagagtcggacctctcagttcatcaggcgtaaaactgcagtttccggctgccaaatcccttaacaacgttaaccttttaatccttcagcctcgtctagtgaaaagcaagtgtcaccagataccgccttctacttgagaaatataacaagattctttctcctgcacttttcccaaataaaaacggctcatatacaaagtgaagtctagggacacccacagtacggagggctgcccggacctggcggccttacctggttgaagtgcagctggccaggctccgggacgcccacgcgggaggcggctcccatctgctccagcaagtgctggagctgcgccgccgacaggctcagattcgcgccgaacacgctcagcacatcctcgctgaaggctagccctggcccctccgccactcctccgaggccggcggccgccagcaacaggagcccggccaccgcgcgacccggggccatcctggcctgggcttccccttgagggcccgcgacgggctgccgcgcagagggacgcgcgcgggcgcactggcgtccttgcccaagggcgggagcgtcagtgctcggcgctgctccgagtcagaggtggcgcgggacgcccctggttctccgacgccttcgaaagaacagcagctcgcgacctgcggggcattgaagtggcagcgtagccgaggggagcgataggcggagtgggccccccggcctcctggagagcctgagataaagaggacaaagggggacagagataaaggccaccagggcaccagccggcaggctccagaaacgctgcgtggcagtagccctcaaacgcccggccgggcatggggccagacgccccggatccgggtttgcaaacgccccaggatttgcgtacatatgctcctcccggatataaagccccaaaccacgccacttcttaggaaaaactaaaaccacactaactgtagaactccacctcctcttcctgtctttctgctttattctctccgccgcaaacttagaagtgagacgtgcagtccccaaggagctgcagaaaagggctcttccggagtcctggggattgcgcgtttaaaggggaccctccctctccccggatcttctctgagcttggcaagttaatcggaagcactcgctggcctctcacctctcctatctgtttgtttgtctgtctctgcgtctttctctctgcgtgtcaacgtaagactcggtctctggatctctctctctttctgtctcccgcccccacaacctctgtatctctgacaggtccgcggtgaaactccgcgatccgctccggcgctctttacaaataaggggaggagggccctgtccccgcctccgtagcacgtggtgacccatttccccagcctgaactcccgcgcgcgtccacgccggggcgcaggaccgccggccttccctccgcgggcgctgctcattcccagcatcagccatgccctcttccccaccctcactcctgagggttacctgatgccacctccgtgtcggggtccctaactcctctctggtctcggggacgcatgcatcttttcgtgatcttgatgaaaccaacttgctgaaatggagcctggagacccttgcattgtctacataattaacaggaattgcttttttttctcacttcttaaaatcagaggagaaagaggaaatccaatggtagcggtggcgggctagctgagccagcactgcccaagccggcccttcctggcgggatatccgcagatcagaggaatgtttatttgttcatatgggagctcaagaaaagctgacttaggtgtgatgtcaacaggtttgtgtaaagtgagtgtggtgtttgaggcaaagtttgtatctggtggatatagtggttcaagtgtaaagtgaaaccatgcttcactgttagatggctgtgaaaggaaaataaatcttgagacttcaaaatcaccaagctaaagggaaacatcaagaagggaccagcttagggcaaacctgcctgccattctattcaaattcatccctctgaggctcacctgagacaaatgcatatctgattgctttctcttctccatcgtttatgcaaaaaatgcagattcactgggccagactaaactgtctattgagtggaaggctgatcatggcctcaaaagaatgcaaccttttgtctcttgtctattatacttctaacctggaagcccccacttccaattgtctcaccttactggactgaaccaatgtacatcttacacatattgattgatgtctcatgtctctctaaaatatataaaagcaaactgtacccccgaccaccttgggcacatgtctcaggacttcctgaggctgtgtcaggggcacatccttaaccttgccaaaataaactttctaaattgactgagacctgtctcagacattttgcattcacgtgactaaggacaataaaaagaatacaagatgccgttcttgcctttcatcaggagaatgcacagcctcctaaaatagcacattttaaagagacattaagtctagacaaaggggaaaagatggggaaagggaaaaaatcttaatcttagaagaggaacctaaagacataactgcagaagaaagagacaggtagagaacattcccagaggctaaggatctaggcagacgaagctgaaggattgtcatatggaagaaggtttaactatattatatctaacttcagaggacagaaggcagcagtcatggggcaaagtcacccagaggaaggtttctgtggaattataaggcatggctgccttggaagatagtgatttctccatgatcaaaagtgattcaaatcaacagatcctgggtgaccgcctttagtaggtggtaggaggattcatgcctgaagggagatgaactaaatgatcttaatactgtgctctttccaattataaaatctacgtatttgttaataataatttacagaattatgttgatgctaaaagggcaaatatttcatctaagggccaga

SEQ ID NO: 317360 - DNA, 4001 bp, Homo sapiens
gtcaatctcattgggtaaggtgtctaatgtatgtttttaagtctccagaaatgaccccaaaagagcaaatggcaccaaaaccctcattctgaagtacacttaaatccaaaatgttgggggtttcttagttttcagtttttttaacatggctgggactatcaaaatatcccatcttgtccttgtcacccccactcctacaaatgttctctgcctcaacagctcataatgtagtggtactgctttcctgtctccatctacatatatgagagtttctctgtcatcttacttgacagtgtgggatacagttaaaacaaatcattcaatttcaagatctaccacaaagaccagaatcctatcagtacttttaactttaaaatgaaagtaaaagttttttctcagctataaaagttatagaaaaataaacaggcacacttcctttgaatgaagttatactaatatcttcagtctaagtactaaaatgaccatgtaaattatttacatgctaatatgaaagacacaagaaagagagctgtagtcagaaacgttttcaaaagacatcacattggctataaaaagctactgaatattgttctaatggcattgacgaatctactgaaatcacaatgaaaaaaaaaagcccaaatgagcaatgtacactttaattaatttaattcaggtagtattacaactccaagtcccaagatacaagaaaaaagagaaatacagtacaacacagtgtctcttaggaaaggaactgctgcaggatttgagacaatgagcgtttagtacagcccagtgttcttgatttctcattaggagcaactttccagggcactgaagcgaaccaggaaaagaaatggggagggtaagccaaaggggtcgctgctcttcagtgtcaagttggaaagagcttgctgcgatcaattatgctgagaaggtagggccttgagagggaaggaaggatagaaaaaaacagttttacagggcgctgaaaaaagtgatagaagagaggtagaactgcttcctccatctttcacgtcaagttcaagtttttctttttgttctataagaacttttgtctttatggtgcttgctgcggtttgctgatgtagttcccaggtcctgccttcctctggtgacttattaacggactggcaacggctgagtaaaatgcacttaagaaaaaagaaatcacctctctttgccaagactcacatgctgcccagtacctgagggagagctccgttgtcgctggccaagagaaattccagtttaacctatgcctcccctagccaaatccattgcaaataaatgtgtgtgtgccacttgcagagaatctgcctgactcaccccccgcctttggcgtgccagggagagatgtaaatgctccgtcctggagctggcagtgaagtgggggccgcggcctcggtagcaccaagagtccccaaatctccccctgtgatgggtttagggatgtgttcctctcaagcaggtgcctggtcacagggcgaccacccaggctcacagcaacacacgtgtcactgagcccgagcccagcccgccgcagaactggccccgcagtcctcgtaaagacgcccagttgcgcgcaggggacttagcagtgagggagaagcagaccacccaaactcttcctctaaaccctaagaaggaaaaaaaatacttttccgcggaagcagcctccacacaccgcccgcgcccagctcaggggatgcccggcccgcaattgacctctctctccctcccaggagcgcgctgaggccgcctgcgcgccctacggaatcggcccccgggcccgcgcccgcctccgccttggagcgagggaccccatcgaccctcccggcagctgccggggccgggcgctcacctcctggggtctggcttccgtcgctcctccagtttggcggcggagtgtggggctgcagcggccactgccactgccgccgccgccgccgccttcgctgccaccgcggccgccgccgccaccgaagcgctgcccggcgcgccgccggggttggaggctggggggccgcggaatccctggaggcgcgagcccgggacgcggcggggccgagccgcgggaagttgtctgcgccgggcgcggagcgagcggggcgccagtcacccgcgcccaagtagtcacaactttgccgcctgggtgggtgcgcgctccggagagaggcgagcgcgggagagcggggcaaaggcgctggggcgggagggtcttcggagcaggcaggactgcaacctgaacggcccgcgaggaaaggggaaaggtggcgcggggggatgtctacacagcctgtgtggtgcgcggcgagcgagtgtgtaagagcgcgggcgtctactctactttgcctcctgcagctcctgcatatttatggggatctctgatgttcctgctagtaactaacactgcagcagtggagcccagcccaggcgcccctcgggagcaagccggggtgcgggggctcacggaaggcggccgcggcggaggctgtgccgcgagcgcgagcctgcgatccatatttaaagccgtaagtggcctcggccggccccctgccctgccctcgctcgtgcccgccagcccggcccccaccgctccgggccgctgctcggcgtcagccgcccgggcatcggcggcggggaggggcctcgagccgcgccgcctccgccgggggcttgggctctgtgcgcagcgcccgcccggagctggcggaggacccggctccggaccggccgctcttgcctcccaggttccttttctctcacgccctgggctgggtcctaggtccagctttttgtcctactcaaaagagttccccagtggggagagcctgtgctttcatgcagaactaaaattgcgtgagtttcccagctcagatcactcttgactctactttataaaacttggggcgtatagagtgctgccataacacagtattaagtaattgttcacctttaacaaaagatgtctgaagataacgtggttgtcaactgtgtccttcacttatgtcactgatgcctttctgtcttccttgggagttaggaaaacagccttagcaaagtgattatttgtatttattctgttcctaagtctaataatgaggttcaagtactctttgccaagcaaataatatatcagtgatccagcaccattgccattggtaaactattgaatcataagtaaaccattaagatatgaacagactgtcagcacagacacaccatctattgttctgggtactgctagagagtagtcacttaatggattgcaaccacatggtatatcatgcaagtgtatatcattttctagtaatacatattatatgtaatgtgtatgtggacatcactgaccaaactgtgttttcaacagtagccaccaaaatgcataaagctcaagagaaataatttaacataccaactgctcctggtccccagtatttcttcaatacaaagctatagcttataggacctccaagagaaaaaaaaaatgagggtagggaggaaataatttgaggacagaggcttttctttctagtattcaaaactggaagagatccagagatccatggtgcctcaccagtgcttggaaagcaggtatggagcctgtgtcttttaaaaagtttctatctttaaaatccttagttaatgctcagaaggcacaaggaaacacgccaatctgatgtctgaaattaaaatgtactgtcatgtgtctgttgtcacatctggctcacatatatgttcacacattctacataacccagtgcagtgatatatcactgggaatttttcatgggaaactcaaaaccaaagataaaacaaaaatttagctttaaagttttcacctaaatgattatgttctgtttctaggctaatgttaaaattaactttcactccctgagcaggcagttagcaagaatcagcaaccgcaaagtaagctaacaggcaaagggaagtcacttttgtattaaaaatttgcc

SEQ ID NO: 317361 - DNA, 4001 bp, Homo sapiens
tgatgacaatgagagaccaacaactgcattataatcaaagtctttgtattacataattgccttatgtcacagaagattcacctggagaatatctctgaatctgtatgtaaaagaaaagctctgttatgagattaatgaaaccccaggtatttgtgtaatgcttaacaatttacaaagcattttcatacatatacatatacacatgtatgtatatatgtgacattataaatacattgtatactatatttacatatatgttttatataccatacatatataatatgtaataggcattattatccactctttattgataatgagaccaaagctctaggaaatcgagtgtcttgtcactaagaggcaacagagtcaaagtaaactcgggcctctaaactccaaactcagatgaaccttctactttcagctggatatttaaaagattacaggtttatacttgaaatacagtagtccccttattcacaggggatacattccaagacccccagtgaattcctgaaggcatggatagtactaaaccctatgtatactatgtttttttcctgtatataaaacgtaataaagtttaatttgtaaattaggcacagtaagggactaacaacaataattaataataaaatagaataaatacaacaatatactgtaataacagttatataagtgtggcaactctctcaaaatatcttactgtactgtacagtgagtaaccgaaaccatgaaaagctaaactgtggataaccttggggggactaccataagagcaactttcctcattgttttaataatctcttttttatttcatttaattttttgaggcagggtttcaatctgtcacccagattgaagtgcagtaacatgatcagagatcactgcagcctcgacctcacaggctcaagtgagcctcctacttcagcctcctgagtagctgggaccacaggcatgcaccaccatgcccggctgatttttttttctttttttttttgtagagatggggtcccattatgttgcccaggctggtcttgaaccctaggctcaggcaatccacctgcctcggcctactaaaattctgtgattacaggcacaagccactgcacctggccaaaacccacctcttgacagggaatgagtaataagtcacacaaaatctcacaagagatcttggcatgtggacactgtggaaacatatctcttggctgtcatttttgggtacctgagtttattatctctctaaaatattttactattaaatagtatataaattgagctttatttctaattccttataaaagccaaaattatagcaacatggatcaatgaaacaatgccccaatagtgaaataagaggtgccctgcattcatgtcaacaaaaaagaaaagaagaaatagaattatttactccttatcccagccaacatcatgcccattggccattcaaagtgctaaggctaaagaacggcactccaggatcaagcatcttgccctgcccttgtttccctgggtcagtactacatacagtcagctatgcctcacctggctgtttccttccactccatctcctgcccatccacggccagcagctcatccagttccgtgaagagctgagggggagctgggctgtcatcctcctctcccaagatgaatcggatgcgttctgcagcaggagagactgcagaagtgaaaatactgtggttaaacattggctggacaaccctgaggaaagtggagctccgggctcttcctctctccccaaggttactgggcttcccttccacattttcagtggacatctttcctgctaagcctcccaaatccccaatctaaagccaaaaagaaatcaaagcccttctctattcctttggttctgaactgtatcttggttctccaccactctccagaaggacagcactccaattctgtgtgatgtgtcacaaagaacctttagccctcagatgagctgaggtctaaccactcacttcccctccttctccacttatgactcatccaaaattataagacaaaagccagcttgaaccagtcactttttcatacagcagtgggagggacaacaaagtaccccaatcctgagatcccccaagtccccgcctcccacccaccctccctctgtccaatgcctaaagctcatgccctcgcaggcttctccctgccaataactggctaactgcaaagttgatgaaggaatatttaacaagatgggccctcttctttacagaatggtagtacccaaaaatgtttagtcacacttcaatgcacttgaaaaacaagcccaagtaaaatattgtacacttgagggagagagaaaaaaaaaaaaaacattttccaacacactcaagcacataattgaatgccctactagctccttttgaccctatctcctgaaaatcatgcaatgaaaaattaactagaatttcccccaggtcatgggttactccctttcaaaaaaaaaaaaaagaagaagaagaagacgacgaaagaagaaagaagaagaagaagaaaagaaagagagagagagaaagaaaagcagttggaaattgatggtcatgttacaaatttaaggcccacaaatactcctcaaaatccctgggtaaaaccaacaatgttatatacatgtgaatgcagttcaagtacacacaaatatatttattatggatagacacacatacacacatgcatatataaatttgtagaaatatatgtacacaaatgacccaataaaaccaaaaatccctaccatctgaaaactattataatacaggacagaataaaattccatagatcaaaatttatttagtacaaataaacccatgaaaaatattcaacctaattaaaaatcgaaactaatcattaaaataaaatgtgtttcacctattaaaatgtcaaaaaatggcagggcgcggtggcttacacctgcgatcccaacactttgggaggccgaggcgggtggatcacctgaggtcaggagttcgagaccagcctggccaacatggtgaaaccctgtttctactaaaaaaatacaaaaaattagccaggcgtggtggcgtgtgcctgtattcccagctactcaagagggtgaggcaggaaaatggcttgaacctgggagacagaggttgcagtgagccgagatcatgccattgcactccagcctgggtgacaaagcaagaccctgtctataaattaattaattaattaattaattaaatgtcaaaaataaaaaaaaaaatgataatcccaacgtgggcaagggtttgggaatcatgcacccagcacttcttgatttatgttactggtaggagcctaaatggaaacatctctctaaagggaaatgcttgaaggacatgaaaatttctggtgggacatgaaaatttttaaatagtgtatatatcctgtgagccaacaattcttgtactagaaatacattcattctaaataaataagagttatctcaaaggtttagtgacagaggtgatcattctagcattgtttataactgagaaaacagaaaaatcctaaacatccataaaggaagattggttaaataaagtatggtacaactacacaatgaaataccactcaatcataaaatatgaagtcaaaatagctggacttttttgacatgtataccatataaaattaaaaataaaaataatacacattaaatgatcccattttagtaaagaaacaagaaatatatatttctataaaataaagctaggaattgaggcagccctcacggtgctcagtctgatatgtgtacatttcagtcaccacaatttagattaaataacatagtccctaacaatacagttcaaatttcagttaacatggtatattaatagtaatttcataaagtacaaactttgcagctagctcttcagtccataaatcactacgtaactaacatgtgtgcataatgatcattgaccaatcatggggtgtttctttaaaatatgtcagtgattgatcac

SEQ ID NO: 317362 - DNA, 4001 bp, Homo sapiens
aggtcaggagatcgagaccatcctggctaacatggtgaaaccccatctctactaaaaaatacgaaaaataagcccaacgtggtggcacacacctgtagtcccagctactcgggaggcttaggcaggagaattgcttgaacttgggaggcggaggttgcagtgagccgagatcacaccactgcactccagcctgggcaaagagcgagtctctgtctcaaaaaaaaaaaaaaaatggaatttgagttctctagatgagtgtcaaaccaatgatttaaaacatcacaaggcctgagtagaaagaatgaattgattggtacacatgggaacaggagttagtacttgttaattagtcctagagttagcgttagtacttgttagttagtgttagtcccagagttaagacaaagagcaactttaaagtacagaatctttcccaagaagagtaaataaatcctcatagcataaatcaaatttaatgtttgacagttcaccagtttttatcatctttacaacaaactcaggtagctctctagtaatttgcctactccataagggggcatttatttacctctttactattaattctcagatcaatagaagagacataaactttgaagaaaaattcataattatacttctgccagttcccttcagattaatttagtgaacaggtggacaaattctctgtgtccctggagaacaagtgaaatataatgaaaaaaacagatctgggcaagtacagaaaactaacgcccaactgaagttttaaaacttatattgcaaaagtgtatgggtattgagaagagatgaaaggttgaaaagtaatttgaaatatgctcaggccattgcaatataccccattatgatagggattgagttatgcgccatcatacatctctcccatgtcaaggacttttgaaaggatattaagaggtgacaagcacatgaacttaaaaaatatttttataaagactgccacccatttgtttggctaataaaaagtcagtaagacttctgctgaacactccgttctatgtctaaatagcccatgccaggttccacttcacaggtgtctcattcagcatgccagctgccagaatgcccaagctaagtgtacaactgcccggcacagaaagtgtgcatgttttttactgggtcatgaaagttagcctttgctctcatcaccacagagaaaagtcagaagatagcctgtcttagtcaggaaaagaaagtacagcctgtaggaagcaatttgagggtgttccagatcacaccaacagcggatgctgcatctgggtagttcacgtacccgaacaaaaattttaaaaatttggtgtggcctttgccatccattcactcctcaaaaactaccatttgctttcccagaaagcaagctttccagccccacagccacgcccccacgagagaaaaagtcgcactcaccaaatagtgacaggaccccacacaccgtccagatggtcagagacatgcccacgctgcccgtgttctggagcacgcccttaggagagatgaagattcctgctccaatgatggtgccaatgataatggagactcccctcagtaaagtgactttcctcttcagctgcactttctcctgcccaggtggctccttgttgcccagggaaggcagcctcccgttaacatttccctgcaggtaacctcctttggagatggtggacacaacaggctttctgaccatagtagggacacacgggggaaaaataaaacagagggaaagaaaacaaaactttcaactttggtgtctcttggtgttactgatcgatgtcttcctctgctttcagactgtctctctcagcgctatagtgttcacaggtgaaaactcaaaggtgtgctttttccttcacagcgatctaattactactcagaaacacctgtgtatgcatcgtgctctcaattctccacctcctcgttccaccactgctgctgctgctgctgctgccgccctatcattacaaaccagctcagcttcctcatgggcttgtatttaagcgcctgcctgtcacaccaacttactacagctaaatgatgatgcaaattctccaggtttgcatcagccacatgagaagcctccagcattactcagctcttttttttaaaaaaagaaaaaaacaggaggagcttgttgctcaactgacctaagctttttagagaacaaagcacacactttaaagagattttagccaatccagaagtagtaaattcggaacagaccttcccagagatttaaagcaactcgtagtgagcaacaaaagctgttcaaacaaaatgaaacaggaaatagttacttcattttaaggagtttctttttctttaatgcgtgtataaaaacattttacatgcgactgttttgtgagtagaatgtatcctaaagctacattgtttataacaacacagtttgaatttcataatttgtgtaatgctttttatttttttattttgagttttttataaggcaatacagtcaaatccaatatttacaaaattaaagattctacactttatacttctgtcacatacacacaactataagccttcctcaacattaaaagataaaattatttcttactactcataataaaccagtattttaaatcaccatccgagtgtgactaatacaaaattcaccatgactccagaaaatagtcattttctgattctcattagcactaggtgatttttttgaactatgtaaaagatacatatccttcattgtcatgttgttcctttgaattaccaaaaaaaatttctaagttcaaaattacacaattacaattacataaaaatatgtatatagcaaaagcctgtaaaggaaaacagaatggtagttatagaaagtaatgatattatgtatgacttttttccacattatataaactattgttattattataaatttaaaatgcattaaaaatgtaagctaaattaaaatatttactttgcaatagtcaaaaaggcaaaacatttttaaacccttctaactttctcaaccaagtgtcaagaaaaaacaaatatgaaaagaaaagaaatcctagatatcatttttggctatagttacatgtggttttggattcagtgagaagaattgaatgttatcattaccctgaagctacctttatacgcaccattaaataagcttctgaacctttgaacaaaaaccacaaacaaaaagcctgtgtgcgagaggttggcagggaaagaagggagtcaagtatggtgaggatgatcaaagaaagaaatgagaaatcgccattaggaaagtagcatggaaaaggtcagaaccattttctgttatgttgacacctgagaaaatgacaccacctcaatgctttgccatccaaataattgaggctacattttctcctttttaaattatctatctaaattctatataattggtttcagctacaccaagttaaagtttttataaaaccaaaataaatactttttctcagttgttaatgtctttcaaaaaacaaaaatggatcattttcctcatgcaatcctgctaaaactcccaaagaaggaagctaaatagagattcttttctttccaattctcttcctcctcctacatctcctttcactcacacaattttcctgattaatggacctaaggagcagctcttctttcccagtaagagaaacatattagctctgaagaaatatgaggtaaaagtaggacactaggaatctcagggaacagcaactttctctaattaacacagtgtcacactttaattttaaattttgttataaataactgaactcataagttgagccaaagaccccactcagataggaaactgaatgaattataaaggacgattattctttcaatattaaataacattttcctcctcacagtattttttttttaattatgaagaaaaatggctgatgttagactaaaaaccaaaaggattgtactttcatgtaagatagaggccaccactcagaatg

SEQ ID NO: 317363 - DNA, 4001 bp, Homo sapiens
ttccttgctcatatagtttacctattttctatcttacactcactagaatttaaacttcataagaacagcgatcttgctagtctttcttaccattgtattcacaatgcctaaaacaacgcctgacaaagtaggatattctttaaaaaatacttaatgaatgcctttccctaagcaagtcacttgacttctctacttaactcacactggtgagtttactactgctagactaagctctggatccaggaaaaacaaaagtggctaaggtatggcttcttcagaagctcatccattcattccctcaaaaaatatttattgaacatatattacactatgttccaggtactattcaatctcagtgtttagtaaacaccacagtaacatgggatttggttaaccaacagaagtgtttaaacaggatgagtacaaaaataagtacaaaatgagaagtactataaaaacgatactttatatgttacaactatagcacccacctatttccttgtgtctagtaattggcaggaccttatgacaagagccaactgaaaaacagcagtataaattctggtactctaaaagcccagacttcaccactgtgcaatatatccacacaacaaaactgaacttgtactaactaaatctgtatagaattttaaaaagtaagttaaaaaaaattctggtactcacaggggacaatacctatgaatgcccttttcataggcacacagtgactaaaatatttggggcatgaattctctaggggtgacaataataagtgtcatttttcatgcttctgttgcacacataattatatttatctctaaggaaaatcagagagtggggtgtggcctccctcagtgccacctgggccagttgtctccccacatcaccaaatctgttatttcacaggctctaggacacccatagagggggagtgagggacctggtatggtcccgtgaagagctcttgtaacactactgattgatgtgacagacacagtatgtgtgcaactttcctttttccttcaaaagcactggtctaaagcagggatccccaacccctgggcagcagacaggtacaggtttgtggcctattaggaacaggccacacagcaggtgagcagggctagaggattatgcctgagctccagctcctgtcagatgagcaaaggcattagattctcataggagcacagacctgattatgaactgcgcatgtgagggatctaaattgcgccttctcaagagaatctaatgcctgatgatctgagatagaagagtgtcatcccatcttgccccccaccccaaactgtcttccatgaaactgatccctggtgccaaaaaggttggggactgctggaagtgcttgtcccctgggttaaagccaagaggagtaaacaggattaaggggcgtggatgtgggtgggtgggggaagagagctttctcaggatcggcaaccaatcccagaatctccagtcgcaggagcatgtatgtgaaggtttatttgcagggatccaccgtttgtaaaatagtacacgcttaataaaattaattttgaggtcaatcttaactgacagatctcttctttcttactggcgagtatttgtaaaataagaaaaacaggaggaaaagagaacaaacaagagagatgtgggatgacggagtaaggaaaggagtcacggagaggagagacaatgtctgtggctgttccctcagcgtctgggagaagagcccaagaatcccattgaactgagggggaggaaaggccctcctgcggcctaccgcaaggaaacgatcgcggcagacccgggactagcgccaaagggcttggaagggcggcgttaagaaaaatgggccgtacctacaacttctttcgcagccctcgctggcccgggagcggcccaggagcccagtgaccgttgcgtaagccacgcgccacccaggtgggcagggtggtgacgcgaaagcccggatagacttccgcgcaggggcggggcggggcgaggaggcggcagcgcgtttaagtgacgtcttggctgtccgcgccggcagaggcgagggttctggggtttctgggactgtctggtgtgttttctgtctattgaaccctttcctttcgacgtctcttctgaatattgactcatcgggttgtagaaatccagggacagagttgacatcactgggcattttagccaaaaagcagtgctcgggactgcatgtgccagaagtaaacttgtcaaaactcagattgtgtttcccctaaagtcagcttaaagtgcaatggtagaagagcacggtctctccccaagacggcctgagcttaaactgcagcgctgtcacttgctagctatgggacctaggcaaatacatcgtctccctgaggttgtcttctcatctgtaaaggacgctgtggtggtggtgtgagaataaatgagacatggcaagtgtctggaacaaagacgctgtgtacaaagtaaacacttaatatactgttatcagtataaaacctttgtgagttttttttttttttccgcatgaaatcttatgtggaaagttgtatgtgaaagaaatgaaagcggagctgcgttgatggtgggcccagaagctttggcctttcagtcccaaagtttccagtaatagaatccgcgcttcctataaaagacaaaaacaactgttattggagaaagtgtaaacttcttagaaagacaaactgccctttcctatctaatgtttctcctgacactcaatgtttactcttgaacactgtattcctttttgcctcagtgcgttctgtaaagttaattcctctaccggagtgttctttttcttagtcatcatctaagatctgatccaaattaccgttccttcttgggtaacttaaatacgaaattatctttttattggttttgttgacgttgttgagacagggtctcactctattaccccggctggagtgcagtgcgatctaggctccctgcagcctcctcctccttggttcaagcgatcctcctgcctcctgagtagctgggactacaggtgggcaccactacccccggctaatttttgtatttttagtagagaggagtttcacatattgcccaggaggacttgaactcctggacttaagtgatctgcccgtcttggcttcccacagtactgggattacaagcgtgagccaccacagccctgccctttttattgtttttaacaccttccctccttcaacgtgttatagacatctcagcaaggatttatttttcttcctcgtttcaggagagtagacagggtttcatgattatagggttaaggaaatgttttgtactcatgaaaaggaaatgttttgtactcacaggaaaagcaggtagatccctaaagataatgggagttgggacaaatggtaaacctgggaaggaagacctttgctaggagtctgtttgcctccaaggcactactcttatgctctagaaggaatgggctcctggagaggtaagtgctttagggtccatgtaaggaagatggagcgcacatcaacaaatggagttttggaattctcaccaggccagagggctcaggctggatttgagtcagtcaactataaatataatattacgtactccccaaatgccatgaagcaattcccacttgttacagagaggtacataaatgattcatataaaaatataatgttctgagacattaaaaaaatacagtggttctttgggagacaatataatgaaaatttactaataaaaaacatttaaacaatcatctgataacctttcttataaaaattaagttttaaaaataagtaaattgattatatttgcaacaaagtcatggaaagcaaaagcttttgaggaataaggagaatcttaactgagagcaattttttaaaactatacatgacatgataaaaaaagttttaacactttctacatagtttcatacttctgaaagtacttcaataaaaatatttagccaatgatctatttagtatgatttc

SEQ ID NO: 317364 - DNA, 4001 bp, Homo sapiens
actcctgacctcaggtgatatgcccacctcggcctcacaaagccttaacaagtttctctggtgtgataggcacaagagtaacaaagatgactaagatgcagtctgccctttaagggatggtcagagactgatatgtgtttaccaaaatcgtttactcttctgcctgggtccatagtacatttccagtctcccttgcaggtcagtgtggcatgtgactgaagtctggtcaatggcatgtggacataaatagtatgtgatttccagtcctcacccataagaaacaatcctcatgcaatcctctagtagcttttctttttctgtccgttgcctggaaactaaggactccaaggtcttaggggatagcaaagccataatataaaaggagtttgggttcctgaataattgagtagaaggccaacagctgaacacgtgaatggacttgacatgaacgagaaataagcctgaactatgtttagttactgagatgttttactttatctcttacagcagctactgctgtcttaaggttatattcttcagtcaatagcatacgatgattcttagcacctcgaggatgctaacccagtccacaaaggcaacaccccctctggttaatctgagaactaaaataaaagcaagcaagaaaacccacgccaacaccttacaacagtaaacagacacgcgcccgtcaccgggtgtacaaacagaaaaggctgggcccctcgctcgcgtctccggtccagcaggcctacagggtacccgccgctggcgctgggtttatttttacccttagtgtctctggggcctctcacctggcagtctccggcgaagtcgaccaggctccgtctgaacgattaggaaaggggctgtgggggaggcggcggagcccggtctagccaccgcgctctggggttcccgattcgcgcatcttcccaggctgagccgggaggctgcgttgactgcagataaacggtctcagggcgcggcaccgcgtgtagtcggccccgcctttcgcacgaacccgctgggcgacaccgcgcagggaggtccgacccgtcggcgccggtacaggctccggagtaagcatgggttggtccggggcccgcagcggcagccccgtgtgccctccgccgggtttcaggtccggcggcgcgggtgcagagccgcgtgcgatgcctggtgcgcgtggcttcccccggaaaggtggcgccaggccgaccatgggcccacgtcccggggcctcggagcggcaccgcgcggtctttcagctgcttatcctccctgggcgggtccgcaggcttctggggccaggaccagcgagctcccgggaaagcttcccggaaagcttacccagagagcgcggacccaggcgccgagtcttcccggagatgacgagacaccgcgagaggagcacagcgcaggctcctcgggactccgcggcgcaggccgggcagcccgttacttgttttatcgttcccgaaaccaacctctaagttgtctatcagtcctccaccttttagctgtacctcttagaagtgtcttctcagctgcggtgggaagataggattctttcttaaggtgaccaattaaatggccggataaaagacttgttctgcccccctttatcgcttaacacctgcccttcttgttgtattttagatttttaacccttctatcagcagtgtgattctatttcatttaattctcatttcatgtttgtgtcttccttttctctgtatttcctcttgtgtgtgttaagacgcgcgcaccccttacctgtttttcactcctgtaagcaagtgccaatcttaatcaccgcttttcaagcaagggagattatcctcaaatttctccaccagtcagaaaccattcattcttgtctctcaggtcctcttttgtgatgaacctattggataggttccatccaatacccttcttcagatcatctgaaatgattattttcctaaacggaactcttcctctcctaaagcttgtaaaaatttctagtgacattcagcttcctcttaccacaggaatgacatatatttttccttttagtcatatgtacttcattaatatatcacctgatttgattaacatgactttggagaacattgaattttttggctagattttacttcgtttttattgctgatagtgtttataaaaatgttttatagtttatggtcggctgtgagaaagactaactcagatcatttgttaatgttggagcccattttgtagaattcgttgtgcatttatttaaaatttatttgttcatagctatacatatattatacatgtatacctgctcacagcataaagtatttcatgacatacttgtaagagtcagtgttctatgaattcactagagaagttacagcattttgattatgatacacgaaaagaaacccaagtcatttagcttaactccttaatttcataaaccagaaaactaaaatccaagatagattgggtgacttggtctagatcacaaaccaaagttagccataattcggtagtgtagtgcccggtccaaaacctcatagataatcttataatcaatggactctttctgaatgctagtcaaaatgtccttttgtgtgaattttaatgtaccgtcatcaactgcatgatattcttccccatacacaaagtgttatctttttgttgtccatttcagaattttccatgttaatattaaagttctaggaaaaaaggctaagaatcactgcacatttattgagtatctcagtgtgcatcataccatttggtcatttgaggttgcaacaagtaaaaaacaaacataaaacccttaaattaaaataaaaacaaaaaactttgccctgacaatgttacagaattaacatccataaatttacttttcttgaaaaatttattttctttaatttcgtttgtttcctgttacataatttatatttaaatttacatttatttatccagaaactatgtccaaattttatgtcctcttttctgttatcctggagtttggtgaagaaatctgtacttaatttagaaaagaaatccctctaactgacaatattgttagctaactatatatttcttaggcccatgtcaaatatcattgcttattttaataaagattgtttagttagactaagaaaatagtaaataataagggatggcatccgttaagtataaacactggattatttttcataacataacaggtcaacaatatcgttttgaggctgaactcctttactccttttactgtaagctattgaagccaaactccttcctacctttgttcatttatgatggtgtaaaattttaaaattaggatctacatacagaacaatgcagaattatataaaaatatttgaatattgaaaaatgaagtggaaattattattattatttaggtacagggtcttgctctgtcaccctggagtgcagtggcatgattacagctcactgcagcctcaaactcttgggctcaagtaatcctcctgccttagcctctgttaaccatgctggtcctgaactcctggccgcaagtgatcctcctgccttggcctcccaaagtgcaggaattataggcatgagctaccatgcctagtcctgaaattactatcttcttccttaacccccatctcccccacaaaaaaacaaaaacttccttttttcttcatatttacattttaattgtatatgctgcaatggcctatttgtatcaccccagagtcatgtgttgacatcctaacctgcaatatgatacattaggaggtggggcctttgggaggtaatcaggtcataagggtagtgccctcatgaacaggattagtgtccttataaaaagacacatgagcgctcgctttttttctctgctcttgctatgtgaggatacagcaagaagaggaccatctgcaaaccaggaagtgggccctaaccagaaactatatctgctggcacctttatcttgcacttcctagcctccagactgaaaaataaatgtt

SEQ ID NO: 317365 - DNA, 4001 bp, Homo sapiens
aacaataaaatatcactactattgctgcctggagtttcatttctgctttttctacttgaagaaattcaaaatctaactcaaatgtcaccttctcagtatttcctaactccaacattgacaaactgtctccctcgttttcctctctgatgattcattcattcattcaacaaacaagagctattaagctcttgttacgtcccagtccttgagctgaggattcagaagtgaacggtcttaaatagttcctatattcagatcttgtaatctagttacaggatgataaaggatgataaatgattcctaagcaatcacaatgaaatatggttaagtttcaactttagacacataacaaccccatcccttaacaagtttcatttccttttttttcttttctgagatggagtcttgctctgtcacctaggctggagtgcagtggcacaatcttggctcactgcaacctgtgcctcctgggttcaagcgattcttcagcctcagcctccggaatagctggaattacgggcgtgcaccaccatgcccagctaatttttatatttttagtagagatggggttttaccatgttggctaggctggtctcgaactcctgacctcaggtgatatgcccacctcggcctcacaaagccttaacaagtttctctggtgtgataggcacaagagtaacaaagatgactaagatgcagtctgccctttaagggatggtcagagactgatatgtgtttaccaaaatcgtttactcttctgcctgggtccatagtacatttccagtctcccttgcaggtcagtgtggcatgtgactgaagtctggtcaatggcatgtggacataaatagtatgtgatttccagtcctcacccataagaaacaatcctcatgcaatcctctagtagcttttctttttctgtccgttgcctggaaactaaggactccaaggtcttaggggatagcaaagccataatataaaaggagtttgggttcctgaataattgagtagaaggccaacagctgaacacgtgaatggacttgacatgaacgagaaataagcctgaactatgtttagttactgagatgttttactttatctcttacagcagctactgctgtcttaaggttatattcttcagtcaatagcatacgatgattcttagcacctcgaggatgctaacccagtccacaaaggcaacaccccctctggttaatctgagaactaaaataaaagcaagcaagaaaacccacgccaacaccttacaacagtaaacagacacgcgcccgtcaccgggtgtacaaacagaaaaggctgggcccctcgctcgcgtctccggtccagcaggcctacagggtacccgccgctggcgctgggtttatttttacccttagtgtctctggggcctctcacctggcagtctccggcgaagtcgaccaggctccgtctgaacgattaggaaaggggctgtgggggaggcggcggagcccggtctagccaccgcgctctggggttcccgattcgcgcatcttcccaggctgagccgggaggctgcgttgactgcagataaacggtctcagggcgcggcaccgcgtgtagtcggccccgcctttcgcacgaacccgctgggcgacaccgcgcagggaggtccgacccgtcggcgccggtacaggctccggagtaagcatgggttggtccggggcccgcagcggcagccccgtgtgccctccgccgggtttcaggtccggcggcgcgggtgcagagccgcgtgcgatgcctggtgcgcgtggcttcccccggaaaggtggcgccaggccgaccatgggcccacgtcccggggcctcggagcggcaccgcgcggtctttcagctgcttatcctccctgggcgggtccgcaggcttctggggccaggaccagcgagctcccgggaaagcttcccggaaagcttacccagagagcgcggacccaggcgccgagtcttcccggagatgacgagacaccgcgagaggagcacagcgcaggctcctcgggactccgcggcgcaggccgggcagcccgttacttgttttatcgttcccgaaaccaacctctaagttgtctatcagtcctccaccttttagctgtacctcttagaagtgtcttctcagctgcggtgggaagataggattctttcttaaggtgaccaattaaatggccggataaaagacttgttctgcccccctttatcgcttaacacctgcccttcttgttgtattttagatttttaacccttctatcagcagtgtgattctatttcatttaattctcatttcatgtttgtgtcttccttttctctgtatttcctcttgtgtgtgttaagacgcgcgcaccccttacctgtttttcactcctgtaagcaagtgccaatcttaatcaccgcttttcaagcaagggagattatcctcaaatttctccaccagtcagaaaccattcattcttgtctctcaggtcctcttttgtgatgaacctattggataggttccatccaatacccttcttcagatcatctgaaatgattattttcctaaacggaactcttcctctcctaaagcttgtaaaaatttctagtgacattcagcttcctcttaccacaggaatgacatatatttttccttttagtcatatgtacttcattaatatatcacctgatttgattaacatgactttggagaacattgaattttttggctagattttacttcgtttttattgctgatagtgtttataaaaatgttttatagtttatggtcggctgtgagaaagactaactcagatcatttgttaatgttggagcccattttgtagaattcgttgtgcatttatttaaaatttatttgttcatagctatacatatattatacatgtatacctgctcacagcataaagtatttcatgacatacttgtaagagtcagtgttctatgaattcactagagaagttacagcattttgattatgatacacgaaaagaaacccaagtcatttagcttaactccttaatttcataaaccagaaaactaaaatccaagatagattgggtgacttggtctagatcacaaaccaaagttagccataattcggtagtgtagtgcccggtccaaaacctcatagataatcttataatcaatggactctttctgaatgctagtcaaaatgtccttttgtgtgaattttaatgtaccgtcatcaactgcatgatattcttccccatacacaaagtgttatctttttgttgtccatttcagaattttccatgttaatattaaagttctaggaaaaaaggctaagaatcactgcacatttattgagtatctcagtgtgcatcataccatttggtcatttgaggttgcaacaagtaaaaaacaaacataaaacccttaaattaaaataaaaacaaaaaactttgccctgacaatgttacagaattaacatccataaatttacttttcttgaaaaatttattttctttaatttcgtttgtttcctgttacataatttatatttaaatttacatttatttatccagaaactatgtccaaattttatgtcctcttttctgttatcctggagtttggtgaagaaatctgtacttaatttagaaaagaaatccctctaactgacaatattgttagctaactatatatttcttaggcccatgtcaaatatcattgcttattttaataaagattgtttagttagactaagaaaatagtaaataataagggatggcatccgttaagtataaacactggattatttttcataacataacaggtcaacaatatcgttttgaggctgaactcctttactccttttactgtaagctattgaagccaaactccttcctacctttgttcatttatgatggtgtaaaattttaaaattaggatctacatacagaacaatgcagaattatataaaaatatttgaatattgaaaaatgaagtggaaattattattattat

SEQ ID NO: 317366 - DNA, 4001 bp, Homo sapiens
tctcttcctttctactcaacccacttctccatgctaagcagagtaccattcagttgttcctaaaattgttgggctattcgatataacacgaatctccacccaccaccctacacaaatgtggatcgaatcctgacaaggcacccctagtagagccccgatttggccagctcggagaggtgagaaaggagtaagggtaacctagtgaggctgggggtagaagagccatttgcaaagcaaaaggtggctcaacttgggccttaaaactaagggcgagagaaatgggttggataagaagggcgacttgaagtgcaatgggctgcgcgggtggagacgtgcgggtcagagcgcctcctctccacggcccgaaacccttacaccccgggggcaaagaggccgcgggacgaatccagacgcgctggcccctgccggcctagccccgcgcccttcgcttactcccggcccacacgcaaccgcgagagcggaacgtgcctagggcggccggactggcgcggggcggcggcctcggcgttcacaaagagaacggcctccatgctccacttcgctgaactctggaagcgcctcatcaggagcgcgtgggccgtcaacaccgggtctgcatttacttcttcattagagactcgcaaagacagggaggcggggacgtctgcgagcaacggagcgcgaagaggggaaggcaggggaactgctgccacgtgaaggggcgcagaaactgccagaaaggtggatggggacgcaggggttcagcaggaagggccggagggggcagccgggcaccgccgggtcgccgcagtggtaagacctggttgggctggtttgcgctggagaaccagtgctaacttcgcttaacggatgggacacggtcctccctcgcagtcgcccgctgagacaagtccctaggggcctgacgccgtcttcccctccccggagaagtggggggcggggggctgcgcgaggctactatgcgaggtgtcgccgtcctggggcacccttctccccgcgacctgtgagaagcacccccaggcactccatgaccccttcttcctaaccttcgcccccaggagggtgacaaaaaatcggggaaggcaagtttctctcttttgagtctccctgctatcccctccgcgccagcctgcgacaagagcgaggactgggctctgaaaccgacctggatgctggcaatcgcaaggtgactccgtttatggactctggagaacaaagtggcgtctcacttgccccgggcatcctccagtacttgtcccctatctacccgctccccagccccagagaactagccagcaaggagctgcgagtggcgggacgagagcaggggagggagaactagcgcagctgccagcggacccgcccctccttggacagaggcccttccctggccagtgccctcccggagagctcaaccccaggatgtgcatgggggagagctagcgagggctgccccaggcacaggaccctgagctgacaggttcctccagtggaggcaggggtgcgcggcccggatggggagaggggaagacgaagagcgcatactcacagtctctcggtgttgcgggggatattcctgggcacgctgcgcagcgccagcccgtgacagtccactgtgctgcccgagcaagagcactgcgccgggcacgcctgcggtgccaccttgttcaggatcgccagcactaaccccagcgacagggacagcatctgccagccaacgccgcgcatctttccccgccgcctccttcctcgccggcactgggggctttctttagcttgctgctccgagggaaccgcgcagtgtctgaggcccagtgcccggcggggctagcaacccagagtgccagggaaaatgtgcaccaaataatatggaacaaggcagtagagcccactcaggcacacgcctcccaccgccctctccaccctcctctggcagagcaggagctccttgggcaactttaggtcctgaggatgaatccgcctggccagggctgcaaggagaccccaagagcagcggagaggagatcacgcgtcttctgtctcccaaggatgaacttggcggtaaaagagctggggcttccaacggctgctaagatgcaggggccggttgttgtggggagggcggtcctctgatcccacgcacgcttctgcaaatccgatgccagtggcgaaggtacaagacagaagaggggatctcaataggtattatggccccgatcaaagtgggctccggaagctagaaggcgcggaagcccagcgggcccgtagcagagcgcgcggggcaactgggcatggcgcgcgggggtgcacggggcggacgcgcagttctgggggcgcacggctctggactctgctcactcacgcggcctctccctcgccctcgactccgccgcagcctggaccggtcctcgcggtctcccgacagccaacgatggtttacaaacacacatgcacttcgctgaaggatgtctgggcaatcccgcctcccgctcggcgtccttggcgacgctctgcaccaggacctgccccgaggtcacgcagaaaagacaaaagggcagtcgggccgccgcagccgggcagaaatatccactagtcagcactccggcgaggaactccaagaggccaagtggaggatgagagctgctgcgaagactgagtggggactgactgggggcggacttaaaaaccaggcagaccggaaggagtggaaaggcaaaggccaaggttggaggtgtcagcgtcctgctggggcgtactggagaatggctcggtggcaggtgggcgggtgggatccactactccaggcagagccaggcggcagctgaatggcagtagtgtgtgcgcgcgtgtcaaccccgctcgtctcccagataagccgcagctccgcggcagacacctgatggcaaaggtagaagaaacaagagccgggttccggagggcgcagagccacggccggcccccggcggtctcccactagtggttcgtccttctcaaagtgcagcaacttttcccaggctttgaattccgtcccccaaggccacagtggcggtacccctgccggcgtggcgacgccgcccggctcctggcgctgcacctgacgcggcggccgcagtcccgggtagtccttctccttctagccccttcccctctcccgctgctttcctggcctcccgctccagggagcgaggtcggggagagggagggcgacgactcagagcggggactcggtggctctgccgactccggagcccctggcaagtgtctaaacaataggacggacgcagcagcccaagtctcgcttgtctggaaggaaggtgggttgttgtcgtaactggagttgttcgctggggctgactggcgctcagcgtagccaaacaaaaacccggcccgcgcctccggagccggctgcgggcccccggcgctcccctttctgctcagcactcccgccgtgcccagaaagcgcggcagcttcggcctgcgcctgggcgcttcggcgctcccatgcctcgcagctgcctccgcctccgccgccgccgccgccgccgccttcttttttttaaccacagtctgcggcagccaccaccaccgccgccgccaagctccgccgtccgggcgcttcccaaataaataacaccaagtccgaagttgagccggcgcgggccttatatagccgcccgagcctccgccccctgaccccgcccctcgaggcccaggcccgccccctggctccgctctgggagcccgcacctcgctggggagaggggagaggtgaggccggggctgccagcgctgggcggaggcggcggctggcggcgcgcgttcccgtgcgccctggctcgccccctcgctcccacgcgcgggcaaacttggcccgaagaaggagccacccgagccccagcccccaactccttggccccagaggtgacctgggctcggagatagtcgtttgcagtgggagaatgggaagaggtcggctttga

SEQ ID NO: 317367 - DNA, 4001 bp, Homo sapiens
attttataaggtccctaaggccaagttaaattcaaactcacatgaagcattcagtacacatatcagagctgcaaaggtccttatcagcatccctaaagcatctgtttctcctctaccaaatgaaaagctacttatacaattcagattgaatatctctgcatttatcttaaatttttctacagaaattcatagttctgtaagccttttccctctttcacacacactggtatccctggccatctcagcctttccactataaacaaaacccatgtaccacccatatctgaagtataacgccagactcctgcttagctacccctgtaatatggtttaattatgatgactgaactaataggctgacatcatagacttttacaggctgaccccatgtcatcctgatgtatcattttgcaccagttcagtgctgtaaatcaatttaagatctcaagcaggttgaaaaggctggtaatgatgctttctctgccgtctctggagactctacattatacccaacttacattatttataaagcctcagtgatgcctccattagccttgtaagactacacaaatgagatcttttatacacacacacttggccttgattatgtaggctactgcagcttaaacatgctagtctaattactatacccaagctacttctttttccaatctactaggttattagatttaatatttaacccagaattgctagaaatcaaaattacaaagtgaaatttagtttttaactaataaatgtaataaacgtagttgagaaaatgtgacaacttcctcttaatgccttaatgaacttagtaaaaataacataaaattccaagaagtgtaagaggccaatgtctttaattgcctaaaaattgtcatttctctaaaacacaaaggtcatcagctcttcaaggatacgaaaccaaaggatactgcaagaggtaaaatgtatttggttacatacctatggttgtaggggtcaaaactaaatcaaggacaaatccctaccctcagaagaaactcgatcctgcctggatcctctagaggctctggcatcacccacctccagaaaaatcatctctcacgaccctagctacaccttcctaagaactgcagtattacaccaatgatacaccacctgcacagaaatagcaaataattgcaaatgggaaagagagtgggagagggcagaacaaacactttaatcagtacagcatatttagatctggcacctacatcagaataacactgatgcaacaatatttataccaattgaaaatgctggggcagtgaacacttctgttccgattcttttttaacacggtccacctaccttcaatacaatttaaagtaattacaaacaatttgaaaaatcaacatgggcagggaacagttttctcattgtgttactgaggtgtgggcaagttatccacaacaggcaattagacccagagatgttctgaaatagaggcattctgagatttagcggctgagagtttcagcaacaggaagaaataacagaaatcatgcaacttctgtatcattccacgtactttgaaacttcagatacaatggaaagaaaagaggggggagggcagagaaaaaggacagttgtctcagcactcacgaaaaggatgctttctcaggagatggttctgagaccggcctcaattttcagaaggaacgcgcctttactggttatcttgcaccgtgtatttaaaaattgcatgctcttcaaaataaacaaaagctcagctactgtagctgtgagatctggcaggcatttgttcctcctcccctcctaaagcacatcaagaaaacgttctccctttaaagccttcatacagtttcagcaactagaaaaacaagcccacatctgtctctcacgcccaccacccccaccttcctacagaaacaaccccgagaaacactaacaaagacagggagcagagtaaaggaacagttgttcaaccgcgaactcacgaatacacatgcagtgaggcaatcgactccggtaaagggaaaggaacgagacaccaggagacgcagcgggtgtaggcggaagagggggaaaaaattacgcgccgccgccaaacctttgaataaattagaggggatctcggtgcgaactttccttgacctcgaccccaaagaggcttgctggggccgagaagaaaacccgtgcgggatgtggaggggcccggggcgccggggtcccccgcccgcgagacccgctccaccaggcgccttggagagcagcgccagcggtcgtcctccagctcccgcaggggtcgccccgccggcgcgggggacacaatgggtccgcgggccacgcgaacgggcctcggcccggcggcagcacgggagagatgtgaggagcgcgcggaaggggagcgcggccggggagatcccagcgcggtcaggcccgggagccgaggctcgggggcccgggaactgggcttcccacagcagaagacccaacaaagacaccaggggagcccggcgggctgggcgcgagaagacgtggtagcaggttcgctcctccgagcagacgggaggcgccatcatggggggggggggtcgcggcccgccccgcgcagaaagagcccccttcccgccgctgcccgcgcccccagcccagcacgaccgcggcggccccacgcgtgcagagacggcggcggcggcgctggaaagcccggggcgccgaggggagggctgggacgcggcatgaagggaaagttcggttcgggtctgtttcgttttaccgggttggcggcgcgcccgtccgtgtgggagcacgagtggccgggcgagcggggtctcgcggcccgggtccggacggccgggcgctgcgccactctccgctccccgagcctcggcccgggttgagccgctcggcctctcctttctccgcccgcccgcctgctttctcctggagcctggattgatctggtcgcgctggcgtcagggagtcggagctgcccagcctccactcctcagctgccaatacccggcgcactcgcctgcccgcccgcccgctcacacgctcacccgctcacccgcgcgccgccgccgctgccgcgcgaccagggatcctctccaaattcccggcccggccggcgtgagcgcagcgcggccggggccggaggacggcgcgggggagcggccggagccacccccttctaccggcagccccacgccccgtttcttcctggagaaaaaacagtgtggcggcgttcaggctttcctaaccctgcctttttagtcccggtggagcggacttagtccattatctgcaagtgaatttcgatgttccatatgtttattttctgaaatgttcattaacgcttccaccgcgcccactgaatcgttctataaacgtggagtgcatgttgacagttacctttcgagacgcgcccttttatgtctatctttcgttgcccctcactcactctccaataatttgcaggccccagaagttgtacgtacccagaattggatagcctagtaaatactgcacgtggttatacaaaccctgagtcaacagatgcgttttgtgtcaactcaggatccagtgattcgagtaggtaaccttgttgctccaaataatggcatgccataaggagatactgctttagaactccacatttttggtccaatttctacagtcttttagatgatgccaactcccccgcacttaactcttacctacctgatctgcatagacattgaaaatatcttcttgcaagagtcaacttttctcttggctaactcttgaagctgcataaaatcttgcataattactataatgttgagttacgtttagaaaaaatgatttttttttgaggaataaatttcacatgaagcaaaaaaaaaaaaaaaaaaatcactcccagcaatgtatatcagaatatgtcttctaattaaattcctttttcccttaacctatttgagcacttactggtcaattcgtgggcctcatcttattttccctaaaag

SEQ ID NO: 317368 - DNA, 4001 bp, Homo sapiens
ctaccctcagaagaaactcgatcctgcctggatcctctagaggctctggcatcacccacctccagaaaaatcatctctcacgaccctagctacaccttcctaagaactgcagtattacaccaatgatacaccacctgcacagaaatagcaaataattgcaaatgggaaagagagtgggagagggcagaacaaacactttaatcagtacagcatatttagatctggcacctacatcagaataacactgatgcaacaatatttataccaattgaaaatgctggggcagtgaacacttctgttccgattcttttttaacacggtccacctaccttcaatacaatttaaagtaattacaaacaatttgaaaaatcaacatgggcagggaacagttttctcattgtgttactgaggtgtgggcaagttatccacaacaggcaattagacccagagatgttctgaaatagaggcattctgagatttagcggctgagagtttcagcaacaggaagaaataacagaaatcatgcaacttctgtatcattccacgtactttgaaacttcagatacaatggaaagaaaagaggggggagggcagagaaaaaggacagttgtctcagcactcacgaaaaggatgctttctcaggagatggttctgagaccggcctcaattttcagaaggaacgcgcctttactggttatcttgcaccgtgtatttaaaaattgcatgctcttcaaaataaacaaaagctcagctactgtagctgtgagatctggcaggcatttgttcctcctcccctcctaaagcacatcaagaaaacgttctccctttaaagccttcatacagtttcagcaactagaaaaacaagcccacatctgtctctcacgcccaccacccccaccttcctacagaaacaaccccgagaaacactaacaaagacagggagcagagtaaaggaacagttgttcaaccgcgaactcacgaatacacatgcagtgaggcaatcgactccggtaaagggaaaggaacgagacaccaggagacgcagcgggtgtaggcggaagagggggaaaaaattacgcgccgccgccaaacctttgaataaattagaggggatctcggtgcgaactttccttgacctcgaccccaaagaggcttgctggggccgagaagaaaacccgtgcgggatgtggaggggcccggggcgccggggtcccccgcccgcgagacccgctccaccaggcgccttggagagcagcgccagcggtcgtcctccagctcccgcaggggtcgccccgccggcgcgggggacacaatgggtccgcgggccacgcgaacgggcctcggcccggcggcagcacgggagagatgtgaggagcgcgcggaaggggagcgcggccggggagatcccagcgcggtcaggcccgggagccgaggctcgggggcccgggaactgggcttcccacagcagaagacccaacaaagacaccaggggagcccggcgggctgggcgcgagaagacgtggtagcaggttcgctcctccgagcagacgggaggcgccatcatggggggggggggtcgcggcccgccccgcgcagaaagagcccccttcccgccgctgcccgcgcccccagcccagcacgaccgcggcggccccacgcgtgcagagacggcggcggcggcgctggaaagcccggggcgccgaggggagggctgggacgcggcatgaagggaaagttcggttcgggtctgtttcgttttaccgggttggcggcgcgcccgtccgtgtgggagcacgagtggccgggcgagcggggtctcgcggcccgggtccggacggccgggcgctgcgccactctccgctccccgagcctcggcccgggttgagccgctcggcctctcctttctccgcccgcccgcctgctttctcctggagcctggattgatctggtcgcgctggcgtcagggagtcggagctgcccagcctccactcctcagctgccaatacccggcgcactcgcctgcccgcccgcccgctcacacgctcacccgctcacccgcgcgccgccgccgctgccgcgcgaccagggatcctctccaaattcccggcccggccggcgtgagcgcagcgcggccggggccggaggacggcgcgggggagcggccggagccacccccttctaccggcagccccacgccccgtttcttcctggagaaaaaacagtgtggcggcgttcaggctttcctaaccctgcctttttagtcccggtggagcggacttagtccattatctgcaagtgaatttcgatgttccatatgtttattttctgaaatgttcattaacgcttccaccgcgcccactgaatcgttctataaacgtggagtgcatgttgacagttacctttcgagacgcgcccttttatgtctatctttcgttgcccctcactcactctccaataatttgcaggccccagaagttgtacgtacccagaattggatagcctagtaaatactgcacgtggttatacaaaccctgagtcaacagatgcgttttgtgtcaactcaggatccagtgattcgagtaggtaaccttgttgctccaaataatggcatgccataaggagatactgctttagaactccacatttttggtccaatttctacagtcttttagatgatgccaactcccccgcacttaactcttacctacctgatctgcatagacattgaaaatatcttcttgcaagagtcaacttttctcttggctaactcttgaagctgcataaaatcttgcataattactataatgttgagttacgtttagaaaaaatgatttttttttgaggaataaatttcacatgaagcaaaaaaaaaaaaaaaaaaatcactcccagcaatgtatatcagaatatgtcttctaattaaattcctttttcccttaacctatttgagcacttactggtcaattcgtgggcctcatcttattttccctaaaagcagcgtttgacgcagttgatcattctctgctccttagaacaacaggaaagtgaaccttgttaaatgccactcggatcaggccactcctctgttgaaaaccctcccttgataaatagtataaagtatcccatacaagagaacattattcagccataaaaaggaatgaagtactgatactgatgcatgctacatggataacctttcaaaacgtgaagggaaagaagacagaccacacattgtattcttccacatatgtgaaatgctcagagtaggcaaggctatggagacagaaagtagattggtggtttgcatagggttggggaaatgaggaacctggggagtgacagctaaaggttatggggtgacaaaattgttctaaaactagtttctggtgatggttgcacaactctgtgcatataccaaaagccattaaattgcacactttaaatgggtcaatcatttggtatgtgaattttacctcaagctattaaaaaaaaagcatgacaatgaaatgcagtatatgaccttgattggatcctgaatggggaggaggagctataaactgtcattttaaagtcgttaatttttaaaaaaatcaaaaatggcatttatttaattttgagacggagtctcgctcggtcgcccaggctggagtgcaatggcacgatctcggcttactgcaacctctgcctcccgggttcaagcaattctcttgcctcaacctctcgagtagctgggactacagatacacaccaccacgcccatctaagtagagacggggtttcaccattttggccaggctggtctcaaactcctggcctcaagtgatccacccgtctcagcctctcaaagttctgggattacaggcatgacccaccgcgcccagcctagatggcctttcttagtgcagtcctagtagtcttaaatgataactattaatattattatgtatgcaataaaatttgattttgcccattgtgcaaattatttccttaaatgataataa

SEQ ID NO: 317369 - DNA, 4001 bp, Homo sapiens
cccttaagccttggaacagaaatccaagttaaagagccctagtaacccaaaagaaccatttccttaaggaaaaaaaagcaacactgaatatattttaatttggaagtaatcttatcttaatcactcaaaactacaggaactatcaggagttcctatgtcactaaacctaccctcaccactaaaagttctttaaatgattactaacattaatgttacttaaccccagctacccaaatataactactgtgccaaaagcctcaatggtaaattacgctaccattttcttactgtataatgattctgcatcaagactcatcttcggagcagtattactttcattctgtctaaggataggaaaatcccagaaatctttgggctccgactcacaaaatatctcaaaacaggtcgaaggccaagaaaataaaaattggaaggagcaattactttgttcccagatgcaaagcctggaagcatatccaatttacccgcctggcagcttcccccatctttccagccccctcagtactgtcagcatcccctgcccaacccaaacccataagtctcggcagcgagtggtactaatttttttttttcttaaggccagaggccaaaaagagaaaagtgccggactgagagccaaccaactgcgcctggttctctaattcattcctacacttattcatcccccctaaattagacgggggatccgagacagctgctgctgccttggttgcttcccttccagtggaatagtgcctgggaggggccttctctcccttcacagaagcagctgcgccccgcttatccccactgcgcactcggccatccagctctcgccattgtttctgcccacaacagataccgcccctgcaaggaccgggaagaagaaaaggaggcccaagtcctcggacgcgctgcttttaaatgcctccttcaccccgcccgtgcatcccgctcctaaggggtcatctcctcgcccttccccgaagtttggtggaaactaaaaaccacattcagaggtaggagagggaattatgggagtctagtgggaaaaaaacgatgggtcccccgggccacggtaaccaagaacatctgttcactgagagcgttcaaatatttgtcaggattcacgaaagagacaaataatttaaatgtgaggagccagaaatccattttgcttagctcgaatagggtaagaacaagggagcaagagtgagagcatcatttcgtatccacagggtgtgaagctgagtctggtgcagagagagaaacccggctctgcgtccgatcgccacgatccggcgagggagccagctcctcctccccgctgcacccgctccccatgccgcaagtcgccctcacctccatctcggcgtctgcgggaccagcgctggccgcagacgcaaccgcctgcgccgcgacgccttcggggccgcctttgttgctgctgttgctcccgccgctggcgatcgaggctgcgggcttggaaggcgcgctctcgggaggcgggggtggcggaggctcggccgcggacgacatgatgttccgtctgcgtcacccgctgctgccagaggcccgagtccggcggggatggacggggaggcctaggcctggatgctacgtcgcaataaactggtggaggagcgagactcccacccgagcgctcccctgcgccgcgcctccgcgacgggcctgagccgggcccaggagctgcacactcccaaacgttctgctcttccgcggggctctaggttccaccggcgcttacctcacggcgggaatcacgtcgacgagggtgggcggggccagacgggtcactgaggtcaaggaaggccggctgatttagagaagggcggagggttgggggaagggaaaaggaaaacgaaagagagactgaggctgggaaaacgcttcgccgcctcctcctcttcctctggaagataacatctatctcgccagcatccaggacgacgacctacgccaccgactttcaacactcgcgagattccttattggctcactgactgggtcctgagcgcgcatgcgcatactgccctcctcacccttggcccgccctcttccagatctctagccggctcgggagagaagagtgggcgggacctccagggagcgctcggaggtgtaggtttgtgcgcctgctgcttggcaggacgcgagctcagtgttttaggctttcgtaacggctcacggttctcgctgtgtcttctgtgcctgacaggggttggcggcactaccggaaaacttgtctgggttttgcgctgcccattcaaacttggaagtcttgtgtctggccccaaaacttctgccgtatccgcttagaggcgtgacgccacagccttgacgacgttatggttaccccaagtgaagtctcacggttttttgttgttagaaaaaaaaaaaaagtccgttagtgtgatttttttcttttttctttttttttttttttgccttctcatgttagctgcgtcggttatttctaaataccctccttaggcacagagttaaatgatatttcttctgaatttatatgccaaagttaagcaaataacgtgcacactaccatggaagtgagaaacacgaataatcaatatatggggaagataggtggtgcgatgtaatcttttccccaagcatcaaacatgaaaattaaaacgtacattctccttaagtgttaacaaatattcagcactgattttgtatactgccttaggcagccttcaatgcagcttaagggccttgtgcattcatcgcctacaaaatttaaatacattgtagtctgtttgataacgaatctgcatactacagtagattacctgcccagtacagggtcttttttatctttttttattcctcatattcagtattctctaaatgtttgttgagtaaaggagacacatttttcgagagttgaggtttgagctaactggttatgttgaattccaaacagaagggatcccctttgaatatatagcctgcaaattttttaactaatggaatgataattcttaaatggacatctggaaaaatgtccccactccactagaaatgctagttcttagactataaggaaatgtctaaggatatatgcaaagatgaatacctacaatgatgttcatcatagtcttcatatatgactgcaaaaagctaacaacagtaggctgaatccagtattaaaagttaggtgtttaaaactgtcatacacccagaaaatgaactattaacctttaacaaccattaatgtagaataatggttgttttgtgttgttttgttttcagacagtttctgtcgcccaggctgcagtgcggtggcatgatctcagctcactgcaatctccaactcccaggttcaaaggattctcatgacttagcctccggagtagctggaattacaggcgtgcaccaccacgcctggctaatttttgtattttcagtagagacagggttttgctgttttggccaggctagtctcaaactcctggtctcaagtgatctgctcgcctaggcctcctaaagtgctggggttacaggcgtgagccaccgcacctagccaaagaatgttaatttataaagtgttaactgaaaaatttggtttaacagttcaaaaatgtagataaaagttggaagcatatttacaaaagtattgaaactgatcgttgctggttttttgtttttgtttgtttgtttgtttgttttttgacagtggcttgccctgtctcctaggctgcagtgcagtgtcacagtcgtgactcactgcagcctcagcctcctggggtccagcaattctcccacctcagcctcccaagtagctgggactacaggtgcatgccaccaagcccagctaatttttgtattttttgggtgtagacagggatcgccatgttgcccatactggtcctgaacaacaattagggctcaagccatctacctgcctcagtctcttaaagtgatgggattacaggtgacagccactgtgccaggct

SEQ ID NO: 317370 - DNA, 4001 bp, Homo sapiens
attaaaatacctggatgtcaaatatctattcaaagagtgaacacagggattaaaatcctggtgcttaaaatccttcagttgttccctatagcatttaaattcaaaactacttagacaaagcctttgtaaatctgactcctaatccaatctaccaaatcattctgccaatttccaattacaccaaagtatttaaaaatgttattctaatgataacttgcagaggatctgccatcattattacatttaagtagaagggtggcaaacaaaaagataccaaggataaacatgtgtgttaccaatctttcaggctacattaagttaaaagctgtttacgaaacagagttttgcataaaaaaagatattactgaaataaatattaaaatataacttccaacattcctttcacctttcctaagaaactaactaattagtttatgctcaggaatcatactgccaggacttgagttcaggctctaccaagttcctaataacctctctgaatctcatttcacattaacctctatgtcagtaatatctaccttgtaggattattgtgcaaattaaatgacagaaggtgaagcacttatcactattcctataatacaacaagagctcaaatatattcctctaatagttaactgttcaatgaacatagattcgagtggaaatcttaatttttggcttatcctcaaatacttttgtctctgacaatctgctgatgaggttaaaaatgttcattcaccatgaagaataccaattactcatttgcattctgaggacatccaggaagtcaggtggatgcaagaacttgatgtgatctgatcttcccttgtgtacagaggttgtctttaggcaccttgctcaatgtctagctcacagtagatgatcaatattttgagggaatactggaatgaatgaaaatgtctgcccaaatagcctcaaagtttatcataggactgaatcactgacatcgctcttccaatagcaaccgttctgacctatggatgccctaaattctaatttcaacttccaccatggggccatattcgaagaactcatataaaagtgaggcgacaatggatggatgctcagttgagggtacatggtgcttatggcagtcccaaagctgtatttaaaagggcacaccgcaggacaatgcatcaatatatatgacatcaagaataaaaatgagaatcccttctgcctttcatcttttaaaaactgtccttgatgttacatcaattttaacattgtaactcacctgttttttcagttatatctgaatcaggagtgtttgccctgctaacttccccttcagcattctcctcttcagcactaagagaaattggtgaagaagggccaggctgggaaggttgaggggttgcttcgggcgcttcctcaatcttattccttttctcaaagcgaaaacggtccaggttgaaaagattcatattggtagaaagcaccaccttgcagggatgggggctttaaatgaactatctgcaggggaaaaataaagagaggaaaaaaggccatgaaaacaatatacgatacaatgccacagcagtttattcccaaggcaataaagggcccgcaaacatgccagtggctcaggactgttatggctgcgcttcattgttaggccgcaacaattagaaggtggacgggggtatcttttaaaattttccattgcttttcactccccttcgtccgcctcccccgcccgcccctccttactgaaaccacgagctgaccctcatgcaacctcctcttacccaagcacgcgcaggcacgttccccagtataaccccctagcgggcctcgcgcccgcccacaaagagaagctccctgtgctaccgtgccccctgcctcgagaaaggacctgccagggcccgcgcctcgacactgcggggacacaaaggggccaaagaaggggagcggcggaggccgtgctggcgggcatccgcccggaagttgacgcggcgcgatcccagctgagaggaagctgataggattaagaacacacaggaaggttcagaggtggagtgcatgctaaggcatctttttaacgttcaatcgctcgcttgttctttcttccctcagtacttacgatcttgtagcctcagtgctatgtaacaaaggttgaaaataaaaaaaaaatttcctagcgtggggcgacggtagccgtgccgggaccttccaaaacaccacggagaaaccttaagagcgcgtaatgatgacgcaacacgcagcctaggctttttcttcccaaacaacgcgcgagccgacaatgtcgaggcgcgcgctgttgtcatggtaattcgtacccgtctccgccggcttgtaagggccagattgttctgtacctttgtcctgttaaattatctagagagttattaaatagaacaatagtaaatagcataatgacaaaaaataacaatatataatacaattagtatatattgtatgtattataatctgtagtgtttcacctataatataatgtagatagcataatagtaataatactgtgctaagctttttcagtgtataatcccaatccttacaagaagcctatgtttacaaagcaaagaaactgagacctgcaaatgtataggtaattagtgacggataagaaccccgggatgctgagcttcaaagcatttaaagtaattcctcactttcggcttgattgttcttagaatggaatttgattaattaattaattttttaaaaatattttaatttttaatgtttgcgggtacatagtaggtgtacatatttatagggtacatgagatattttgatacaggcatgcaatgtgtaataatcatatcagggtaagtggggtatccataacaagcatttatcctttgtgtttcaaacaatccagttattttagtcatttaaaaatgtacaataagctgggagtggtggctcacgcctgtaatcccagcactttggggggctgaggcaggtgaatcacaaggtcaggagtttgagaccagcctagccaacatggtgaaactccgtctctgctaaatatacaaaaaattagccgggcgtagtggcgggcgcctgtaatctcagctaatcgggaggctgaggcaggagaatagcttgaacctgggatgcggaggttgcagttagccgagatcactccactgcactccaccctgggcaacaaagcaagactcttgtctcaaaaaaaaaagtacaataaattgttgttgactgtagtcatgctattgtgctatcaaatactagatcttattcattcaaactgtattttcgtacccattaaccatgctcaccgaccaccggggtcctcccccgccccacactacccttcccagcctctggtagccatcgttctaccgtttctcatacgttcaattgttttaattttttagctcccacaaatataataaatgagaacataccaagttttttttctgtgcctgccttatttcctttaatataatgacctccagttccatccatgttgcaaatgacaggatctcattttttttaatggcgaaataatactccactgtgtatatgcaccacatttttcttattcattcacctgttaatggacacttaagttgcttccaaatcttggctgttgtgaatagtgctgcaacaaacatgagaatgcagatatcatttcgatacactgatttcctttcttttgcatataattcacctatcttgatggaaatgttagcttaagaatatatactcctggccgggcgcagtggctcacgcctgtaatcccagcactttgggaggtggaggcgggcggatcatgaggtcaggagatcgagaccatcctggccaacacggtgaaaccccgtctcaactaaaaatacaaaaaattagccgggcgtggtggcgggcgcctgtagtcctacctactcgggaggctgaggcaggagaatggcatgaaccagggaggcggagcttgcagtgagccgagatcacgccattgcactcca

SEQ ID NO: 317371 - DNA, 4001 bp, Homo sapiens
ttacatttaagtagaagggtggcaaacaaaaagataccaaggataaacatgtgtgttaccaatctttcaggctacattaagttaaaagctgtttacgaaacagagttttgcataaaaaaagatattactgaaataaatattaaaatataacttccaacattcctttcacctttcctaagaaactaactaattagtttatgctcaggaatcatactgccaggacttgagttcaggctctaccaagttcctaataacctctctgaatctcatttcacattaacctctatgtcagtaatatctaccttgtaggattattgtgcaaattaaatgacagaaggtgaagcacttatcactattcctataatacaacaagagctcaaatatattcctctaatagttaactgttcaatgaacatagattcgagtggaaatcttaatttttggcttatcctcaaatacttttgtctctgacaatctgctgatgaggttaaaaatgttcattcaccatgaagaataccaattactcatttgcattctgaggacatccaggaagtcaggtggatgcaagaacttgatgtgatctgatcttcccttgtgtacagaggttgtctttaggcaccttgctcaatgtctagctcacagtagatgatcaatattttgagggaatactggaatgaatgaaaatgtctgcccaaatagcctcaaagtttatcataggactgaatcactgacatcgctcttccaatagcaaccgttctgacctatggatgccctaaattctaatttcaacttccaccatggggccatattcgaagaactcatataaaagtgaggcgacaatggatggatgctcagttgagggtacatggtgcttatggcagtcccaaagctgtatttaaaagggcacaccgcaggacaatgcatcaatatatatgacatcaagaataaaaatgagaatcccttctgcctttcatcttttaaaaactgtccttgatgttacatcaattttaacattgtaactcacctgttttttcagttatatctgaatcaggagtgtttgccctgctaacttccccttcagcattctcctcttcagcactaagagaaattggtgaagaagggccaggctgggaaggttgaggggttgcttcgggcgcttcctcaatcttattccttttctcaaagcgaaaacggtccaggttgaaaagattcatattggtagaaagcaccaccttgcagggatgggggctttaaatgaactatctgcaggggaaaaataaagagaggaaaaaaggccatgaaaacaatatacgatacaatgccacagcagtttattcccaaggcaataaagggcccgcaaacatgccagtggctcaggactgttatggctgcgcttcattgttaggccgcaacaattagaaggtggacgggggtatcttttaaaattttccattgcttttcactccccttcgtccgcctcccccgcccgcccctccttactgaaaccacgagctgaccctcatgcaacctcctcttacccaagcacgcgcaggcacgttccccagtataaccccctagcgggcctcgcgcccgcccacaaagagaagctccctgtgctaccgtgccccctgcctcgagaaaggacctgccagggcccgcgcctcgacactgcggggacacaaaggggccaaagaaggggagcggcggaggccgtgctggcgggcatccgcccggaagttgacgcggcgcgatcccagctgagaggaagctgataggattaagaacacacaggaaggttcagaggtggagtgcatgctaaggcatctttttaacgttcaatcgctcgcttgttctttcttccctcagtacttacgatcttgtagcctcagtgctatgtaacaaaggttgaaaataaaaaaaaaatttcctagcgtggggcgacggtagccgtgccgggaccttccaaaacaccacggagaaaccttaagagcgcgtaatgatgacgcaacacgcagcctaggctttttcttcccaaacaacgcgcgagccgacaatgtcgaggcgcgcgctgttgtcatggtaattcgtacccgtctccgccggcttgtaagggccagattgttctgtacctttgtcctgttaaattatctagagagttattaaatagaacaatagtaaatagcataatgacaaaaaataacaatatataatacaattagtatatattgtatgtattataatctgtagtgtttcacctataatataatgtagatagcataatagtaataatactgtgctaagctttttcagtgtataatcccaatccttacaagaagcctatgtttacaaagcaaagaaactgagacctgcaaatgtataggtaattagtgacggataagaaccccgggatgctgagcttcaaagcatttaaagtaattcctcactttcggcttgattgttcttagaatggaatttgattaattaattaattttttaaaaatattttaatttttaatgtttgcgggtacatagtaggtgtacatatttatagggtacatgagatattttgatacaggcatgcaatgtgtaataatcatatcagggtaagtggggtatccataacaagcatttatcctttgtgtttcaaacaatccagttattttagtcatttaaaaatgtacaataagctgggagtggtggctcacgcctgtaatcccagcactttggggggctgaggcaggtgaatcacaaggtcaggagtttgagaccagcctagccaacatggtgaaactccgtctctgctaaatatacaaaaaattagccgggcgtagtggcgggcgcctgtaatctcagctaatcgggaggctgaggcaggagaatagcttgaacctgggatgcggaggttgcagttagccgagatcactccactgcactccaccctgggcaacaaagcaagactcttgtctcaaaaaaaaaagtacaataaattgttgttgactgtagtcatgctattgtgctatcaaatactagatcttattcattcaaactgtattttcgtacccattaaccatgctcaccgaccaccggggtcctcccccgccccacactacccttcccagcctctggtagccatcgttctaccgtttctcatacgttcaattgttttaattttttagctcccacaaatataataaatgagaacataccaagttttttttctgtgcctgccttatttcctttaatataatgacctccagttccatccatgttgcaaatgacaggatctcattttttttaatggcgaaataatactccactgtgtatatgcaccacatttttcttattcattcacctgttaatggacacttaagttgcttccaaatcttggctgttgtgaatagtgctgcaacaaacatgagaatgcagatatcatttcgatacactgatttcctttcttttgcatataattcacctatcttgatggaaatgttagcttaagaatatatactcctggccgggcgcagtggctcacgcctgtaatcccagcactttgggaggtggaggcgggcggatcatgaggtcaggagatcgagaccatcctggccaacacggtgaaaccccgtctcaactaaaaatacaaaaaattagccgggcgtggtggcgggcgcctgtagtcctacctactcgggaggctgaggcaggagaatggcatgaaccagggaggcggagcttgcagtgagccgagatcacgccattgcactccagcctgggcaactccatctcaaaaaaacaaagaatatatactcctgggctaggagcagtggctcacgtctgttatcccagcactttgggaggccaaggcagagctggggcaacatagtgagaccccatctctaaaaaaaatacaaagttatccaggcatgatggcacacgtctgtagtcccagctactttgggggctgaggcaggaggatcacttgagcctgggaggtcgaggctgca

SEQ ID NO: 317372 - DNA, 4001 bp, Homo sapiens
ctttacagtttgtaaatagaaattccccaattcttaagactaagtaagattaaacaatgatttcaagaaagagcagactatttgttagcaggttgttcttaatatatttaataccttgtaattttcattaaaatatgactgagcaatatgattaaaacctcaactaattctcaaggaaatttctaaatatggcagctatcaacacaaaacaatttttttggcttttgtttccttttgaagttgtttagaggtacattatcaaacctcactgattaacagggaaaaagcaaattatatagcttttaactaaaaaatatgcataatattgacttttgataattttattaagatattaaatctgctctagggtagggtttgggctaaaaaagtactctataaataaatcacatttaaaattctaaaggtttttaaagtaggagctcaaagttctaagcaaattaaaatttaaagcatatctgtatttacttgctaatttacactattaatttgaaaaagctcattcacctactttgctgtcttcactgaactcaagtagaaagtttacttttcagatacatttagactgttacataaaatatttcacatttggatggatggttagaacaaacaatatagtctttatgttcaacttttagaaaggggcaagatgttaggaggtttaagtaagtaatgcataatctccaaattcatgtcaagactaatttaaactctgctgattaattagtaggggaaatatgctttccacatgttaagttgctgaatattttttaaaaacatctggcacatatacctctggtaaaattgtataatttacttttactataagatattcgggcaagtatttacagcaactaaacaaactagtgcagataattgcatatcttattaaataaattagaatctcaacaagcctgagcaacccaactctgcaacaacataagagaccattaaagattaaaagaaagaagaaaaggaagaaaagaagaacaagaaagcccttcagcaaatactttaacaaataaatcactcaggcaaagccaaacaagttttgaaagggcctgctttgacagatgttctctggaaaagcaaaggcttcaggcaaaacaaatggttttattattattttttaaagctatggaatattattaatgttgtttctgtatttttcaaatattttaattaaaaaaatgtatttacaaccattgttcagggactctcccctattgccacttcaagacacttatcagggcatttaatgctcatttagatttgtttcaagtataaaattaaccacaaaagcaactttgctccctaacttagggaataaaacttcctaaaaaattttataaagcatcaagagtcgctgcatcttttaaagctgtaaaaaatcatccatattgcttttacaacaggcctatatacaattcctgctataaaagcccacgtaagggttgaagcaaaatttaagagttcttatatttatctgtatgaataagatttgatgactgttggcattcataaaactcaaaatgcaggtattctgtatacaacctgtttatagaaagtcaaattccagaaaatgatcatgcaaagtgtacttaccagtgcttatgccttcccttcacctaacgcttgaattataggcttccagaaatttttctatctttccaattaaaaacgctgcagcctgctacactccataaaatggccacgttgcttaaccaacaaaaacatgttagagactgagctgttacttttagaagaaaaaaagaaaataaacaattgcttcttttgtggtgaagcataaaacacttaggctggcattttgaatcatggagctcccctggccgttgctattgctcttcaagtagttgtagtaaaatttctgccacattcttgctttctgcatggtgtctcagcagtaacagatcagaacaggctagcaaacaactccttcctaaatgtaagctctaatttcttcttctgcagtgaaatgaacgaagtttctatgcaaaggaatgagtgacagtattcccagccaatcagcttgggttttttcaggaaaatcaccccttaattcattcaaaattaggtcatatgacactatttgaaatactattggcttacaatgaaagtaatgtttgactttacacaggataaggccacccatctatgcttacctgggctgaagacaacttgactataaccggtactgtgaattaaatacacacacacatacaaggggaaaaaaagaataaagccttaccagagcctcccaactattaaagggccggagttctgttatcttctgagcctttttctgagaacactgaggaatcaaagtaagttcaccaattgaagcatcttgaaggaagtgaagaattttacctttatagccatcctccatcacttcttcaccactactatagtcctcatctagtgaactaccgacatcagaacctgaatcatattcagagtcttcaacaactctctttggattaaaaacattttttttacgtttcttgttaaagccattttgtgctttcattgaaaatttctgttttagttttgttttagttgcatttttagggtaattttgacttcttgaagaaacttcttttccatttggaacctcactttgtgatacatattgcatatctgtatataaaagacaaaaacagtaactaaattagaaatacataaatataaagatagacttcaaataaaaacttaaaacatttacctattcctattgaatacagaagaattcaacgacaatttattgttaaatttgatacactttaaaaatacttaagtagaatttgaagttaaacaattgtttcaaaagcaggtgataacttgtttttaaaatgaattaaatataaatctctgttttctaacaaaggtcctgagaacacaaatggcagctgcgtatctgtatgatgtctcagatattcctagcagccccactcaactatgccaacactgaagaatatagcagaatgatgcttacactactataaagcttactaataaaaagtgtgtatgtttcaactatccataattttccaatactatcttcaatattctaagttgcatcgttacttaaaaaattattcaaataggctgggcatggtggctcacgcctgtaatcccagcactttgggaggccgacgcgggcagatcacaaggtcaggagttcgagaccagcctgaccaacatggtgaaaccctgtctctactaaaaatataaaaattagccaggcatggtggtgcatgcctgtaatcccagctactcagaaggctgaggcaggagaatcgcttgaacctgggaggtggaggttgcagttagccgagactgtgccactgcactccagcctgggcgacagagcaagactccgtctcaaaaaaaataaaaaataaaaaaaattattcaaatacagtattatcaaaaagccccactactttatcactgattatcagtttacagaattctaagatgcctgtgaatgaaggtaacaccattattttatgtaccagtgagaaaacatgcaccaatctataatacaatactttattcagaaatttttacttactcagaaagctattagacttacacagattatcatacctttatttttgtgcatttataaaaaataagcaaaatgaattggctaaagtattcctcaaatgttttcacattcataacatggctcttctgactcatttttcaaactcatatttggtggctttctttttgccacagaatatcattttctgtgccatcaacagtattggtagtatagccttttaaaacaatttattaaaaacaaacaaacaaaaaaacccaaaccaaaacaccaaaagctaccatgctgggtttgcaattatgaagagctagtctacttgattcttccttaggtatgttactaaacatgtatgactcaactcttccttaccacctctcctctatcatttggt

SEQ ID NO: 317373 - DNA, 4001 bp, Homo sapiens
ctataataaaagttatgtgaatgtggtctctgaaaatatgattgtattttcaaactgcggttgaccacagaaactgaaactcgggaaacccctgaaagtgaaaccacggataagggggcactactgtgtagtgaatacgctctaaaatttaaggtccaaagtccatgtctgaaaaatttaaattattactcaaaaaagaagtactagaatgtgaaaaagcaggttatgtactgaaaagcatatgtggtatgataccatatttgtataaaatatataaatgcaaaaaagtagtttagaagggtataaactaacattttggtgatctttgggtggcaggattattgatttttttttcctatctgcttttatcaacatcttctctattacacaaagtatttcgtataaccaaaaatattagttataggctagcataaaaggtaaaaagctgaaaaagaacttcaagaaatctttccttcttctaaatcagaaggattccaactacagtagtaagaaaaaatatctcaacggcaaacactggagaaaagattcgttaaggggttcatgttataccacaaggacatacccttcaaggaaataatctaaactcataactcttcctgggtttgataaggagcaattaactatcacgtactgttgttctttcttgctgttaaccactgaaacacctcaattaatgagttctcgggggtgaagcggtgttcttaaacaccacgttggaaaaaaaaaaaaagttaggacaaaaaggtttggttttctggtcgcagtgctgtcgacggccgcggagagcggcaagttcggagcaggctacactaaaggaatctgcgcggccagccaccctaagtggaagggaatgcaaagcctcctgcaacctccacagcgctgggcagcaagaatgcctcctaagcgtcccaacactccaacacctggaaggtcttacgctttccaagttataatatgtacagctgctgtttctgacaataacacacacaaactggaaggtctcttctgcaaatgtagctattacgtgtgtgaagctcatccgactctctcgatgcaaaagtaacacattctattaaggccacagcctcggttttgccaactggggcaactgaaaacatcctaccgactctctacagctagcaaaccatctcggctaaaatcctggcacatataaacagccactttggtgaagtctgcctttaaacagcaacacgggacttcgggtagagccggtaaccagtttatcacacactattagttccaataaagggtgctgctacctctttactgtcagccttggttccacttactgagcaaacagaaaaaggggatcctttaaattcgcgacacaataggagctaaaaagctctcgctttcagggtgtcagctttctcgtctcacttatcacaacaaaggacgcatcctagtgacttcaccgtacccagaaagggctgagggagacggtaaacaagatagtgtggatttcaggatttgtgagtttttccttccagctacgactctctttttactccatgatacgcctccacccgtcgacaatctgatcctaaaaataaaaccacccgtggctaccttgcccttgcctgcaaagccccgactctgacatcctgcagagaatacccaattgcaggctcttcgcgggggacgcgggctcggcagcagcggagcttctcccggtgcagaatcgccagcccggccgaggaaacgccaagcccgagaaacagccctgttctgccgcagccgccgcagtccccgagagcctgaggagcccccaggaaaaactggggcgaggggagggtgagccagcaaacgctggtgggagagggggagacactcacccgcccagacaacaaccgatggggcggggaggatgggggccgggaccgaggctcggcagaaagaccgcctggagcttccagaaggctgcggctgctccggacgctgctgccactgccgtttctggccgccggcttcctccccctcctctgttttgattcgagtgaccacgtcactcttagccacaagacccggatctgccggctcccgcgggcggcggcgcaacagattgcagcgcctggagactccagctgccccgcctgccgagcatgcgcatgcccagcgcctgccctgtgcgtcccgggaagccgggcgggagcctgcggcttcggacgcctacgacacgctgtgcgtgggggcgcggagtgcgggggatgtagttccggttgggaggggcgtggctgaggactgtgaagcaatcggggcgaggccgggtgtctgttcaactctcccgcgtatcgtctgtttcttcggcggcggacagtgttctgtaatgtgtctcccgttgcccgagctaaaggttttcctcgacggagtctttagaataccgtggtagaggtagacgcggttacaaattgatgtctgttgagacagtctacccctgtaaagtgtttttggttactcaggcccggatggaaattggagatggggattacaaaaatacatcaaatgtggctgttattgattccctttaccttaacatttttgcaccggaaacgaccaaaattaagttcaacaggaatattaataaaaggaatatgtagtcgggcttggtgactcatgcctgtaatcccagcacttcaggaggcagaggtgggcggatcacttgaggtcaggagtccgagaccagcctggccgacatggtgaaaccccatctccactaaaaacacaaaaattagccgggcatggtggtgcccgcttgtagtcccagctactcgggaggctgaggtggaagaatcgcttgaacccgggaggcggaggttgcagtgagccgagatcgcgccactgcactccagcctgggtgatagtgagactttgtctcaaactaaataattaaagatatgtgaccaaagatgacttgctggtcaggagataatggggaagtaggagggaatgctgtggctaggcagccagccagcccaagtcttagttgctttggttgtagagctggaataagagtgctgcttttacccaatcttccttttagagcaagttggtgcttcctattctcccattctagtctctgagtctccccgctaaattttgggggccctggaaatttcccaatttggcaaaatgcagaactatattgttttcttaggtccttcagttggcaagctttaattaaaatgggacaagtggcgaagtaaaagtgaatcccaaacaaagattttacgaaagtgcctctctgccagtcttgacggagaggtgaaagctgcaagctttcttactcagatttgatgaccttttcacttacccagacttccacctcagcaatttggttaattacccctcgacaagctgaatcaccttccccaaataagtatcatttacaagagctttttaattaaagtggatattgaacacaggtaaaggtttctagaaaattaaaggtttctggtaaaacttgaagtgtttcccagttaactaattgcaaagtagatacaaagaataaagattttggcccttaatctgcaaccttgaactctgcttactcaaattcagagtttgagatggaatctggtgccctaatgagctgacactgtaccaaagggtctttaatttgtgcaactccaaacaaaatctgttatgcttgagtgcacccatgggcacgtatgtgtttgagaacacagctgtgtttaagagaacagtatggtacaaaactagaattgtactggttgttgcaaaattctcagtacttggttttgttgttgttgtttttgttgttgttgtttttgtttgtttttgagatggagtcttgctctgttgcccaggctggagtgcagtggctcgatctcggctcactgcaagctccgcctcctgggttcacgccattctcctacctcagcctcccgagtagctgggactacaggcacccgccgccaccacgcctggctaattttttg

SEQ ID NO: 317374 - DNA, 4001 bp, Homo sapiens
actgcctgccttctagttaaaaatgcagatattatagttacattcactaaatgttcacccacagatgaacatcacctgatttgtctgtctcaagacattcagacaaccacagattctggagtatccctaaaagactgttgctgggatacacagtacaagtccccatcttgaccatttcatctcaagcagggtttctcaaccaaggcaccactcgaattttaagctgggtaattctttgtcatgggggtctgtcttgtatgcactgcaaaaagtttagcagtatccctggcatctatccacaagaaaccagtagcaacactcgaccccccccccgccccatcccaagttgtgacaagcaaaaatgtctccagattgagccaaatatcctgcggggcaaaatcacccctagatgagaaccacagctctagttttcagaactgacttttccaatgggatgcaaagcagaccctttgtcccaagttctagtggcctcaatataatcgctggggcaggcgtccgctgaagaaggatggtggaaacagatcccgcagggcttcacacagcccaccttactcccacgcatggtgcatgcagataagctggaaggcagaacacagtggccatttcagtcttggctaatgaaaagaagctacaaggaaatctgagtgtgcacttaaaacgctctgcctccagaaatcgactgctgcaacatttgtaatgggcagaacatttacacggagctttcgccttcaattcgccaagctttcagtgtccgttaatattcccaagggacagggttggccctcttccatcttcaagatgattcgggtttcctggtgaacaaaatgagcctctaatgcctaatattttctgtctgacagatggtttcagatgtatcaaagtgctaatccttgctgaggtataggtctcaaggaagaagagtttggcttttagaatgataggactggaatgattaagaaggaaaattactcccaggatttcaccattaccatgtgagcaatcggcttaaaacgaaggaaacaagcagaatcggaaaaacaatttgaggaaaaagaagagaaaacactacaaaccccaggttaacagtttgggtttgaaacagtcccactcaaaaaacatcttggggagtggaaatgaagtgcagtaaaagcacctttccactcagaaggatcagggttccatctggctcccccagtcaccattctcagcctgggtgcttggaggaggctctggacagaggcctggggttggatatatttgccttgtcacttacttgctgtgtgaccttgggaacgttataaaacctctgagcctctcagttccctcatttgtaaaatgggcatgttttacatatatacttcaaggtgagcttgtgcaaatgaaacgatccaacatatgcctaacctgacgtgtaataggcattcagtgaattttaactgtaaatatgaactggtacttagcgtcgacttatgtgaggactgctttcatatacatgatcacctgagtctcacaggaggctcggcattttagcatagatgacgtagccacaaacattcacagatgaggatactgagagtcctagaggttgagcaacttgtccacggtcacaaagctgcacatggcaggattcgaacccggctctccctaaccctcgagccaagttctttccacggcaccacgtggagctcacagaggggaggtgtgtgtgttggggagtcaggtcaccgcaaggggttagagatcactcactgtactcctccaatctcattaggggccggaagtagatgggatagaaggcggcgccgatcagggagatgaagccgccgaaaatgagcgcggtgcgcaggttccgggacatggcgtcaggccccgggctgccctgacccgccgaccgcccggcactctcggaaaccaggttaccgacggccgggccgtgaccccgctcggaagaggtggagaggctttcgcttccgggccttgagggagggacgaggaggaggggcggagcggagaaagagacaggggtggagtcagaggcggggcctcaaggctgggggcggggccaggaaaggggtggggtcacaggcggggcctcggaccccgccctccgccttccccgggattccgtgctgtgcgggccgggcgctggcgttggattgaggttggagctgttttgctgcactcgattcccgcgggccctgttctgtctactttccttccttcggcccggttcctccctcagcaccctccagacctcctttaccatcgccttctttaccagccagctttctcgtccatcccccgttaatttcttaattagcgactgtccgccgtgcgccagatgctctctgtcgctcgcgcaattaatccttttatcagtctgcttagtttacaggagagggaaccgcggctccgctgcgcggctttggacgagtcactcgtccttcttgagggaggtttgtacgtatcagagacaaaggggcaaatctctggcccgagagggcctgctgggggattctaaaaccggagctgcggggcttctgcaccaagactagcctaggaggaacgttgtttcagcatccgagctactctctttctccatcccatcctctctccctccatcccatcctctctccctgttccctgtgctgggatgccttggccaaggcagagagccagcatccggtcccatccatggggccacggggcgcttccgtattgtctgggtgggggccaccgagaacagatacctgtttcctcctcctcaagttgccatcctccgccctctgcaccacactgcccttacaagtgggctgtgcctgactatgacctgcccagggatactgggcagctgagacacagattccttgggcctccatgcctttataaataggaatcatgccagcagctgggcctggggagcaaagaggatatctgtcttgaccctagcagcattatttaggccacaacagatctacaagcgtttcaaaatagcttggagaggacaggtttcctctttctttgtaatcttgtagttgcatcaagctactgtctacctctgtggctctagaagcatgtaaatcagttattcaatctctccccagattcatggactatctgccatgccccaaacaccaggcagagtgctaaggggacacaaagatgaataagatgtgacccctgctctctaggatcctgtcgcatagatgaagagatagaacatatccataaaaagataactaatgaccgacattgcgtgctgccgacacgtgttatggtcctgcgggctacagaaattcagaggaggaagacagatgactgcagtgtggcagctgctcctcgggcacttacaggagcttgttaggatgaggacagaagacttcatagcacagagggaactgtgacaccagctttatatcacacgatagaaaatacccaggtgagggctgtggacagtggctcacgcctgtaatcctagcactttgggaggctgaggtgggtggatcatgaggtcaggagttcgagaccagactggccagcatggtgaaaccccgtctctactaaaaatacaaaaaaattagccgggcgtggtggtgcacgcctgtagtcccagctacctgggaggctgaggcaagagaatagctggaacctgggaggcagagcttgcagtgagctgagatcgctccactgcactccagcctgggtgacagagtgagactccgtctcaaaagaaacaaaaaacaaaaagaaagaaaatacccaggtgtagtgggcatcgtcgttttatcagccctgtggccacttcccttttttctgtgaatagtaccccaagtatctttctgggacccactcttttcccactcttggtccatgagataacctaggactccccatcctcatcctacttcttcccagctctgaaagttaagcataagggcctgaccaagcttcctcgtcacagggattggttggcacccagg

SEQ ID NO: 317375 - DNA, 4001 bp, Homo sapiens
cccttctgttgaaattgagtatcattctattacttttaaaaatatgcattaaaaaattctgaaacactaggttaaggacaataagggtagttgtccttaacctagtttttaatatatggtaggtgttactataaatgtttattatttcctcaaaatttagcatgcaaagattctcctaaatcctctgcaaaatgcatcttcccaggtcctattattcaggcttggatgaggactttaatactatatttttaataagtgagttaggtgactccatatgttaggaacaactactttaaactatctcattttatagagttttacctattgtgtaattgctagagtatggggacctacatttatacttatctgtttaatgcagtctgatattacagacttgagctgtccagtattgtagccatcagacatatggggctatttaaattaaattagattttaaatttaaatttaaccactagaacagtgtttcatcaacggttaatagttactaatatataagaaaaggtaacatcattaatgtaaaaagaaatctgaagtaatggttaatgagaaagtataaagatgtgtgatcgtgattaatgatacttactgtgaaacacgctgcaagagcccaaaggcccaagatccaagtcagtgatttcatcctttcagttgcctctgaaagtaagcacaataggtgatcagtatgattgttttttattaaaaagtactatttaaaatgtctcaacacatggatataatgtagtacagatatactactgtagcctttttaggaaatttgcctaacattattttggattcagtattactgtgggacaacattagtaggcttataaaatttgacttcaaaatagtggaagtagtttttatttttgacttgtaaactgatactggagataatgccaaagagttgttcataaatgattgaacaatagaagcttttgtaactacagtttttgcctttagaggtaactactttgacatgtacaattatttacatttgaatacttttgcatttttaaatagcaggtacattgttttatagatttctataggcttgggtttgaaatattaacatattaactagatcatatgttagtgtaattccttgggatatctcaaaaataaggaaaagaaagaaatcactctgtttgatgtagtgtaagaaaaaaagagtcatattatatatctcctagttttaacaacattccactaaattaatttagtctgtgatgtgtggtctcaaagtgcttccaaaaatccgtatatggtagatcaaagaccaagtcagagaatatggaggagtccagatattttattcacagttggctcacaatttgtgaaatatttcaagtacctgatagcttgagttctgggaaagcaactccatgcaccattgtacaaatggcttcctgacagtcaactctgcacataggttgagtgtgttgtctgaacaacgcaagttttgaaagaatcatatggacaaaatttcactggatattcaattgtatgtgggtgtggctattcccttaaggattacttttcccaggatccgttcttataagaagtttgaaaaacaaaagaaaaactaataataaacatatactgtggaacaattccctcttttagagtacatctgagaataatctatcattatgaagtttcaagaactttaaggaacatcaaggggaaaagtcaattgtgtacttgggtggactaattgtcctcaatgcccaacatgaatgctttactctgacatgtgaataacataatttttcaagatttgatatgtttaacgacttacaattttacataaggtgaaggtgcttatgtttttggtgataatgaatgtcctataaaaagctcatgaaaagtctgagaaaaaatttcttcagttaatatttccaggtacatacctttgcgtgaggatctgtcttagagttgattaacctgctggtcaaaatgactcttgccagttgaaagacagaaaataaaggtgaaaagagacaagaaacttcagttcttatatattgcaaaagatttctgttggcagtaaaagaaaggctacttggaaataaaataacttctgggctgatgctcttcaaacaaagataggaaagttgttcttgccaatttggcagtctttttccgcattttttgggtctcatttctgaaaagcattgacctgttcaatatttgttgtttcctggggaaacagattcaacaaataatatcctctcacttcagggaaacaatctggggcctgtggcgcaccatttcctctttattttaaagaaaaagcaccaactttttctatcccgagtaattttaatgggccatcttttgtattttctattttatttaatgggccatcttttgtattttctataggaagttcccttttgtcagtgaagaactgagaacaaccgtgttttaaaaatcatgtggtccctgttgttattaacttgagagttttaattaaatgaaaatatgatgacatgcaaagatttgattatgggaaaattatacagatatttttactttgaagtggatgtctaatggaaatttatagccttgtctttttgataaatctaggcactgaggataatttttcctatgctggatgatcttatactctcgttttaatacattattatataatcataataacagctattatttattgagcctctagcatattccatgtggcaggttaaaatgagttctattatcatctcagttttatacagagatgctaattagctgagcggaacttgaccttaagtcagcccacttcaaggcctaagtgatttttttaaccagtattccatattacctccctaatcttaacaatcaccatacactttactaacattgtgttacagtacatcagagagatgaatcaagtgaacttaatagttcattccacttcaaagcacagtaacaatacttccttgttgggttatatgagacaagatattttgccttattgtgtctcaatttcttcatttaaaaatatatatttaaaatgtttatatttataatttctaagtcatggagattaggaccttccttctttccttccttcctttccctccgtctttcctttccctccctccctctctccctcccttccttccttccttccttcccttttccttttatctttcctactaacatttattagctacctgtgggtgtaagacagagtgcaagttgctgaagttacagcatatctaaatgattagtgttttaaaatttttgtgagtcataggtgatgtagaaattaagaagtcacactttcagagttgatgttagttttgaatgactgtacttaatttcatttactttgttggagtttcactgcctttaaaaattctgatgacataattaagtgtaatacaatatattcctggtttgctaatcttagcccttaatatgttgctgaatgattacatgcccaaacgtcagtgaaaatggttctattcctaattaacatagaaattttcacttctttctttgacagtaattcagtgtgtcaaaagatgaatgtctcttctttcttgttttgatgccaacatattcatcagccaaatgtttgaagtcgaggtgtgatctacattgtaatggatcactggctctgagggacttaggatgaacgctggcaaaaccaacggacaatttctgagtgggttgtgaccaacaaagaatttgaggaacacaaacaaatggaagcacacgtctgttaagaaaaaggaacagttactccagttaatctttaattaacttatatggctttaaaagatcttgactgagtacttactagaacaatacctaaaggagctaatgtctctggtcccagaaaattcaaagtgacggtaaagaaaaattattgttagtgcagagatttatgtgacagatggaaaatatttccctaatataggtagactagcagatttaagttgagtcatgcagcaacatat

SEQ ID NO: 317376 - DNA, 4001 bp, Homo sapiens
tttatatataaatgcttagcattctcccaaaatttagcatgcaaagatacttgtagatccttagtaaaatgcatctttccaggtcccattatctgatactcttattgaagcttggatgaggtctttactatatttttaataagtgagttaggtgactctggtgtaaatgatccataaactacatgctgggaaaacggttttattttgattatctatttttatagagttttacctactgtgtaactgactagagtatgggaacttaacatttatacgtatctgtttaatgcagtctgataccacagacttgagctgtccagtatggcagccatcagacatgtgtggttatttaaattagattttaaatttaaatttaagccctaaacagtgtttcattgatgattaatagttactaatatataagaaaaggtaacatcattaatgtaaaaagaaatctgaagtaatggttaatgagaaactataaagaagtgtgatcgtgattaatgatacttactgtgaaacacgctgcaagagcccaaaggcccaagatccaagtcagtgatttcatcctttcagttgcctctgaaagtaagcacaataggtgatcagtatgattgttttttattaaaaagtactatttaaaatgtctcaacacttggatataatgtaatacaaatatcctactatagcatttttagggaatttgcctaatgttattttgaattcagtattactgtggggcaatattagtaggcttataaaatttgacttcaaaatagtggaagtagtttttatttttgacttgtaaactgatcctggggataatgccaaagagttgttcatacattgctctgagcaatagaagcttttatgactaaggtttttcccttagaagtaactactttaaaatgtatacttattttcatttgaacattttgatattttaaaaatagtagatacattatagatttctatggatgggtttgagatattaacattttaactagatcttatgttacaaattttattgcttggaagagcttaaaaataaggaaaaaaaaaaggaatcaccctgttggatatagtctaaaagaagagtcacataatatatttcctagttttaacaacattctattacattaatttaggctgtgatgagtggtctcaaagtgcttccaaaaatccatatatcagagaccaaggcaagaacatggagatgtccaggtattctactctcaattgggtcaaattttacaatatatttcaagtacatgatagcttgatttttgggaaagcaactccatacaccatggtgcaaattggcttcctgttagtcaactctgcacataggttgagtgtgtggtctgagcaatgcaagtcttgaaagaatcctatggacaaaatttcactggatattcaattatatatatgtgggtgtggctattcctttaactagtacttttcctatatccattcttaaattaagtttgaaaaacaaaagaaaaaccaataataaaaatattctgtagagcaattctgtcttttagagtacacctgagactattctatccttatgaagtttcaagaactttaaggtacatcaggaggaaaagtcaattgtgtacttggatggaccgattggcccaaatgcccaacatgaatgttttactctgacctgtaaaaaccagaatttttcaaaatttattgcatttaatgacttacaatttcatgtaagctacttatgtttttgctgataatgaatgttctatgaaaagcccataaaatgttatcgttgaaaatgttatctttgagaaaaatttcaatattcaaagtaaaaatattcagtttatatttccaagtacctacctttgtgtgaggatctgtcttacagttgattaatctgctggtcaaaatgactcttgccagttgaaagacggcaaataaaggtgaaaagggacaagaaatcttagctcttatatattgtaatggatttctgttggcaataagagaaaggctattcggaaataaaataacttccgagttgatgctcttcaaagataggaaagttgttcttgccaatttggcagtctttttctggattttttttcattcctgaaaagcattgacctgttcaacatttgctgtttcctgaggaaacagatacaacaaatcataatatcctatcacctcagaaaaacaatctggggcctgtggtgcaccatttcctctttatttcaaaggaaaagctggcacgagttttttctgttccaagtgatttaatgggccatcttttgttatttgctagtctcatcatattttctattttatttcaaaggcctccatatgtgcgaaatacaaatatttttaaactgaattctaacatgatcaggagaacctaggggaacaaaaatgataattaaaattaaaagtgcctaattaaataaatattgctaaataccacacacacacacatgcacgcaggtacgatgcatggccagtaatgtaaagaatatctaaaatttcacttgactgttttgatcactttgctatatgttgtgggtttcatgtttctattttttggttgaaataatgaaattgtattattgttttgtgcttgaaagtttgtatatatcttatcctatgtatggtttttcacagttgtcttcattgagtagatgtttctgaaggatgatgaaaatgagtgctgctattaagatttggatctaagtttcaaaaaagcaggaaagaaaaatctagtggtggaagagggataatagtcagaaggttcatgcagtttctcagtcttaactatatttcatttctttgtgattatcttaagttagtagactatttacaagaccttatatatgcattttttaggaagttccttttgccagtgaagaactaaatgagaacaactgtgttttaaaaatcatgtggtccttgccattattaacttgagacatttaattaaataaaaatataatgacaagcaaaatttttgattatggcaaaattatacggatatcttgactttgaagtggatgtctaatggaaaattacagccttgtttttttgataaatctaggctttgagcataatttttcctaagctagatgatcctataatctgtagttttgacacattattatttaataataacagctattacttattaaacctttagcatattccacgtggcaggataaaatgagttctattgttatctctgttgtacacatagatgacatagatgctaactagctaagtggggcttgacctaagtcttcccactgagtgaagacctaagtctccctacaggggcctgagtgagtttttaaccagcattccatgttgctccccaaatcttaataatcaccatacacttaactaactttatgttacagtacactgtagagatgaatcaagtgaacttaatagtcaggtaattctacttcaaagccaaataccaacaattctttgctgggttatatgagacaagctattttatctcattgtgtttcaatttcttcatttgaaaaatgtgtatatttataatttttaggtcatgaagtttacaaccaaccttcctttctcccctcccctcccctccctcccctccctcccctctctccttccctccttccctcctgccctccttccttccttccctccctccctcctacatttattgaatatctgctgggtacaagacatagtgcaagttgctgaatttacagcatatctaagtgcttagtgttttaaaaatcctttgtgaggtgggatagcaataaagaagctgcacttccagagttgatgttagttttgaatgactcttcttaatttcatttactttgttggagtttcactgcctttaaaaaattctgatgacttaattaagtgtaatacaatatactcctggtttgctaatcttagcccttaatatgttgctgaatgattacatgccccaacatcagtgaagatggttctattcctaatta

SEQ ID NO: 317377 - DNA, 4001 bp, Homo sapiens
tttgattcttaagaatattcttgattattttttaaaagactatgagtttttaaaactgttctctgaaatagaattatgtaggtacagaaacattcatttttaaaaagtcataaatattagggcaaaattaaaaatctggaaaagcaaacagtcgcattttttactattagctcaaatacacacgttcacattcacctacctacacatacctctgactcagtccacctttttgacaagcaatgatgcaaaaatgaatcaagagagagaactaccagcatttagagtattgattatcctaacccatcactcatgaacaagcaccaaactgacatttggggtttacctacctacatagagaacaccctcttttgtctttcctgctgcttctgccacaccctgtttggttttctcagcagcagccacaactccctccttggcctttgaaagtcctttcatgaatacatccatggctaatgaattcctttacaccacactggaaaacataaaatacactttgaatgagaactttcggggaaaaataaacaaaaaacactgaaaaatcatgagaaaccctccaaagtgtgagactcttttaagtgtacactcatttaaccattggacaaagcagacatttttagctctggcattaaaaatttagcatctcccatccatcttggctagtaaaagtctagccacctaaccacggattaggatgaatcctctgagttgttattactgcatttcagaagtggagttgcatgaaaagattaaccccttttttaaattcccggggtctaaagggtaacagtatgagttagaagcatggaagctggaggcttagggtcaggggtatccttaacatgaatcccagaagaaggctaacaggttgatggtggaaaggcgtaggcaacagaactaactgctcactcggggtgtggttcaaactcaggcaaacagcaggcccaagtgtgatggttctaatccatccaacatccacccccgccctcagctatctaccctgagcaggcgccgctcacactcgcgggccgtctccaaccccgcgccagccacccgagggggcgttctcagcctccaccctagcggaccccgcgccagcacttgttaacccgttaccacctgttgacttggcctccttgcacttccatttcattatttgccaaacgcagcttgcttactttacagagaaaaaccaagagagcgggcagacagattttatgtgagagaaaagttggatgctcacgctccatggagcatcctcgcgtttcccggggaaaagcggatcccggagaagcagcctaatctctcagcccttgtggagaagggaatatcagaagcaggacgaaagccaggtcaagtctctttccttaggctccccaaagggacaagtactcacctcccagagacctggcccagcgggtcctcatggcagcaccaccccctcccggtgcccacgaccattcgtctcccatccggcgttctccaggatttccaaagacgcccgtttagatccacaggtacttacctgagtccctctgcttctccacaactccgactcctccccgcctctctctttttttaaaaaaaaaatttaaacaattcccaaataatatttaataggaaagaagaaggaaaaggagcgcacaggaagggcggaggcggcacccgggggggactgtccccagaggaggccgctgtgagccggcgacgcgaggctgggggagtgggaggcaaacccgctaacctgtcgtcgaatggccactcccagttctccgctcacgagggtggaaaggcagaaggcttgaaggcaaggcgtgagggagcgcccaggacgctctcggaggggccgggccggggtctgcgctgcagcccgcacgcacctcacttccgcgtcgcggcgctcggtcgctcgccccctctcttgggccccttctggtcgtcgccgtcctcctcctcctagtcctcctccttctccttctcctcggctctccgcccccaccgctgatttgtcagcgcttctgcccgcccctctcccggcgctcgctgctttccctgcagcgtgctcctcgtccctatctcggatggggatggggcagggggcgcggggtgagccatcaactccagccgcctgcctggccgcgcaaggcgggaaagtgggggcgcttttgcgcctcacgttaagtttagggtcacgagcactcttgtggagatcgggagcggttgggctagggatgatgcctcttcctctttccccttcccctcccttcttgtccccgcctttcctctgggtcctcccggggaccaccccctacccctcgtcagagtcgccctgggagagccgagggcctgagggtcgaccaccaagggcagagcctatcccttggggagctgctggaggagacaggcagcgccgggaggtggctcacaccgcaccgccgagagcgctttgccctcgcatcgctgaaatttaatcacggtcacaggttacaacgttaggggtcgctttagttcaaatatcttcaaggttttcgtttgctcttaatctaggaagagccggaaagggtcctgagggtgaaagggagactactaaggaagagtcacaggttgaggaggcaggagaaggctcagcaaatcctctttccacgccactatcaccattttcctttccaccaatcagcgcctgccagacgctgattttcccatcagtggaacaaggaataaatattccccagccgtctaaaacaagcggtcctaaggcttttcgctctagaaatgggacttactttgcagacctccctttatctgggagacaaatccagcgtgatttagcctaccggaccatcatatccaatttcttcttcagccccttctgaaagggagatgctacacaccactcacctttctgacttctgattctcgttgccctcagaattgacacccccttttctctccccccacccaccacacgcacatgcacacagacatacacacgcgaacttcaagacaatttttgcatcgcttaacacattttcacctctttcagagctggaagacagctgttcctggatcacaccagaatggagaagcaagctcctcccactagcagaaagcctttgctttctgtgcctggattcggaagattagttaagcactggaagaggaggggggaaacaacaactcgtttttgctgtatgttttttttttaattgtttttatatttatagaaagttatgctttgtctgattcttgcgctaatttgggttctgaaatttgagtaaaatcaaatttaaacatacaaaacaactttaaaaccacaaggaacaggaagcaaatgattatacataaaagacatatagaagataatgcatatgtgttcagtggaaaatagaaaagcatgaaagtaagatcacaaatatttattatttaaactcttccttgaactattggtctgccctttggaaaagcagactttccttaatgcagtagctcatattaatattttttgtttgcttaggaccagagcaagaaggttggacttgggagctagtttgctgtctggctttgagaccttgaacaagttttgttctccttctgtttccagttttcttttttgtaaattaggagattaactcatgtgatcactctattttcaactttttgttatgggaaatattcaaacatatgcaaaagtagacagaataaaggactctcatgtgaagatcatccaacttttacattttttcaatgcatggctgatcatgtctcatccataagtccactcactttatcactaccaatcctccctcttttttttttttttttaccaaattcaagctttatatatatcttttcagctgtaaacattcagtatgcatccacaaaatttaaggactgtttaaaaataaccacaatatcattagatgattctttaaaattgcagtgtaatttacacctagggaaatgctcagatgttgtgtcccttt

SEQ ID NO: 317378 - DNA, 4001 bp, Homo sapiens
gccctcaagcacttttctctgtcctcagtgttcacagagaccaaatgatcacatgaagtaactctatcaaagactaatctgttctttccattttagggccacaaataggtctctttatacacatcacaggggcatatcaaagtcatattttaaaaatcagaatggattaaaattgacaaacatttttcatgatggtaaaagaaatcacagatccatcaatgattttgattcttaagaatattcttgattattttttaaaagactatgagtttttaaaactgttctctgaaatagaattatgtaggtacagaaacattcatttttaaaaagtcataaatattagggcaaaattaaaaatctggaaaagcaaacagtcgcattttttactattagctcaaatacacacgttcacattcacctacctacacatacctctgactcagtccacctttttgacaagcaatgatgcaaaaatgaatcaagagagagaactaccagcatttagagtattgattatcctaacccatcactcatgaacaagcaccaaactgacatttggggtttacctacctacatagagaacaccctcttttgtctttcctgctgcttctgccacaccctgtttggttttctcagcagcagccacaactccctccttggcctttgaaagtcctttcatgaatacatccatggctaatgaattcctttacaccacactggaaaacataaaatacactttgaatgagaactttcggggaaaaataaacaaaaaacactgaaaaatcatgagaaaccctccaaagtgtgagactcttttaagtgtacactcatttaaccattggacaaagcagacatttttagctctggcattaaaaatttagcatctcccatccatcttggctagtaaaagtctagccacctaaccacggattaggatgaatcctctgagttgttattactgcatttcagaagtggagttgcatgaaaagattaaccccttttttaaattcccggggtctaaagggtaacagtatgagttagaagcatggaagctggaggcttagggtcaggggtatccttaacatgaatcccagaagaaggctaacaggttgatggtggaaaggcgtaggcaacagaactaactgctcactcggggtgtggttcaaactcaggcaaacagcaggcccaagtgtgatggttctaatccatccaacatccacccccgccctcagctatctaccctgagcaggcgccgctcacactcgcgggccgtctccaaccccgcgccagccacccgagggggcgttctcagcctccaccctagcggaccccgcgccagcacttgttaacccgttaccacctgttgacttggcctccttgcacttccatttcattatttgccaaacgcagcttgcttactttacagagaaaaaccaagagagcgggcagacagattttatgtgagagaaaagttggatgctcacgctccatggagcatcctcgcgtttcccggggaaaagcggatcccggagaagcagcctaatctctcagcccttgtggagaagggaatatcagaagcaggacgaaagccaggtcaagtctctttccttaggctccccaaagggacaagtactcacctcccagagacctggcccagcgggtcctcatggcagcaccaccccctcccggtgcccacgaccattcgtctcccatccggcgttctccaggatttccaaagacgcccgtttagatccacaggtacttacctgagtccctctgcttctccacaactccgactcctccccgcctctctctttttttaaaaaaaaaatttaaacaattcccaaataatatttaataggaaagaagaaggaaaaggagcgcacaggaagggcggaggcggcacccgggggggactgtccccagaggaggccgctgtgagccggcgacgcgaggctgggggagtgggaggcaaacccgctaacctgtcgtcgaatggccactcccagttctccgctcacgagggtggaaaggcagaaggcttgaaggcaaggcgtgagggagcgcccaggacgctctcggaggggccgggccggggtctgcgctgcagcccgcacgcacctcacttccgcgtcgcggcgctcggtcgctcgccccctctcttgggccccttctggtcgtcgccgtcctcctcctcctagtcctcctccttctccttctcctcggctctccgcccccaccgctgatttgtcagcgcttctgcccgcccctctcccggcgctcgctgctttccctgcagcgtgctcctcgtccctatctcggatggggatggggcagggggcgcggggtgagccatcaactccagccgcctgcctggccgcgcaaggcgggaaagtgggggcgcttttgcgcctcacgttaagtttagggtcacgagcactcttgtggagatcgggagcggttgggctagggatgatgcctcttcctctttccccttcccctcccttcttgtccccgcctttcctctgggtcctcccggggaccaccccctacccctcgtcagagtcgccctgggagagccgagggcctgagggtcgaccaccaagggcagagcctatcccttggggagctgctggaggagacaggcagcgccgggaggtggctcacaccgcaccgccgagagcgctttgccctcgcatcgctgaaatttaatcacggtcacaggttacaacgttaggggtcgctttagttcaaatatcttcaaggttttcgtttgctcttaatctaggaagagccggaaagggtcctgagggtgaaagggagactactaaggaagagtcacaggttgaggaggcaggagaaggctcagcaaatcctctttccacgccactatcaccattttcctttccaccaatcagcgcctgccagacgctgattttcccatcagtggaacaaggaataaatattccccagccgtctaaaacaagcggtcctaaggcttttcgctctagaaatgggacttactttgcagacctccctttatctgggagacaaatccagcgtgatttagcctaccggaccatcatatccaatttcttcttcagccccttctgaaagggagatgctacacaccactcacctttctgacttctgattctcgttgccctcagaattgacacccccttttctctccccccacccaccacacgcacatgcacacagacatacacacgcgaacttcaagacaatttttgcatcgcttaacacattttcacctctttcagagctggaagacagctgttcctggatcacaccagaatggagaagcaagctcctcccactagcagaaagcctttgctttctgtgcctggattcggaagattagttaagcactggaagaggaggggggaaacaacaactcgtttttgctgtatgttttttttttaattgtttttatatttatagaaagttatgctttgtctgattcttgcgctaatttgggttctgaaatttgagtaaaatcaaatttaaacatacaaaacaactttaaaaccacaaggaacaggaagcaaatgattatacataaaagacatatagaagataatgcatatgtgttcagtggaaaatagaaaagcatgaaagtaagatcacaaatatttattatttaaactcttccttgaactattggtctgccctttggaaaagcagactttccttaatgcagtagctcatattaatattttttgtttgcttaggaccagagcaagaaggttggacttgggagctagtttgctgtctggctttgagaccttgaacaagttttgttctccttctgtttccagttttcttttttgtaaattaggagattaactcatgtgatcactctattttcaactttttgttatgggaaatattcaaacatatgcaaaagtagacagaataaaggactctcatgtgaagatcatccaacttttacattttttcaatgcatggctgatcat

SEQ ID NO: 317379 - DNA, 4001 bp, Homo sapiens
ctagcggaccccgcgccagcacttgttaacccgttaccacctgttgacttggcctccttgcacttccatttcattatttgccaaacgcagcttgcttactttacagagaaaaaccaagagagcgggcagacagattttatgtgagagaaaagttggatgctcacgctccatggagcatcctcgcgtttcccggggaaaagcggatcccggagaagcagcctaatctctcagcccttgtggagaagggaatatcagaagcaggacgaaagccaggtcaagtctctttccttaggctccccaaagggacaagtactcacctcccagagacctggcccagcgggtcctcatggcagcaccaccccctcccggtgcccacgaccattcgtctcccatccggcgttctccaggatttccaaagacgcccgtttagatccacaggtacttacctgagtccctctgcttctccacaactccgactcctccccgcctctctctttttttaaaaaaaaaatttaaacaattcccaaataatatttaataggaaagaagaaggaaaaggagcgcacaggaagggcggaggcggcacccgggggggactgtccccagaggaggccgctgtgagccggcgacgcgaggctgggggagtgggaggcaaacccgctaacctgtcgtcgaatggccactcccagttctccgctcacgagggtggaaaggcagaaggcttgaaggcaaggcgtgagggagcgcccaggacgctctcggaggggccgggccggggtctgcgctgcagcccgcacgcacctcacttccgcgtcgcggcgctcggtcgctcgccccctctcttgggccccttctggtcgtcgccgtcctcctcctcctagtcctcctccttctccttctcctcggctctccgcccccaccgctgatttgtcagcgcttctgcccgcccctctcccggcgctcgctgctttccctgcagcgtgctcctcgtccctatctcggatggggatggggcagggggcgcggggtgagccatcaactccagccgcctgcctggccgcgcaaggcgggaaagtgggggcgcttttgcgcctcacgttaagtttagggtcacgagcactcttgtggagatcgggagcggttgggctagggatgatgcctcttcctctttccccttcccctcccttcttgtccccgcctttcctctgggtcctcccggggaccaccccctacccctcgtcagagtcgccctgggagagccgagggcctgagggtcgaccaccaagggcagagcctatcccttggggagctgctggaggagacaggcagcgccgggaggtggctcacaccgcaccgccgagagcgctttgccctcgcatcgctgaaatttaatcacggtcacaggttacaacgttaggggtcgctttagttcaaatatcttcaaggttttcgtttgctcttaatctaggaagagccggaaagggtcctgagggtgaaagggagactactaaggaagagtcacaggttgaggaggcaggagaaggctcagcaaatcctctttccacgccactatcaccattttcctttccaccaatcagcgcctgccagacgctgattttcccatcagtggaacaaggaataaatattccccagccgtctaaaacaagcggtcctaaggcttttcgctctagaaatgggacttactttgcagacctccctttatctgggagacaaatccagcgtgatttagcctaccggaccatcatatccaatttcttcttcagccccttctgaaagggagatgctacacaccactcacctttctgacttctgattctcgttgccctcagaattgacacccccttttctctccccccacccaccacacgcacatgcacacagacatacacacgcgaacttcaagacaatttttgcatcgcttaacacattttcacctctttcagagctggaagacagctgttcctggatcacaccagaatggagaagcaagctcctcccactagcagaaagcctttgctttctgtgcctggattcggaagattagttaagcactggaagaggaggggggaaacaacaactcgtttttgctgtatgttttttttttaattgtttttatatttatagaaagttatgctttgtctgattcttgcgctaatttgggttctgaaatttgagtaaaatcaaatttaaacatacaaaacaactttaaaaccacaaggaacaggaagcaaatgattatacataaaagacatatagaagataatgcatatgtgttcagtggaaaatagaaaagcatgaaagtaagatcacaaatatttattatttaaactcttccttgaactattggtctgccctttggaaaagcagactttccttaatgcagtagctcatattaatattttttgtttgcttaggaccagagcaagaaggttggacttgggagctagtttgctgtctggctttgagaccttgaacaagttttgttctccttctgtttccagttttcttttttgtaaattaggagattaactcatgtgatcactctattttcaactttttgttatgggaaatattcaaacatatgcaaaagtagacagaataaaggactctcatgtgaagatcatccaacttttacattttttcaatgcatggctgatcatgtctcatccataagtccactcactttatcactaccaatcctccctcttttttttttttttttaccaaattcaagctttatatatatcttttcagctgtaaacattcagtatgcatccacaaaatttaaggactgtttaaaaataaccacaatatcattagatgattctttaaaattgcagtgtaatttacacctagggaaatgctcagatgttgtgtccctttaaatcagttttgaaaaagccatgcattagtgtaacccacactattttgaagacacaggacattttcatcattccagacagttaccttgtaccttcatgtgcatattctagaatgtcataaagatctaatcacgtagtataaactttgttttatatttgtctgacttcttttactcagtataatatttgtgaggttcgttcatgtcgttgcatgaatgggtgttttgttttttattgctttttgttgtttctttttactactgttaatagtataagttttccattgtgcctctttacaactagtatctcaatagagtattacaacaattatttaatatattatttcacatgacatatttatagtataaccatgacctccttgagacctagtgctttaagtcaaagaggtaaataaaatgagatattttaggtctcattacaacagaccaatgtgagagaattatttctggacagttgcacttcttataaacgtttaacatgattccaaacttttatttggtaatttgttagtcctttggcaaaggactaatgtactatgttatttagtcataacaagcagatcaattacattttatgtaacttttatagacagagaaactgagctccaagagttttggtgatatgctgagatcacctagctattttaagtggcagagctgagacaatttagcagaaactgttacagaaggcacaattgtctcctgaattagcagtttgtgtctgaagcctcacagattgggtgtggtaaagagtgagaaggaaaaaggtagaacccagctgtgttagaaatagccttcaaatttggatgtgacaatggaaatcaagaagaacttatgttattatgaaacagttcattcatatttaaagttttgccttttctatattggtattcctcaatagggggagatgatttcttactacctacaaaaaaagaaaactgtaaactaatttcgttgtcattttgaattacaactatatgtttaactcttgtcactccttaaaatgccttgaacacagtaaacatccaatgaacttttaattacacataatattgatagtgatattgcatatgttcta

SEQ ID NO: 317380 - DNA, 4001 bp, Homo sapiens
gctattttaggaattcaaggacaaaaataattaccaatattcattttccttagattatacttcccctcttctattacctgaaatcttcgggtagtattcatgagagatttatacatgctgcttcattttctctgtcacctttaaaatactattttctccaactcctctactaaacaatctttctagatgataatccacgttttacctacccagaggtgccagtgagctgggagatttgcgggaatgcattttccaggaaacagagtgctaacccacaacaggaggctttcaatgccctgggagatggtctgcaataccaggactttgatcttgacctaaccctctaaacttccttccctcacctactagtccctcttcatctcttacctcttaatcactgtttcaaaagcatttatcactatcccacagtatttatttattgcctgctcccccataagatctccagagagcaggatatttatgtgtcctgttgattcaaactcagcttccaaaacagtacctggctcacacaagatgctcaataaatatttaccgaatgaattataacatcttacagtactcaagaactaagacatattttattgatcaacaaacaaactagtaaaatctcagggtccttacttgccatggtagaaaaaaagaggagagacatatctgctccgcaactcctgctaaatgagatatgaaaaacggatggctaagtggagattttgtaagagaaaccaactttactaatttttgagaccacttctaaaaacaggagttgcctgctccttaatatactgccttgtttatcagcctactgagcgaaatgtctgttacctactaatgccttccgccattatctcagcgctgcattctgaactaacacactcagagtagtttggtgaagtgtggtgctttcttttaaaataaaggagtgagcaggtcatgtgataagcaaatacaaaccctggggacaaatgatcattaacaaatattcttatgaagttgagccactgccatttatcttaccccaaagcgcttgggcaatttcattagaatgatggtatcactcagtcaagcagtgagtgttaagctgggatagaataaagttccctttaaaggattatgagaaggaatgtggaagaaagatggggcagtgggtttggcactgaagaagagaagcgctcatttaaaacactgttctttcctacattccctaacccccgccctagtgtcccacagcgcgctgaggatggctttccttttgttgcaaaccagtgatttctggcatcccccttccaaatcacagaagccagcggggactgcacaactataatacgtatccgcatggtggaaggcaggatagggtggtgggaagggtacgcgggcttgggggtgaggcgctgggccagggaccgaagcaagtttcctcatcggcaaacggtcataaagttgcctcccaccgagaacggccagaagaaccaagcggatcgccaggaccgtgcgcagagcctgcacgtagcgaacgctgtgattcccttcttcccctcccacggcaagcgacaccgaaggtctggggacacccttagggttgtgactgaggatggttgtcgagtgactacagagcccagtaaataacgcgcatctcctccagcaccgcggagcgcggagcccggagcccggagcccgccgcgcgcgggcgccggggaacgctcgcgtccacggccgggcccgcagcccagccccctggctcccggcttcccgcttcgacaagggcatgccgcggccccccggagctcggggcgcgggagctggcaccggaagcggggagggccggcggagctgggcggccaggagtcgggtacttacccccggcgggcggcgggcggctgaggtcgcggccagccggctccaggcggcggcgaagtcgggcggctgggcgcgcgggctccggcagacgagggcaaacaggatccccagcaggaaggcggccgccgcgcagctcaggtacaggctgagcctgaacaggacggagctcagccccgcggcccccgccgcctccccgctgccgggccccaggaaggagagggccacggcggcgagtgcggccaccgccacgggcttccaccagctccggccgcccggggcccccggcgccgccgctgctgctgcctccgcgtcccccggggactccggccgccgctcgcccctgaagcccgagacaggacggccgccggcgcctgcggcccgcgcggggctggggccggcgccgccactgtcggtcgcatcggggtgcatgctgcttcctgggccgctaaggacaggcacatctcctgccccccggtcccccgccggcgctccggaggcagggggagcccgcgctcatgcctcgcccgcggcccaccgagggagcggcccccgcagacgccgccgggcccctctcggcgacccctcagcgccgccaccaggcgctgggcccgtagctgccgggccgggcgcagccagggagccccaccgtgttgtgactgaagcctggccagcctgacgcgggcggggcggggccgccctgaagtgcgtgtcgggcggggcccggagccaccgcggccgctgagtgacagccgggaggcgcccacccacagcgcgggggcggggtccgggccggggccccacggggagagggcgcgacccagcgcggtgcacacctctctttcccacgctcccctcctcctctacaggatgccgtctgttcatggaaaattttgctgcaggtgtcagcggcgctggtaattcctgagctcaggtgatcccgtaattctccctctccgctcatcactgacgagtaacctcttcgctttgcttacagccggcaaacatttctgcctggttttcactcgctatttaaataggcaaccgttcccgagactccctgtcacagtttctaacgaccttccctttcccaccctgccgccttagggaaggaatcagacacgtgcggtggagtaagtgaagcctgcaattcctagctatggaaaggtccaaagaagtcggcctggtgcaacagggtgcacgcagctgcccataatcactttggctccacttctggtttttgttttgttttgttttgttttttgttttttaccaactattcagttcaaatgctatcagccacgcaaaggaacgtggtccaaataatttttagagtatatatttgccttttcttctgtcatagtcccagccagtaatatacagataacgcttgctaagtagatgccaatatgctacttaaacactggcaattactgctaagactaataaagaagcagatgtagcttttgcttttagtatcaattggtattcatgggcatttcattctttctttctttctttttttctttttttttgagacggagtctctgttgcccaggctggagtgcagtggggcgatctcggctcactgcaatctctgcttcctgggttcaagccattctcctggctcagcctcccgagtagctgggattacaggcacgcaccaccacacctagcaaatttttgtatttttagtagagacggggtttcaccatattagccaggatggtctcaatctcctgacctcgtgatccgcctgcctcagcctcccaaagtgctgggattataggtgtaagccaccgcgcccggcctcatttcattctttcttaaaccttctaagtcagaaatgaagagtgcctcatgctagatgtgactttgccatgccaaggggatgatcaaaataagttaccagtttcctttctcctccttttttaagaaaataggggcgggcacggtggctcacgcctgtaatccctacactttcggaggctgaggcgggcagatcatgaagttaggagttcaagactagcctggccaacatagtgaaacttgaaccccggaggtggaggtcgcagtgagccgacatcgcgccattgcactccagcttgggcaacagagtgagacttcgt

SEQ ID NO: 317381 - DNA, 4001 bp, Homo sapiens
agacactattataagtactgtgcgtgggttaattccctgcatcctcacaagaacattattcagtgttatccccattctaaagtgtaggaaactgaggcacagagaggcgtgtgtcccgcccaaggtgacatgttcactaaggagctgaaggcaggatttgaaagtgtgtgtctgctccaagcccaaggtttaggcaccacactgcacatctctcatctagggcacttagcacagagcccagtacatagaaagttcccagtaaatggcagctcttagctatcagagagagctgctggtagagattttaaggaccattagctaagagatgctatggacactgtgagaggaggtccccttgaaaggctccaagaaggaggatccagaaagagggagaagcagagaaagtgatgttgaaggactcacctaaatgacatggcccaatgtggtactactaccccaaagccccagggagtaggcaggaaagtggggtaactctcctgccagacctggacatgaagttccccatcatcaaagacaccttcctcctaagacagccctgccactcagaagggctctgctgcttagaaagttctccctaaaagcacagagcaaaaccagattgttttgggtgtgtcagtgagctttctttttcaagaatccttgggaaataaacattttaaggagatgtttttctctgaaaccaaaagaagagccaggcatggtggcttatgcctgtaatcccacccctttgggaggatgagacaggagaatcatttgagtacaagagtatgagaccaacctggtagagacccccatctctagcaaaaaaaaaaaaaaaaaatagctgggtgtggtggcatgtgcctgtagtcccagttactcaggaggttgaggtaggaggatcgcttgagcccgggaggtagaggctgtagtgagccgtgatagtgatcgtgccactacattccagcctgggtgctgggtgacagaatgagaccatgtctcaaaaaaaaaaaaaaaaaaaaaaaaaagagaagaaggaggaggaggaggaaaagggggaaagaaaattctccctcaaacccaggtaaactctgacttcttgtttcttaagcctttgacacctcttcccctcgggaccaacttgattcttctcccacagcctcttgctcagtttgagctgtgaatgaccaagtgcctttttaagggcctcctttgtacgtggatctggaagggaggacggtgttatcagagaaagaggacagtgttatcagagaaagaggacaggggcccttatcctgaaccaaatagaggcaccaagcctttatctccttcctgggtctgtatctgggaagaacctgcccctcttgagccttgggtgtgtttcatccctcagctgtctcctagaaggagctcttgctgggagcctgagctggccagggcctctctgctttcctaaggaggtggctttttagagtacctgctgtcccataagtggctcccgacaccaaagccatgcaacatctagaaaggccccctttctcgtcactccagattccttttcctaacactaaaatcctcttggactggtctttgcagatccacaggaggaacggtttcttcctcccctccttgccttcctccccgctcactccacctccccactaacccctcagagcagccagggaaagtacatttccttcccaagaagatgatccaatttgttcccaagaagaggcccgttgccccaacccagcttcagactcaataagcacactccgagaagaacaaaatgaacctcaacttagcacccacctttccagctcctccaagagagctttctctcctgaaaagagagctgcacccagccagcccaggaacgcaggctgtccctggagcctgggctgttagcgcgagtgcaggaggccagcccagaggagtggtcagcgtgagggagccagtcattgggccagttcagggaggaaaagcaggccagacctccccgggttgtagaattgcttcgcctccacctcctcccgctctgtccccacctcctctgcccctcccatttttgggttttcgggccaaggattccattccgcgacttcaccggcttgtagccagtgaccttcagcacacagcaggggaataaaaatgagaaagaaaatcgcctgtttggagaggtgtacaatgacctctttattgagaggccctttgcttttctgtaagtcaataacttattgacttatttttgctgcatggaaatgggcaccttgcaaatgtgcgtggcatttgctccagagctgtgctgtcatacctatgagagcagagcagcgggtgggtcgtgatgacacactcaggctgcagagtcccagccttgtcacttcctatctgtgtacgcctgaagcagctgcaccactccctgcacctccttttcatcatctgtaaaatgggggtgtgaggctgtccaccccgcacgcccaccgtgaagatccaatgagatcattactcgcccagtgacaacacagtggctggcactagccgcactcataagtaatcatcattgtcattgtcgttaccgttattattaaagagatgaaggagtctttttaaaaaatgtgttgtctgggagaactaggagtgtttccctcccgacgtctgtcctttttttgctgccatgaacttttctcaatcatagcagccctttccaaaaatagaagctcttctttcccagaaaagcccatgtgggaaaaaccaggcagcctgcttgctggcctgcccgtcctcctgcattcctgcaacaaatgtttattgggtgctcatccattccagtcaccatgctgtatgccgggcacccacagctgcatgagtcaccttgggggttcatactctggggacggagacaacaacgtcagtaaatgcatccagtacagagtggggagcgcagcgacgaagaatgaacagggcctcgtgaggtcccaaacacccgtttcggtggcaggaaagcttataaaaaatctaaatctctggatcccaccccaggatgggtgacttagttaccagcaggagcttcctagaatcatcttggaaaaactcaaactaatgatctttatccagggacaggcattctgcgagataagagggagacttcccagaactgagactccagcccttccaccctaccgtccttccttctggcccgctgagaactcaggcaccagtagctcagtcttgcacctctgcattctgttggtaggcgtagttatcctcaactaatgagttttcagagttccccatgccacccaccaccccacccccaccctgcaacagtctagttccttattgtgaatctttcttcccatttttaaaacatttatattttcattcagttcttgaaatcctaattatatacattcatagctactattttaaatggcacttgcttcacttggcctaattttatttcgtttaaggtccaagaaagcacgtctccgttctggtattctaggacttgtgctaaagcctagatttactttcattttgatggcattctagaggaaatctgcctttttctcgccaccgcccccaacctccccaccatggcaacattcattccctcttcctttggtaacaacatcccaatttcctttctgagaaaccactatactttcagtccagcaggtggtgttgacttcatctcctgctccagaggtagcttgtggcttaggtatgataaatcgtactattgcactggttcagggatgatccaccttcagagccaatgagatgcaatgccacttttcactgggactgttgaaagagatgcatcctctctttcttactggacttgaaactggagaaaaaaggctggagttattgcagccatcatgctccactaagggagaagctgtctgaggataaggccaatgcagaaggctgtggaataaaagtagagtgagagctcagtgcagtggtatacgcatgtgtagtcccagctactagga

SEQ ID NO: 317382 - DNA, 4001 bp, Homo sapiens
ttggaaaactattctcctactgctttagcattctcttatcttagggcttatgaacattgctacatctctgaaacaggcggttcctgcccatatctatcagtgaaaattatacttaaaattctgaagagactcatgtcatccagattttggaggaaaaaggtagcaaataaaaatatacttcttagaagtagatctcagttactacttattttaaatttcacagtagattccatcttttgtagataggggttttgttcaaagtttttgaccaaacatttttattaaatattttcaatagtattataagtgatctgacatttttggtaacaaaacaaccaaagaactgacttgagtaaagctgaaatgttgctgaaccagaatctaatccttactccgtcattttcttaccagggattttgatttgactgaccagtttcaatccacagtaacagctttgttcctaagagactataaatcaaggaaatactcactaccaggcaattcctcctgcaattcggggtctgtgctgttattatgaagcaactgacagcaaacatttgctgcaagtatgagcgcagatttggatgaggtgtgcggtgtttttggtttcactctttatctctgaaacctatctgcttgtgagaaaaattgtgcaagaaaagaagttttactgccacatacctcagctgtcctagaactcaatgcagaggcttcgcttcctttctttccttggattctgagccgggggagcacaatgggggtcttgtgctctgggccagcaaggcatgcagatactcggaaaggaggtgtgaacggcttccaatacctacactgtttgctttacaactaccccaactaaatcaaacaggacaccaagacactcagtccagggtaagcaagtacaaaatccactggctattatgacccacatagagaacagaattcttcaatttaagtgtgtacatagctgtgttaagagttaaataaatcatttacgaggcttaaaaagaaatgcttctcatgtagttctttttcatgtagttctctgaatacaagtcaaagtgcaggtcacgaaagaatccattgttcacaagcgagaaatgttgttggctgtgaggacggttcagaacaagccatcgtagtctgctcaaacagtaaatattggttttaaaaccccaaagcatatcggtcatgttttttatcttccaattgctagaaccaaaattcactgaaacaactctatgtctctgatactattttctagaaatgtgtgtgtatgcgtgtgtgtatgtgtctgtgtatgtttgtttggtaaatccaaatcacacaatcaacgtaaatctttcaggctaagttttgccccagttatttttatgctgtgctttcaaaaaggtcaaaaaagcttacctctgtcagtgtactgggacgctcaggaagccccttctccgcctcggcctcagcgtgcagacatatgccctgggagcccacaatctgttaacaggaagcaggtaaacccgagagcgtccgcctgcgttccagtccagtgcccgtcccagcacacacctgctttttcagacctgccgctcatatgccacagccacgcacaggaccagcgttagcagagtgcaacaccctccgtttggatccctcgttttcagggtaagcagctagggagctgctgagataatattgcagggaaagcttgccttcccaagacaaaaacctttgctgctgcctgatagcagatatgcagcattatcactctgcattccacattctccaatcagctaattggaacggcagtcaacagcctgtccaaaaggcagcttgcaggcctgcgtggctgtgatcattgtatactaacatgcccattgcttctctcttccctgaagagatgtataaaagaggcttcttccagggcgaagctcagcagaatatgccacactgttttccataagtaaaatggctggtcctctcagctctgctgcagacagctcattgggttccactggcttttcgtagccatagcaacaaccaacagacagacttagcaagcatggctgatcatgtgcagcacactcacacagcttgttaatttcttttcatcaaactcatcatttttttgaggagggtagcttctgttatctttctacacatttcaccgatagtgcaagtgctccgatttttctgctctcctgaagaactcttttttatatgagccggggctatgtatgaaatcgaggaagtgaagccctattagtggctatccaggttaataacatgcaaatcacttaagagaccctaactggaagcattgtcaaaacaagccccaccttccagtcatagaatgagtgcagagagctgcaaacgggagagttacactttttgtttttaaatgataatcttagagccacttaattgaaacaaaaccctgtgaattgctatatagggtcagaataataactaaatcaggtagactattttaataagatctttaaatatccatttacttatggctcaacttatctgattactttaagatgctttttatgcaatttaaaatagaatttttaaaaaatcctattgcttctacggcagaaaatgattctttaactcaatcttatttgtaaattaaaaattctttttaaaaaatccgcacctaattaaaaattctttgactttaaacattaccttcaaggcaagaatagttttacttcctcagtaaaatggatcacattccacccgtccataacatttcacctcctctgggaatctaccatgattaatgccatgaacaacgtaaatcttctgcagaacccccaggcttttcttctttttcaggactctatcaccagtcatattctatctgatatatttccaaggcactgtcccatttatttttgtttctagcaatctgtttcaaatagttatgttaacactttggacttgtaaatatagatgttctatttgctaagtagtcattgatttaggattccgtcagtattgcgtttccctacccatgttaacactcctgccttcagtattaattcccaaattttgactgcataggaatcctgtggatgtagatttggggatgcccgctccccttcctccccaaccggattcacattaggtaggtctgagccacccagggtcagcgtatccatggaggacaagtgggtggcgctttcctgcttgggagagtcctcaccgcttcagatcgcctccagccagcctaccttttctcactgaagttcccttccctgaagttattttgcatttgctgttgctgagcgtgcccctgccttcgccctcagcctcccattctactattcactgcccacgtttcagaatcctgcattacacaccatttccttgccctgcagatgctgctactattaaaaaccttctcaatctgactgctcctcgccccagcacctttaacctccatcccaatctgcctcctcttttatcttccaacacctggcccaaatggaccacctcactcatgactctcccaggtggggtctgagcgacctcttctgcgactcccctgtaccggggtccacctctgctattacaggccttgtcacgccctgggacttcttagcagttctccttttatgtctgactcccagactgttctatcaactctctggaagccaatctggtccatgtcttctttgccctccatgcttggaatattctaatttctcaatgcctctaaatgaggacctacgacactgtatgaatagggactgatgactggctggtgtgaaatctgtgttttaatttacttttcaacatcacacatttgttgactcatcacttcagaagaacttcagtgattttgacaaaatgctggcatgttacaaaaggatatcaagaaaactctaggtgcacttgatgttttagggtggcttttcttttcattgtatctctgaaaatgtctttataccctcacacttgattgattggttggcaaggcataagaatctctg

SEQ ID NO: 317383 - DNA, 4001 bp, Homo sapiens
tgataaaaggcagtattaggacttctatttctaggtcaagtctatatttacagtaactaataggaaaatattgaagtctgaggttaccagtacaatgtctgaatgcaaaattctggacactggacaaagtactttagaatcagaggccagcaaagctctggaaggctgtgaacagggacaaatgcaatatggttcagcagacagaaagtcagaagtaagattcagatgtagccaagcagggtgggggacagtgaggggggatgtctagctggacttgaagggcgtatgaaagcagctgtccttgcaggggagatttaaaggaaatgactcttcagggggcactgcatttgcaaaaaaaaaaaaaaaaaaaaaaaaaaatctgatatagtatgttttggaaattccaaaatatttgatattgccagcagaagagttggaaagtggcagaaaataagggtctaaaaatagccataagcgaaagtgcaaagtcttgaaggatagagattatgtctctgaacctggttctcaaaattgttgaattattaactatggagatgcgctgtacagaattgaacttaaaatggtcatctgtgtatagcatgtcatcttaaaaggttactaaaataggaaagaacttgcacaggtataaagtgtgtgccattcctcccgtgggctaagggtcttgtctcacttggtgccactatcaatgcaacaggcacagcagtcgggtgtgccctggatatttctacacctcattcttctaaaagctcccccaagaaaaattaataggaaatcaggtgcttgctgcaggtctttgcactgtgtcaattctaagaaatcctttggcagtgtaaagctttgaaggaaattaaattggagagagattttctctacctttcattcagctcatatagaatcccttacttagctgatatttttgctcatagaattggactcagaactaagtctgttcatttagctttcctttgaatgttaaacataatgaagtacaaggccgtcacctcaccattttatcccctacaacccgcataggcgtacacttatcaccaaacgtttgcacatgtttggctccactgagattcttagtctctatctttatattttgactattttgacatttagaacaaaagtttggaaaactattctcctactgctttagcattctcttatcttagggcttatgaacattgctacatctctgaaacaggcggttcctgcccatatctatcagtgaaaattatacttaaaattctgaagagactcatgtcatccagattttggaggaaaaaggtagcaaataaaaatatacttcttagaagtagatctcagttactacttattttaaatttcacagtagattccatcttttgtagataggggttttgttcaaagtttttgaccaaacatttttattaaatattttcaatagtattataagtgatctgacatttttggtaacaaaacaaccaaagaactgacttgagtaaagctgaaatgttgctgaaccagaatctaatccttactccgtcattttcttaccagggattttgatttgactgaccagtttcaatccacagtaacagctttgttcctaagagactataaatcaaggaaatactcactaccaggcaattcctcctgcaattcggggtctgtgctgttattatgaagcaactgacagcaaacatttgctgcaagtatgagcgcagatttggatgaggtgtgcggtgtttttggtttcactctttatctctgaaacctatctgcttgtgagaaaaattgtgcaagaaaagaagttttactgccacatacctcagctgtcctagaactcaatgcagaggcttcgcttcctttctttccttggattctgagccgggggagcacaatgggggtcttgtgctctgggccagcaaggcatgcagatactcggaaaggaggtgtgaacggcttccaatacctacactgtttgctttacaactaccccaactaaatcaaacaggacaccaagacactcagtccagggtaagcaagtacaaaatccactggctattatgacccacatagagaacagaattcttcaatttaagtgtgtacatagctgtgttaagagttaaataaatcatttacgaggcttaaaaagaaatgcttctcatgtagttctttttcatgtagttctctgaatacaagtcaaagtgcaggtcacgaaagaatccattgttcacaagcgagaaatgttgttggctgtgaggacggttcagaacaagccatcgtagtctgctcaaacagtaaatattggttttaaaaccccaaagcatatcggtcatgttttttatcttccaattgctagaaccaaaattcactgaaacaactctatgtctctgatactattttctagaaatgtgtgtgtatgcgtgtgtgtatgtgtctgtgtatgtttgtttggtaaatccaaatcacacaatcaacgtaaatctttcaggctaagttttgccccagttatttttatgctgtgctttcaaaaaggtcaaaaaagcttacctctgtcagtgtactgggacgctcaggaagccccttctccgcctcggcctcagcgtgcagacatatgccctgggagcccacaatctgttaacaggaagcaggtaaacccgagagcgtccgcctgcgttccagtccagtgcccgtcccagcacacacctgctttttcagacctgccgctcatatgccacagccacgcacaggaccagcgttagcagagtgcaacaccctccgtttggatccctcgttttcagggtaagcagctagggagctgctgagataatattgcagggaaagcttgccttcccaagacaaaaacctttgctgctgcctgatagcagatatgcagcattatcactctgcattccacattctccaatcagctaattggaacggcagtcaacagcctgtccaaaaggcagcttgcaggcctgcgtggctgtgatcattgtatactaacatgcccattgcttctctcttccctgaagagatgtataaaagaggcttcttccagggcgaagctcagcagaatatgccacactgttttccataagtaaaatggctggtcctctcagctctgctgcagacagctcattgggttccactggcttttcgtagccatagcaacaaccaacagacagacttagcaagcatggctgatcatgtgcagcacactcacacagcttgttaatttcttttcatcaaactcatcatttttttgaggagggtagcttctgttatctttctacacatttcaccgatagtgcaagtgctccgatttttctgctctcctgaagaactcttttttatatgagccggggctatgtatgaaatcgaggaagtgaagccctattagtggctatccaggttaataacatgcaaatcacttaagagaccctaactggaagcattgtcaaaacaagccccaccttccagtcatagaatgagtgcagagagctgcaaacgggagagttacactttttgtttttaaatgataatcttagagccacttaattgaaacaaaaccctgtgaattgctatatagggtcagaataataactaaatcaggtagactattttaataagatctttaaatatccatttacttatggctcaacttatctgattactttaagatgctttttatgcaatttaaaatagaatttttaaaaaatcctattgcttctacggcagaaaatgattctttaactcaatcttatttgtaaattaaaaattctttttaaaaaatccgcacctaattaaaaattctttgactttaaacattaccttcaaggcaagaatagttttacttcctcagtaaaatggatcacattccacccgtccataacatttcacctcctctgggaatctaccatgattaatgccatgaacaacgtaaatcttctgcagaacccccaggcttttcttctttttcaggactctat

SEQ ID NO: 317384 - DNA, 4001 bp, Homo sapiens
taatagccatggatagaaaaatagtattatttatatactaaaacattcaagttgttttgtttaaaacatacattgtaaaattttccctcgggaaatttggatttattataggacagttgtagcttttatgaaattgggatcctgaagccatattttcaaatcagaaaaatgaaagcctcattgttgtttttcaaatgttttaagtttccttgataaaaggcagtattaggacttctatttctaggtcaagtctatatttacagtaactaataggaaaatattgaagtctgaggttaccagtacaatgtctgaatgcaaaattctggacactggacaaagtactttagaatcagaggccagcaaagctctggaaggctgtgaacagggacaaatgcaatatggttcagcagacagaaagtcagaagtaagattcagatgtagccaagcagggtgggggacagtgaggggggatgtctagctggacttgaagggcgtatgaaagcagctgtccttgcaggggagatttaaaggaaatgactcttcagggggcactgcatttgcaaaaaaaaaaaaaaaaaaaaaaaaaaatctgatatagtatgttttggaaattccaaaatatttgatattgccagcagaagagttggaaagtggcagaaaataagggtctaaaaatagccataagcgaaagtgcaaagtcttgaaggatagagattatgtctctgaacctggttctcaaaattgttgaattattaactatggagatgcgctgtacagaattgaacttaaaatggtcatctgtgtatagcatgtcatcttaaaaggttactaaaataggaaagaacttgcacaggtataaagtgtgtgccattcctcccgtgggctaagggtcttgtctcacttggtgccactatcaatgcaacaggcacagcagtcgggtgtgccctggatatttctacacctcattcttctaaaagctcccccaagaaaaattaataggaaatcaggtgcttgctgcaggtctttgcactgtgtcaattctaagaaatcctttggcagtgtaaagctttgaaggaaattaaattggagagagattttctctacctttcattcagctcatatagaatcccttacttagctgatatttttgctcatagaattggactcagaactaagtctgttcatttagctttcctttgaatgttaaacataatgaagtacaaggccgtcacctcaccattttatcccctacaacccgcataggcgtacacttatcaccaaacgtttgcacatgtttggctccactgagattcttagtctctatctttatattttgactattttgacatttagaacaaaagtttggaaaactattctcctactgctttagcattctcttatcttagggcttatgaacattgctacatctctgaaacaggcggttcctgcccatatctatcagtgaaaattatacttaaaattctgaagagactcatgtcatccagattttggaggaaaaaggtagcaaataaaaatatacttcttagaagtagatctcagttactacttattttaaatttcacagtagattccatcttttgtagataggggttttgttcaaagtttttgaccaaacatttttattaaatattttcaatagtattataagtgatctgacatttttggtaacaaaacaaccaaagaactgacttgagtaaagctgaaatgttgctgaaccagaatctaatccttactccgtcattttcttaccagggattttgatttgactgaccagtttcaatccacagtaacagctttgttcctaagagactataaatcaaggaaatactcactaccaggcaattcctcctgcaattcggggtctgtgctgttattatgaagcaactgacagcaaacatttgctgcaagtatgagcgcagatttggatgaggtgtgcggtgtttttggtttcactctttatctctgaaacctatctgcttgtgagaaaaattgtgcaagaaaagaagttttactgccacatacctcagctgtcctagaactcaatgcagaggcttcgcttcctttctttccttggattctgagccgggggagcacaatgggggtcttgtgctctgggccagcaaggcatgcagatactcggaaaggaggtgtgaacggcttccaatacctacactgtttgctttacaactaccccaactaaatcaaacaggacaccaagacactcagtccagggtaagcaagtacaaaatccactggctattatgacccacatagagaacagaattcttcaatttaagtgtgtacatagctgtgttaagagttaaataaatcatttacgaggcttaaaaagaaatgcttctcatgtagttctttttcatgtagttctctgaatacaagtcaaagtgcaggtcacgaaagaatccattgttcacaagcgagaaatgttgttggctgtgaggacggttcagaacaagccatcgtagtctgctcaaacagtaaatattggttttaaaaccccaaagcatatcggtcatgttttttatcttccaattgctagaaccaaaattcactgaaacaactctatgtctctgatactattttctagaaatgtgtgtgtatgcgtgtgtgtatgtgtctgtgtatgtttgtttggtaaatccaaatcacacaatcaacgtaaatctttcaggctaagttttgccccagttatttttatgctgtgctttcaaaaaggtcaaaaaagcttacctctgtcagtgtactgggacgctcaggaagccccttctccgcctcggcctcagcgtgcagacatatgccctgggagcccacaatctgttaacaggaagcaggtaaacccgagagcgtccgcctgcgttccagtccagtgcccgtcccagcacacacctgctttttcagacctgccgctcatatgccacagccacgcacaggaccagcgttagcagagtgcaacaccctccgtttggatccctcgttttcagggtaagcagctagggagctgctgagataatattgcagggaaagcttgccttcccaagacaaaaacctttgctgctgcctgatagcagatatgcagcattatcactctgcattccacattctccaatcagctaattggaacggcagtcaacagcctgtccaaaaggcagcttgcaggcctgcgtggctgtgatcattgtatactaacatgcccattgcttctctcttccctgaagagatgtataaaagaggcttcttccagggcgaagctcagcagaatatgccacactgttttccataagtaaaatggctggtcctctcagctctgctgcagacagctcattgggttccactggcttttcgtagccatagcaacaaccaacagacagacttagcaagcatggctgatcatgtgcagcacactcacacagcttgttaatttcttttcatcaaactcatcatttttttgaggagggtagcttctgttatctttctacacatttcaccgatagtgcaagtgctccgatttttctgctctcctgaagaactcttttttatatgagccggggctatgtatgaaatcgaggaagtgaagccctattagtggctatccaggttaataacatgcaaatcacttaagagaccctaactggaagcattgtcaaaacaagccccaccttccagtcatagaatgagtgcagagagctgcaaacgggagagttacactttttgtttttaaatgataatcttagagccacttaattgaaacaaaaccctgtgaattgctatatagggtcagaataataactaaatcaggtagactattttaataagatctttaaatatccatttacttatggctcaacttatctgattactttaagatgctttttatgcaatttaaaatagaatttttaaaaaatcctattgcttctacggcagaaaatgattctttaactcaatcttatttgtaaattaaaaat

SEQ ID NO: 317385 - DNA, 4001 bp, Homo sapiens
tcactcgtaaaacagacttctggctactaaggttttttttttttttccagttttcttttgattctaattttctttttctttgttatttcttcccgtttttgttactcagacgatccttatgtggttaaaatgcatgctttcctttgatatgtgctctgtgataccaataaacttttctgaaaaaaaagtatttctgaactccaaagatttcagcatccatgtttttaaaaagcaccagttgggccccaaggcacacggagattctgaggcagcagggcagccagcgcggggctctgtgcactctcatttgctgcttgctcttacacatctgccagacaggggccatgaactgtcctgaagtctgtgttggggagaactttaccagagaacacttttcttacaattgggggtccctctagaagtgaaatctaagacagatcagtgaggaaaactaaagctccaataaattgtttaaaggaaatgctatgaaagcattaaaccaaaaggaaaaaaaaggagactttttactgagcatagtaaatagccacaatcaaagtaaatgctgtgtttgaagttaaagtccacagatcaaagtacttcgcaaaatgtcaagtgcaagcgtaacgagggggagaggggagccacagaaactgacccgaagtatcacattgtcacgttagagaaacctgccagcagatgtacccagcaaaagacagtcagcttagtaaggaatcctcaacactgtcccctaaaatgtgctaggaacatacaaaacaacaataacaaaaacaaaacccccagattcccccaaatcaaccactctaattccacacgagcaatgaacgaaacagtgatgaaaggagaacattatacaatacggctcgctcattgcccttaaagaacaattacttatatatattatctttactcaggtggatggttgcatctttttcctctttttttttttttaatgcccctggaaagttaaaaataaagcagtctaaacaacaaaaatatgatgtctgaaacatcctctcattgctctggcaatcaggcttaattagacctctgatccatggcttagtcatagtcaagcgtgtactgcaggtcactattatgagagctttaagcaaagtttaaaacttacagccacaaaaatgcccagatgctcctgctgtattctggaacaccgtgtttacctgaaaattgttcacaactccccttattattttcactataagtaagttattttaaagacattagttatgaacataccagaaaacaattaaataattccagaataaaaaatcttacctacaggcagctgagttcaacagttgctctatacagaggaagtaggagtcagtggccttttacatgtagagattgtttatttagccctttttaaaaggtcttgaactccagaggtttaagattaagtccaatccaagtgtctgaaggaaaaaaagcaagagagaggcaaatgagagagggaaagaatcccagctgctgggtggtgctactgttctgagagcatttgagctattttcagcattaacagcagccggggttgtctgcaaagggatgaaaatgccttgcccagatcgccaccccccactccaggggggagaaaacaccaaccaggaaacccacaacgacttggttcattgtgcaaatattcatttaaattttgaggaaaactgccagcaccattgaaaacaaaacaaacccaaagttgactggaatcttaaagaaacacagtgctcctcaagttttcaaaatgaattacctgattcactgaaaacgagatgtcctacttatgctttattgagaaggaggcttttcttctgatatttcctagggggtcttaagaaatagttgagagccctctggtagcagtatctgttgtcagtctattcttaagactgaagacaaatgatttcttaaaagagcccgcacctaaatttccagtttcatcaactatgctatttttgaaagctactgggttaagcgttgacatctcttatctattggcagagactggggaccattcagtgacatgaggcagacaaacagtgacccctgcttctgcctccacaggccaatgaagaaatcattctggttgggtcactggcaatgactgacaaactttgagccttcattttgtttctagaaataaaaattaagaagtcgtattcattcattcattcagcaaatatttatttggtgagcacttcagagcttactataagccaagcactctgggaatacagtggtgggcagaatgaagtgtccttgccttcaggggtttagagcacacagatgcagtgagaataaataaaaacagaatttttaaatattttccagactttttcacatgatgagactattcacatcatggcagctgaagactgagatctctttctattgtggatgaaggaagatactgtgtgtcatcagaccaacttcaggcttccattgagtcattgtgcctttacaccaccaccagggaggaaaattacttactttctaccaaggaagcagttaagtatgtttatgaacgctttcattccaatagatgaaatccctggtttttttcaaccccctactccccattacaaaaagaatgcttaagtagtcagaaagtactgctgagaggctttccatcgggagatgaaaagagagtcttcaacctgaattcagtataaaaaactgccggtggctcaggcccgtaatccagcactttgggaggctgaggcaggtggatcatgaggtcaggagatctagaccatcctggctaacatggtgaaaccccatctctaaaaaaaatgcaaaaaattagcaggatgtcgtggcacgcgcctgtagtcccagctacttgggaggctgaggcaggagaatcgcttgaagccgggaggtggaggttgcggtgagctgagatcgcaccagtgcactccagcctgggcaacagagtgagactccatctcaaaaaaaaaaaaaaaaaatgccctgatatattttataattaatgtgagggttggttgctagatgcttatatcaaattcaaattcaattctttctttgccattaaagaaagacactgaaatagattatggaaaatactgaggattatgccatgtgaaaaaaaagggttacatgactactacttcaagtactatttaaaaacagtgaaatcctttggctcaatagaccttatattaaaactgtatttcaaattaaaaaattataaattaactttgaaatctctaatctgaattttataaataagatcaactttgttttaaaaatgtataccaggctttaaaaaatgactctagaataaagcatttttcttttcacttattttaaatggttacattttactatgtcttaaatacctgccaatctaacatgggatatttgtttctcttggcctcaatgtggaatggtaattctactggtaataattggaagcctagctgcagacagacacattttttaattgtttttttctttttcctccttataatagtttataccaaaaaagggtataatgcatttaaatattggctttccttgagaagctatggcattaaggaaacaaagatcaacataacccactctcgtataaaacagggataataatgagttgtcatagggctcataggaataatgcacagaaaatgcttacctgggtaatgtctgacacacagcaagcatttggtgaaagtcagtaccatcatctctgctgtaagtgtaaagctttgctctccaaatatggtggctacatgtggctactgagctcaatgcggctagtcagaactgagatgtcatataagtgtaaaatgcatgctagattttgaggtctttatacaaaaaaaaaaggtgaatgatgagaaattactcagtgggtacgatgttcattattcaggtgatggacacattcattaaatccgtgactttaccactatgcagtccatccatgtaacaaaattctcctt

SEQ ID NO: 317386 - DNA, 4001 bp, Homo sapiens
ctccttttcagttttgaaaatactcaaacaagtgttatattggaagtagaagaaaagaatcttgtatttcacttaactagctggccttaatgacacaatctcatgggagctgagccctggcgatttttgttgttttgaagaacagcactgaaaggttcacatagatgtcccaggtcacatgagagagggcaatctggagagctgattccctgcattaaaatagctcaaaagtactgtttgttgactcttggctttctagagtttctggatgactttacaaaattctgtttcctcggcataggctggctgtctaaaacgatactgcagcatggtacattgtgacagtaccgcctttggcaaatacactgaatctgatcatcattactttctacacatgagaaagaaaaacaaccttggagagtcttggcctgctgtggctcagagacagcctgacttgacatttataaccacagctatacatggggatgtactctggagggctgtatagtcagtgtaagaggagagtcctcatagacctggaccttctttgtcaagttttaaaggtccaagtaagacaacaattgtgcataaaaattacagttccttataaggaacttctgcattggttatattgtgttttctattttatagaagggaaactggcattaaatgtttagtgtgtttgcttatgcatacccaaacgtgcttttgatttggcagttgataaacattttaaaaattttaagatgatttaattttcatcaaccatctctagcatctcagtttttccttttgaaactaaccaggcaaagtctggttagttaaggaaattatgtcttataaaggaagaaaacatggaccaggcttgcatgtccattatatatcatttattgacctaaaaacatacccagatatctttgataaaatcctctcagacagaatctataactacatagaatcagggctttcttaattttgtctatactatgcctcaagtgccagttacacaaaaccaatgacaccatttctgtctgactgtctatccctatataattagaagaaagtttcaaatttaaccattttgagtcagaaatcttagaagggaaatgaacaagaaaacatcatcaccagaaacatgtaatcatcataaaatgaagaatattggtcataatccctgaacttttctttggcacataaatatggcaatcgtcagtttcaagacagattgttagaatgtcatatcacattcaacgtttcctcaatctaaagagtctaaaaccccagtaactgctgtacagatttactttttggctttcaattgtaatatagatgctgagaataatccattttaaactcttctgtctgtatataaaacacataatccccatataagaatgtaaagtcaaggagagaagaaaatccccacactttatcgttagttctttttgactgtttccaatcttaccacggctttttttttttttttcctgctctctttcccattctttgcctctatcccttattgtcttggctgcccaggtctgcattccaggggagcagctcttggccacaccccagctttacatgggtcttgctgcaaagtatatgcagctgcagtccctccccgcatggcccccaacttcacctgcaaaggtgttgttgctttcatcctgtccccggcttccttctcccggctggcacaagccttctcttccagtggacttggtcagccagctgctgcctgcccaggctctcagaagctgcctctgctactgctgcgttttgccggaaggggctgcccagatacactgagcaatgctttggcagagttttaaaacttaaaaaaaaatccaaacactttcacttatcatcccaggagagctctcagcaggcacggctgaagagggacattaaaatgtgtatttttcttcagacagcttttcctttccatgacattaactctcttcactccaatcatctcacctcccaactcccaaatcacagcttccaatctcccggtgttaacacacatctatttcaaaaaacgaacacatcactgctttattcgcaatgcatgtgggaattcaatgcagccaaagaatttccattgtcttgttccttctcttttctctctattgccctaagcctccttggtaaaaggtaaaagaaaaacaaacaaacaaacaaactaaaccacacaacacagttttaccatttaacaaaatcgcaatgttcatgatgtttcattcaaatggaaaaacagattgtgtaattctctcccatcaacagctttctttctctgccacacacagcataacattcatgagaagtcggatggcacggagggcaatcctccttatataagaccctaggaatgcacaaagccgtggacaatccgtcctttgtggagtctgtgcacagccccagacagacgcacacgctggcatttcctaccgttctaattgctgtggggattccggattcatccacgggcccgatccctgggtaatgcggggctttgatgactgtcactctcttctcttcctctgaggatcggtacagggggatagagctgctggtggtgccatccagagactgcgcatgctggggatatgtgtctgtggaatctgcacagaaaatttggtaacatggaacgtattcgttgcacagggaatcataaattcatgtgtcttgttgtatatttatgccaactgtaacacagagaccatattgccatcactgtcccttttaactcatttactttccatctgagctggtggaaactgtgtaggtgtgcggggaacagacctataccaacaagggcctcaccattttatgaagaaggctgagggaagaatggcatttgttaaatgactgtgtggaggcctctgagttaggaagtgctctaaatgcattatctcttcttatccttccagtaatctttgagggagggcaggatagggggagcaagaaccagtgttatagataaggggcaggagctgagacaagttcagtaatttccctcaggtcatcatttacatcaatattattcttgtgatactgctactactattatttataggttttgaaatgtatttccagacaaagacatgactgttgagtcagtaacagtgatttcataaaaatgaagcaaaaccaaaaatcacttaaaaaaatcttcacatccaagcctttggacatgaaagcttctgaataaataaatgctgtaaaattattagtacgatttcctatgtgcatttttaccttaaaatatcaaaaactatgactttttactctttgatgacaaaaactgccctaaggatataatttagatgaggcttatcgagttcttcatgttttttagtaacttctagaatactttcagaagcaacagagtacagacatgcagtatatagtccatttacttctaatacacaggaattttaaaaaaatcatcattattaccgttcctctggtatgattaataatatgcctttatatttttctgcaattaatttgaaaatgttggtgacaaagaatgacactttgtatatactctttatatcatggtttgtcaggactgccactcagaaagtcctttaaggtggaaatgaaaaaaattctcatgtttcagggtgggactcattgatatcattatgtgtatatgatatatatcatgtataaatgtatttttcatgaaaaatttgtataaaataagtaagctttttttttttttttttgagatggagtctcgctctgtcacccagctggagtgcagtggtgtggtctcaacctcagcctcctgggttcaagcgattctcctgcctcagcctccagagtagctgggactacaggtgcgtgccaccatgcctgtacaaaaaatttttgtacaaaatacaaacaattttttgtatttttagtagagacggggtttcaccatgctagctaggatggtcctgatctcctgacctcatgatccgcccgcctcggcctcccaaagt

SEQ ID NO: 317387 - DNA, 4001 bp, Homo sapiens
tgggaggctgaggcaggcggatcacgaggtcaggagttcgagacaagactggtcaacatggcaaaaccccaactctactaaaagtacaaaaattagcaggatgtggaggcaggtgcctgtaatcccagctactcaggaggctgaggcaggagaattgcttgaaccagataagtggcagtgagcagagaccttgccattgcattccagcctggccaacatgagtaaaactccatctcaaaaacaaacaaagaaacaaaaaaacagtaccaccgggctagcaatttagaaactataatcaatgccttaatatgtcccttcttttagaaaaataactacacaaagcatctgcatgacttataagagcttccacaaatataccataaaatgttagccctgataatttgctgtgacatttaacatttcaatgggccatgtttcttagagatcactaggaaatgaagcagagcactctttgcattcatttctgctccccgagaaaacactttctctccttcactcaagccaccattcataacccagtgatgtgtgatgtcacttgtcccacagaggataatgaacaacttcccgggaaatatttccatatgactaacaatttaatgtcttagacagaaactgaatcttgcctactgtatagaagaaacaactgtgttagttcaactgcatggtacatgatgaaagtccctgttatagctattccttctaacagataattgatggggccaagagacaaaagaaggaactcactctcagaaataaacgctccacaaagcaatctcatgcctcacctaatgcaatatgtttctcatgggtcttttgttactctaacatattaaattatccttccaattaccttggcaactgaaacaagagcgcctaacacgctgatgactttcggacgagcacaccagctgtcagttataaatgataattaaggcatcttaattattaagcacagtgaaaatatgcagtgttcattttttataaaacttgtgtcctaaggtagaagaatcctcataccaaccaaatgctctttctctacctttgatcagcaatttggccttttttctctctgaggctgataaattgcagcaacctttgagatactagaccctccacccccaccccaggtcttcccccaggtctccttagttataaaggtagcagaatgtgatggttgaaagctgcatttgtaaccagcttaccttcgcaacaatagcaagagtaacaaagaatccatcctaataaaagctctgtgcacagtcagcttaagcaacgtaaagtgttcctttattctgcttagtagcttctcccccagaggttaaccattttaaagctggcactcagcctgagaacaggaacaaagcattactagaaagcagggatcttcctccaggatcagcatctctgctttccgtaattcttaagaaatatagaaactcaatgaaaaggaagtgatacctttggatgggcacattccagcacaggaaaatcgctgtcttgtcggctgctgtgcagaatgagttgcttgggcaggtattcctctattctcagctcccgggtctgccttgtagccgcagccagcctagggagcatttacggcatgtacgtggtgttcatccacaataaaaggagactaaccagctcagcttggcgctgctcgcctggaggcatcagatccttggaccctccccatctgattggctgctacccggtctagccgaactcctctgccttaaccttctgctgcgttcaatacattttccctcgggatacagtcagagaagagctggttagggaatcagtggcaggttaaattgagctggctttaaaaatcagtgacatgattttctatgaagatgtctaatgtttaattttccaaagttctacgtaatccacaaggagagacgtaataaaatggatatgatttaacaggagcggcttcatgattcctccctgaaaatacctggagtttaatgcatgcctaacaccctactgaagtgatcaggtggctttttgcagcactgcgtgtctgtataatcaaccttaaatcaaaacagatggggatgacagaatatattaagaggcttattaaaagtgccaggagatgcagttgaataaggctgctgaagccatctcaagaaagtgttataaatcatttacacaaaatgctcttaagacagttatggttgattttagatagctctgataataaaaacataaagaccaatgacagacaaaaaggtaaagcctgacttagcatctctagaagacaagtaacagaaagaaaaatcaaatcttttactctacaaaagtagtgaaatgagaaaagaacaaaagtacaccttcatcatctcctgtccatgtactggattcaatttggtcaaggacctagaacagggtattgaaaagtccccaatggggttttggtttgttttgttctttctgtttttttttgttttttgttttttgttgttgtttctttgttttgagaccgagttttgctctgttgcccaggctggagtgcagtggcgtgatctccacgcactaccccctccacctcccaggttcaagcagttctcctgcctcagcctcccgagcagctgggatcacaggcacctgccaccacacccagctaatttttgtatttttagtagagatggggtttcactatgttggccaggctggtctcgaactcctgacctcaggtgatccgcctgcctcaacctcccaaaatgctgggattacaggcgtgagccaccacacccagacagttttgttttgttttgttttgtttttaaaaatgagaggcatcaaatggaagatagtgaattgaccacatacatttaaccctttctccctcacaaagccccactaaaatgacaataaagcttttattttaagaaccataaacccacaaggacaaagaaataggagaaaacagcaacccaatttagaaaaagaaagcagatgggtgagtggtagctggacagagagagctggatcccaaatgagcaatgaggagagtcaagaagcagcagcatttccaagccagcagccccaatatgctctggaattggcagagatgaaattggggctaaaaacagcaggtggcctgactgcccatcattcaccctgcagaacacagaaggcttattctctggagagactaacagagggcttctggactggcatggctgggaataaaggtaccaaactaaaaatattgctgttaatcagaaacagatataaaaaccctgggccttctttccccactcaactcctgggagccaggtagcaaggtgaataggctccagaaaaaaagatgtgaagagcgctcttcagggatcccaccatcccaaaatataagacgtaaaggcatcactacagggtactctctaagatatggctgggctagatctcccagaagttcaggccacattaataagctctacacatgaattttggtgcccctctcttacatgtaagcagatcagacaaatctctaacatcaaagcatagaacaaaacaaacaaaaaagaaacaggcaaataacagacagacaagcaaacatggcaaaaagtaaactgatggaaacaatgggtgtgcagggagaagaacagtttaaacactatcattaatggccttgtcaaaataagagatgtatggcagttctcactctgcatggttccagtattcacaaatatcacctacacagtgtagttgatagcaccagtcttccagcaatacagttcaaatttcagttaccatggcgtgttaaccatgagtgattatgcagtatgcaaactcttttagctcttccacccacagtcactaagtaataatagatgcacaacatgatcactggccaatcacagcacttcttcaaaacctgtcagtgattggttgcggcatgcctgttagtcagctcatgtatattgttgttgttgagttgttgcaccaagtgtgttatggagttgcct

SEQ ID NO: 317388 - DNA, 4001 bp, Homo sapiens
acctctgcaagtcaccccagccggcaccctgactgccccctgctggcccactgcacccagggagccagctctcccctccaagggctgctagtcaggctggagatgccaggaatgacccaagaccagacacttggcacctgtaccctgatagatgctggctggttggggagctgggctctaggccgactaaattcattcagtgctgcccctacccctgccccaacatattcatctgcccacctcatccctcctccagcacaaatcacagctggctgggagtagcccagcaaagctggacagaggagatgggcacaagtgaccacccagattatgccctttcctggctccagaggccagtgctccccacccatgccactgccagtgcatataggaaccctggccctttgggaagcgagaagaggtctcctaggggaccccaggagacagcaaggcacagaaatgaggggaggcttccatctcccctccccatacaaatgtaccctcctctggggattcatggctgccacctccctatcccaatccttctctggaacctgcaaaactagagccccaccaggggctgccccagggtgacttcagagtggcccttggcccttttgtgggggtggggggaagtggggagtgaggttgaggcagcccccaggggaataatctaaagggaccctctgcctcctgcatgcaccaccaaaggccagaggaggcaggatttgggaagggtgggagccccaggctgtgggtggaggaacaggaggtccccaacagaggtggcaaacttccagctggagcaaagccagagtagccgggaaggtggggggagggcagggagtttgctgtgccagcgccacacaggtctccagcacagtgtgggtatgaacccaagggggtacgcgggtcccagtgcatccaggcggggcgaccggcagcaagagctcaagacagccgcgggtcgcactagagtaccccggggagaggggtaacccagaaatcccagagtcccagaacaggattcgagctgaccggggaagtcccggagcctgcggaggcgccaccgcggagtccctggtagaccagggagggaaggatcccggagcccaaaatcccagaacgcgacgctcagctggtggagtctgggggcaggggaggtaacgccgagctggggtaccctcaaggacctgcaggcttccgaaggttctggggtcctcctccgtaacccaagacctggaggccagtgggggagtatcggaggtggcccaggatcccgaaatctgcgggaatgtcccctgcggtgagacaagcgtacgaatctgaggacctctccccaagtaaccagtgaccagaggccagtaggggcgcggccgaggtgacccaagtgcccaagtcgccaagaacccgcccctgatgaccatagtggggatctggggtgggggccgtggcggtcccgcccgggtgtcccgcggtgtcccgggtaggggccgcggcgagcgcgtggaggtcacttacgctgctgttctcgcccgtccagtgcaccatcgcctggttgtgcgtcgcgtcccccttgagcacgaacgacgtgctgatgagcgagacctgcgcccgcgaagccactccggccagcggcgccgcccgctcccagcgccggtagcccgcggcgggggcgccgtcctcgccgggaccaggagcgggaccgggactcggacccggggcgcctggctccgtgccgcgcgcctgccggtcctcgccgccaccgggctccgcgcgccccgcgggagggctccgcggcacccgggtcagttgggcgtgaggacccaggcgcccgggctcaggggagcgccccgccgccccgcaggcgcccagcagcagcagcagcagcaggagcggccgcgagcgcggcgagcgcggcggcggcggagccccggggctcggggctcgggcggtggggccggggcccttcgaggcgcgcgagggcccccggtgcgccatggtcgccaggggcggcagcggagccggcggcggggcggcgcggacgaggggaccgcggccgggagagcaggagggcgctggggagcgcgagcgagagcgcagagaaaggagccggcgaggggagggagcggcgggaggaggggactcggcggccccggcgccacccgcgacgccgagcgcgcaccgccacctgccggccggcccgccgcccaggcgctcgtgggaagcccggcgtacccgagcgcggccccacctccaggccaggatccccttcccagctcggtggttcctccggtcctccttcccggctctcccacctcttcccgtcctccctccctctctccaggtccagccacggttctgcggctctgggctcccgctgggaacagccaggtccctgtccgggagctgacagcctgagggagacagaccaacccaggaggacacatatataggcaaaagaactctgagctagaaccagggctcccggcgcagattataaagggttctcctcaaggggcctctgaagaggtggcagtggagagggggtgaagcccgtgaaggtccctggggaggcctgctaggcggccggagcggggtgggggggtgcagtgcagaggcccctaaggtgtcctcagcagaactgccccaaggactgccaggcctctggctcagacatcgggacgtgcagtggcttcatctcccaacccaggggccacgagggagctaccctgaacaggacaagctcctgtgtggggaggcgtggggagggggcagggggtgaggtcctagggacctggcaggcgcagtgaggaatgtggaaactgaggctcggagcacagcaagtccccacccaaggtctcgtggccactttagttcagtagcgataaaaatgacttcacagagcagccaccctgagtgtcagacgggcctccaggaacaagcacggcaggcgcttcccgaggcaaggccagggtcagagcctctgccaggccagggccaccctgcccatggccttcccccagaggccccgcgccagataggagcccttgggccggggtcccagtcataccccacctcccagctgggtcccttggctccagagagagcctactggggcagaggggcaaggcctcgaacatttgggaaagatggagaattgggggttccctctggctcccagagaattggagcacccatctccctccccaggaaatcatatcccaaagcactgggcacaggctacctgcattcacgctgtacccagcgctgggacttggggaggaggaggtctggccagatgcctaagaaggccccacactccgaatgtgccgttccctctcaccccaccatgtaaatcctgaacctgtcagcttcaaacccaatgggaagagggaagggaggactctgcagctgtgggaacatctggtctcacacaggaagcagagaagaacagagtggggtcagtgaagggtggaggggaggggagatgaggaaaagtgggggaccaaaagagggctgcagaccgtggctggcaggagatcactgaacatggagttagaaatgagatggttcggttcctcccagcttagacaggaaccatcacagggccttccccaaactcccgagcctccattttgccaactgtaaaagaagaggctgcacaatctctgcggtctctctcagtgttaactggttttgttttgttttaaataaagaaggcctccaagtactatcctcaagaaacttggccaggtgcagtggctcacactgtaatcccaacactgtgggcggccaagttgggaggaatgcttgaggctaggagtcagagaccagcctgggtaatgtagtgagaccccatctctattaaaatatatatatatttaaaatattagctgggtgtggtccaaactacttgggaagctgaggttaaaggatcgcttgagcccaggaggtcaaggctgcggtgagccgagatcatgccgcagcactccagtgtg

SEQ ID NO: 317389 - DNA, 4001 bp, Homo sapiens
gacctcacgtttacatcaaggacaatccctgccttctttgctccagacaccaagtcctgaagggccctgaggtcaccatgtttggctatccagtgcaacgcagtgtacccagtcaaaaagtctttgtgcaaggccagttgagggtcctcccagaacaaagtccacacctgaatccaggagccactggcaagcttcacaatccactcatgctccctggcatctagtggaaccagggatgatttgtgctcagaagttctgtggggggccaaggctgcagacccctccccactggggacccacaggctgtgtcgccaaccccgctcggccacaacagccttaacctctgcaagttttagtgataaacctgcatcaacccttgggctgggtgccgttcctgccttggagggcttcctggatcgaggtgggcgccgacttcttttcagcaagccctcatcgaggtactcctcatcagaggaggacaatttggctctccctgccagagagctcctcctgagggacctccttaacttaggaactggccaaggcaaaggcttcagggggtggcctgcaaggccattagcccctgcagggacctgctgagagatgtgaccatcccctctgtttctgagaccctgagggctccggctggggctgccctccttccgagatacagaaaggcccccagctggattcctgagcttccccctatctggggttcccaagacaacctgcagcccctcttcagaagcccccggggagtctttgggcccactgctgctctcctcactgccatcactctcctggtccacaaagtcatccagatcttggagggacagctgacaacgaatgctgcgaaagacagtcaatgaagggttccccgcccaggattcccaggactcatccggaacaacaggaaagagagagtgcgaggaaagacaggggtctggcggctctgaattaggctccgtggagccgggttccaagggcagctggaggaagttgtctggcagcaccgaccaggcgcggatagggccctgatcacgggcctcgggcacctgcgggtgcctggccacccactctcgagtgcgctgctgctgctgctgcagggtcgaataatgcagggagctgggggtcagcagctccggccggtctccgcggggagcggggccgggcaggagagcaggcggggaagccctgcttgtcgcagcctcgacggtggcgggaggcgagtgagccactgcaggcacaggcgccggctcagctagcgcgccttcttcccgctccctggaagccccgcggtcatcctgggcaggcagagcccgtgccggcttctcctccgcggtggccgagtgcgggagtgcgccgagctctcccggcagtacagccaggttgttctggaggcattcccagcagcagcggccctgcgtcttcgccgccgcgcagctcgctctcgcctgggcccctgccgctgcagctgcgggcaccggcggcctctgtccgggactgcccttcgatccgccgcccttcccgggcgccctacgggagtcgctgcccgggagtccattgcaagctgcgtcggcggctctggctgctgcacctgctggctcctcctccggctccttctcgcgccgccgccgcctgggctgctgctggggcggctccccccggcgcgcgcctcgcggggagcagggcgcagctccccctgcactgggggcggccgcgggcggctcgcggggtcgctgcagcccctcctcccccaaaaggtccctgtatctcctcttgagcaccacgtacttggtgccgtcggggtcctggcgcactgcggcgaccgagttgacgaagcccttgaagagctcgcggcggtgctggtgctggctgggggacgcgtcggggtctcggagaaagctcttgaagtggctcagcaaggcagcgttggtcacgcggcccccagcctggcacagaaagtccagtagtgcctcctggctcagctctcgggccatcgctgccttgtcctccgccccagaggtgtctgagtctcgccctcccggggctctccccagccagaggaaaccctggccgggcgagtgtcacctgcgcccggggcggcactagccgcccccatcagccgcggaggccagcgctgcccgcagcccgtgagcgcgccaggagggccgtgggtcccctccgggtggccccaaggctgagtccccgcggcagtctgcgtgagagagggcggctccgaggccgcccctgcgcgactctagcctctcgcaacgagtcctcacagcgaaagttcccgggatagggccgagtcggtttcacctgcgccctggcggcacctcctccctgcctctgggggaagggtcaggcccgcctcctcgtgtccctccgccccctgaggtctcccccaccccctgccacccatcccagaagagtcaggccggagagccagccggtaggtgaggttggcggcgaaccgagccggcagcgaactgctctgcggccggggaagtggaaggcaggtaggcgaccggccgttcctctaagtctccgccacgcaggaaacaaaagcgatagaaggtccgttcctgtcctccggtgctttgatgagttcaggctgaagccgatgggggaggaggagaagctgcaagttaacaggcaatctgagttatctttctttattaacgctgtagaggagtacttcagatttctcgaggctgtattgaggtccgcaaaactcactttgcatccaaactaaatttttcttaatatagaaatactttctgggccgcttctccggcgccccctccaaggggtccgaatacatccaagtctatactgaaaagagaaatcactctgaaaattactactgggcaatattggtttgggactttttctttcatacttgtctttccttcatacttgtctcacattaaggtgctggaaaaaaaaaatcactttgatagcttcttgcccccggcggctaaaatgaactaggaattatgtctcgccagttaaggtatttgatgtgtagcattagtttgcttttatttactctaaaatttgtgaacagcagagatttgtacagtgttttgtattggcttggtgaagtgcttcctttcagaatgtaaggttcaaaatgcagactagagctgtctttaacagcaccttttccccctaacagctgggatccctcttcctttttctctctccacatgttgacccttctgtctttgatgtgagatcctggatgtccctcactgttccttatcagtcctgttgacatgcctgagatagttttcactgtcattatctctttacctgttttagttccaagccttctctcattcttttctttaacttggccttcccatttctttctgttacacgacatccttgtttaccttcggcctctactgacaggaaatatgtctgtttctcagatcctctcatgtccactgtatttcccattcaaaaacctcgattttctccttccctgtaatttgcctctcttttctcatggactcttctcatcttttcacttttccttttgctcttctatttctgattactcatagttcctatacttctcgccaagaaagagtattgaaagtatgtgtgttggccctacaattgttgacaaagacatgttttagcatggaccaatcttagtgactgccctatagaccacattaactgagcttgattttaaatccccaaaaataccctagcacttttccaggaatgaatctttggttttacattatctaggtcagaaaaaaagaactggaaacatttttgtctatttttggcattttctaggatccaaacccaatactgggttgagagagggatagtggttttcactgatgtctctacataacatcaagcctttaggatagtttttaaaattaaggttttgtattaaatttcagctttcttttgagtttatttgctggtatagagtcttgttgggactgagtaaggtgagtccataccta

SEQ ID NO: 317390 - DNA, 4001 bp, Homo sapiens
aaatgaaataaataatgttttcaagttgtccagatgcatcactattcattttatttctgtcatcactattatttttacttagttgatatgtgaatctgtgccatgaggagctactggggattaaatctcaaaagacctaggaaggaaatgccagcactctaattgctcaatggctgtgtgaaaaattctctgaaagaaaaaggcaaggttcataaataacatgtgaatattcttctccaaaatgtggaaagtggcactagttgattggacgataagtagatgaaataaactgctctgctttgctagatcttattaaatgaacagaaatattaacttaaatctttccaaagagggtgttttgaataaaaaaaaaatcatagttaacaatagtcacaaccatcaggtttgactgagtaagctgtgaactgaaaaaagctggtgtctacgagaaaggggagaataaaaaaaaaaaagatttctgctgacttggactgagtgaacatttctattcaatgtgcttaggccctgggccagaggagagctcagatacaatgccaaggtgacatatttaacctctttgcagattaaaggcagtgcaaaagagatactctttctgcagtacctcttggtgtactgtttcaacagtattgatctgcagttaaaagcatgtttttttttcttttcttttcctttcttttctttttttctcttgcagagtgacctttaatacctgggaaggatgaataagcacaacctacattattgctttattttagaaaagagagccagaaatggtagtacattataatatgagttaccataatctctttagctctttaattctcttctcccatttttgcttttgtaaataagacattatcaagaattagagaaattttaggtctatgtgtgagcatcttaacaaatgatagtaggaggcaaaaaataattagttataaagctgtaaaagggaaccaagaaagggaaaataatcgcaataacttaaaaataatcaaacaagaatatagtataaaaggagaaattttcctaccttttggaaaagcaaaaagttccgtttctacattgctgttaggctcaggagattgaataactttagataatttaaacatggaaaacatacaaattatttgatttgaaattttttttaaaaactaccttctttatagtttatttcatatatgtaataaagtacttctacaaaacacatttcaggattcaggcttcactaagatctgaatgctactgaggcgatcaacagttccacatttctattcttggtcttcactaaaatcaccatcatttattagtacttgctatttaatttcgcaggaaacaagaaaacatgaatacaaatggtaaaattctctatgaagtatcttttctgtaaatcacacaaaactttttttggtaaataaatggctttgtattatttaggcaaaaatatttgacagctttatcagatcacgcaaatcagcttaacaaatgcaattagataatgccgtaaatttattacaacttacctttaagtaaggggctggacccagagccactgcagaaaaattgaagttgaatcccctctgcacacagacagggaataaaagtttgacaaacacccaagaaaaactctttaaatccctttcctcgttagctctgcttctttgcccagaggcatattcaagtctactggagttgaaattctgctgctctgtcaactagtgggggtctgaagtgacagacgagaatttggaggttggcaccagagagtatttcagactgtcatcgtttttgttgcagattcctggatttccctagcaggctggcctctcatgcgagggctttacaggcagtgcttgcaaaccaaaagggaaagagctaattctggtggcgtggatggggttaacagtcttcccctcaagctcttgttctcagagcctcataacttggccagaatataagcacttggctctttatgcattttttttctttttcaaacaactctgaaaggttttataagcagcatcccttttttggagatttttattttaagaccttgaaaagaaactccatgctgttgtttctttctaaaggaaattggggagtagggattaaaggagggaagaagagaaatggcagcagatgcatttttacgttgctcaattggaaattgttctagcaaatacagtctgaattttaatagaagggtacttcagataccttaaccttctttgaatgagatttggaaatggacatatataaaaatgattgctccttatattatagatcacttgtatgctgattcagaaatgttgcagttctcccctcaacacagctctccactgtaactccatggttataatggttggtatctaagaaggaggtttcccataaaaagaatggaggtgtgcacttatttttggcccgggattctggttgtttgtatgtgtctaatctcttctactgctacttctacatttatcacacatttattatgtgtcagacactgtgctaacagctttttatgcgttattatcagttgatcctcactacgcatggtaagttttactgtgttcccatttgaggggtagtgtcatacagtggttggattggcagaatttgaggccagccagcttggatttgcatcctatcttcaccacttcctaactatgacccgggacaagttatataacctctctaaagcatcagtgcttttatctataagacagggatatacatatggaaatgatgataatatctatctctgcaattgttctgagttttaagttagttaacatgataaactgcatagaacacccctgccacgtagcagacactcaataaatgttagctattatcatttacataagaggaaaccaaagcttagtaagggtgttttttctagggtatccaactgtaacttacaggatgggattccaaatcagctaccatggctgacagccacacttgtgtaacttatctataatccctctattatgtgatatagacacatatatatatcatacctgcttctgagaaagctgtaaactccttgaaggaaggggatgtgccctttctgcattctcctggtgcctagcacagtgctttgcatcctgtaaatgttccattatcatcagatgaataattataatttaatttaatttaatttagattttctaaatgcatgccaacgtctggccaaaagcaaaaacactgacaaaaacaaaataaaaccaaaataaaccaaaaacccccacctacatttctaggcaaatatgccctcagccaaatctctcaaaacactttagaattatttgccctatttattttcagaacactgcaagaaaaaggtaacaaggattatctctactttgcagttggagaaatttgggagcagaggaaactgggcactttgcctaggagccaaaaacaagtcacggtgcagctgggaacactcacgtctctagaatcaggataacttgttccaaaccgcctttcccaggacagcatgaaaggacttgatgtctttttgcctcagacaataggatgtttttccttagccaaggtctaggggttgagcaatctcctcggaggaaggataaaggggtgggcagtgtttgaccatgcttctccctggtgtgcacatcctctgtgcacatctgctctgagaagtgtggaagacacagaccatttttccaagtctcccaaggggcttgggagcagtgagactattgcagaataagtaagaaaagcatttctgaggatttggccttagttggctaaagaaaattttcttggggacccaaaatattaacttcttattctaactagcattccccatttatttaagatggctttgtaagattgatttcaggtgattacatcaattcaacgagaatgtagaaaaaaatttcatttaaagggctctggaaaaaaagttacccgactaaaatttttttctgctaaaattgatattttatgcttct

SEQ ID NO: 317391 - DNA, 4001 bp, Homo sapiens
atgaagggaaaacagctggatggaaatggttttaatgagagcagagaatgggatgttatcaagacaggaaaatgtaataaactaaggcacttctcatcacttacagggagtttctaaaataattgtttattagttccagacaaatcctagtgttatttgtaataaacattgtgacaaacaacatgtttttttaaaattcagagtttagttaggccactgggcaaaaaaaaaggggtaaatactgtatacatgttagaatttcttattctcaacctcctgagactaagtagtaggtacttttaaaattagttggggggaacccaagtcttttatgataaagaggtcattttaactttccagaattcttaatggagaaggaatggtcagcgcttgttctttaaaagggagcaaaggactgaacaggaagcactagaaaggaaggctaaggagaaagctgtagctgctctttgagctcccctccacttcaggagcactggttaaagggtgaatggggaagcctaaggacctcataacaggcaggatctcagaaacaagctaatctaggctcaaaaacttaaaatctgaacaggaaatttacatatcatctagaccaatctctgctatttcacagatgaggtactaagaccaagagaagttaaataatttgactccgtcattcagctagttctatgcagagccaaatgtagaaacaagggggggctaatttccggtccacagttcttttgcctggccgctccacttattatgtaagaggggaaatccctatttaagacggaccgaccgaatgtaaagcaaattcaacactcaccgttctatttgggggaaggggggaattatggggaggcagggtgcgagtagggattaatgagatttgaaaagtgctcatgggtttggtgacagaatactggcttctcacaaatgcctggaaaaaggcctgaatccgccctggtgttggaactgtgcctcaatttccaggcccaccagcacgcaagtgaaacccgcaacgttaacaagtgtccgtttcgctgatttctgggtaaataactcctgggtgtgtgtttatacaaatccattctgatacaaaccctgggcaggagagggttgtagtaaaaaataattcgggattggggaagcaggcggtgtggattgcgctggcaagggggatgggaaagagtggcaggcatgaccagaccagccgcggacagcagggcttccctattgctaggtcgccggcgtccttagttaccactgattggaagcactctccagtctccgcagcctagtgctgcgctccgcaggccgcctgcgcgccgcctcccgaagctctgagacaagggcatgtacacacatgtccttccttccccagcgatcccggtcgaaagctgagatcctggttaggaatcgcaaccgcggaggctttgcaaagtggccaccaactccagccctaagaaatccccgacaagggctgtgctggaacctatgggagggcgaaccccgggggtttttcacccagactcacgttgtactccttcagccagaagtctagcttttcctgcaacgttcgtaaagtttcgtttgagaccagtcttttcaggttttccgccatcgctcactattcctctcggccccacgctgcgcgatggagacttggggggaccaggcggtggcctccgcaggaccgtggggtgatatggcgggaagggtgttctcttctggggggctcagagcgcggcaggtgtttccatcctccccctcgggtcggacctggccgggttcgggaagccagaggggaggtgccctgggccgcagccgccgcgcctcatccgccgtcccgcgcggtctcctggctccccagcagccgcctgagcccggccatagataccctggcgattattaaacaaaccttgacgtggacgggttggctgccagggacgcgcgcggcccgcgtcgtggcaacgcccgcgccgccccgccctgggtgacagccgcgcgccccaggggtggactgagacgcgcagccgcgcgggctggagggcagcagggcgtctacagcattcctccccattcggggttctgggtgcccacgcgtgtccagaaaagcagaagttaagtctctatagaagtttggggctaggctctcaggagatcacctctttggcccctttattctttcgcctttcattcctttaattcttcatttgtagcgccttgggtttacctgtatgaaacttgtaactaaaatttcagtacttcttacttctagcttttactttgttccttgacccactgggtgggtacccaagttaatagagtttagctccaggatgttcacaaattaaagttaatccctcaggtttggataagatttggcagtatgtattttagtacttttttttttagagtcattgagcactctaaagcttcatttaattctgaattctctaattgggactttcttgacctagtttggcactatttcaaaagtgtgtattctgctacagaaacaggttcaactacttaggaaaccatttcgaccatctttaagcgctttcgaagcaagctcttttatataccatcaaaaaatgtgctgattataaatcattcctatccattcattaaaacagcggtggggagcagagcctcagctggttagctagctagtttaacttagtttcatctctgtaggtacttgaaaatctgtgaacactgcatatattcaagtattgtaaaatcaagaattttcaccacctctcattttttatttctcttgattacagtggctttactatctgctaatgaaaatgaaaggctcagttttggagcctgtgttcctactattttctgtagaccacaaaataaggactataggggtataacatgttatttgattggagtagaataataatttctaatgttaaaaatacccactcaacaaaacagctaaatattcattaaacaacttcatatatatatatatatatatatatatatatatgtaaaatgaattgagaaaaacttcaaatttctcaatttggacctaataattacatatttctacaggcatttggaatctttgaacagtcccatttacttattcataaaaacccatattggaacatttatgtcagataaattagaggtaaaggatttttccttgctgtgagcaccttaattagcctgtaatccttggtttcatcatctgtaaaaggaaaataattctctcataggattattatgaaacttagtaagataattcatgtatttagtacaatgcttggcaaaatgcagtagcaattgctctagtaattgctgtttattaaatataaactaatactggcctacatttgctattattaagaatgtggattagtatgtttatatttaataaagaaaactagttgtaaacaatctaaacctccaacaatagggtaatggttaagcaaataatgaaatgttgcacactaaaaatcttgttgttgtagaatatatactatctacaaattttcactataacgaaaaaggcagaacactaaattgtatacactgtgttaaattacacaatgtgaacccaaggtataattgtgggttattttaattgctcttttatatttttctgattttttcaagtttctatcatgaatatgaattgtttgtatgaaaacttattcagaaaaaagttaccccaaacagttactaacatggtttggctgagtccttgccaaaatctcatcttggattccacgtgttgtgggaggggtccagtgagaggtaattgaaccatggagtcaggtctttcctgtactattctcgtgatagtgagtaagtctcacaagatctggtggttttgaaaaagggaattttccctgcacaagcttgctgccgcccatataagatgttacttgctcctccttgcctcccaccatgattgtgaggcctccctcgccatgtggaactgtaagtccattcaacctctttctttt

SEQ ID NO: 317392 - DNA, 4001 bp, Homo sapiens
actaaaagtatcttgtaaagtgagtgttgttggatcgttgctctaaggagaacctactgtggaattttgctaagattatctacgtttcaaaggctttggtgttcttttgatgaacccaaactgttaatttgtattgaatccgcatttcaagaagatccccaggtgattcatatgcactttaaaatttcagaggcatggttgtaagtaatactgaagacaaattagtaaactagtcccccgcttatctgcagttttgctttctgcagtttcagttaccttgggtcaatcacagtcggaaaatattaaatggaaaattcaagaaataatttgtaacttttaaattgtactctgttctgggcagtctgatgaaacctccctgcctgctctgtgttgcctaggatgtgagtcctccctttgtccagagtctccacgttgtagacatcagtcaccttttagtcatcagatcaactgtacagtgtggtgcgcttgtgtgcaaagtgcaagagcagtgatgctggtgattcagatatgccagagagaaaccataaaattattcctttaggtgaaaagatgaaagttcttgacttaatagaaagttgtaagaatggttacaatggtaggaatgaatcatattcctgaaatatgaagaaaaagaaattcttgatagtttcggcatcacacctcaaactgaaaaactttcagccacagtgtgtgataagtgcttagttaagatttttaaaaaggcattaaatttgtggatggaagacataaacagaaatgtgttctgacagagggttctgtagtatccacagttgccatccactggggatcttggaacctatgcctctctgataaggagagactactttaaaccagagttctgcaaaagattcattgcctttttatagaatttagtttgcattcccagagcaaatattagctgccagttacatacaaagtgcctacaattaagcagcaactttaaaaacttgttggtaactctcaaactagatgccatctccgacaaagggtaaactgatccttaccagtattttttttttttttttttttttttttttttgagacagagtcttaccctgccacctaggctggagtgcagcggcataatctcgactcacagcaacctccgcctcccgggttcaagcattctcctgcctgcagcctccccagtagctgggattacaggcacccgccaccacactgggctaattttttgtattttttagtagagacggggtttcaccgtgttggtcaggctgttactcaactcctgacctcaggtgatccgcctgcctcggctcccaaaatgctgggattacaggcatgagcaactgtgcccggccgtccttaccagtattaatgcccaatatcactaaagaaaaagctttgactattttaatatttttgtagtcaccaaagcattctatattgtccacaatttaatgattggttgattaattgaataaacaagatgtatcgtggtattttgttaaagccttgttccctaatagtgttttcgtgtgtgtacgtgggtgggggggtcttgatttgaaacataagccaggccagggtaggcaatctgaggcctggcaggcggcggaaagcaggcggggcgcccaccgggggggcctaggactggcttactcaagcacctgttgatgttcctggggaagaagctgagatccagaccctgaagccaacgcagaacggaacgagacaagcgggagctcttcggcgcatgcggatagaccagacacttcttaggcctccctcggatgggagctgctagctgtggcgaaagtgacggtgacttgtctagggctgccgcagtctgtgtcaaataccctttttcctggccggcggcagccatgacgctttctgggttgctgcggcaacagcagaaggcggggctgggccttattgctggcggcgcggtctcgtggggcggggcggagtcttatggggcgagacctcagcgcctgcgcaagcgccgcagcagccgcccgtacttccgctttactcagattttggaccgcggggccgggtatcgagggaggcaaagctggggtcccagtggtgtggctgcggtctggggagcgctttcagtctcagatttagttggcctcactgttaacctatttagagctttttttttcttatgtcatcgttcataagttttgtattttaaatattgttggtttctgcccagccaaaggcctattttcagtcgtctagtttgaggagtggtgtgagaagactccagaggccaaggacagtttttgtttgggaattggaagagatgggggaaaaaaatctttgaaatggaaatgaatgtccacaaaatttaacataactatttccttaattattgcattaagtatttgtaaacattaatatttgaaaacgatgtgtaggttagattttcacacttaattaaaatctcctagtaggcataattccttcattaattcaacaaatatgtattgagtccatattatgtgccacgcattcatctagtcacttgggatctatctgaacacaatgaaaacaactgcaaagttggcataggcaattataaatatgtaagcttaattattaaaatccattaaaaatttttacagccacagttttttgttttttgttttttgttttttgtttttttttgcttggcagggcacagtgggtcatgcctgtaatcccagcactttgggtggtggaggcgggaggatcgtttgagctcaggagttcaagaccagcctgggcaacacaaggtggagagactttcgctacaaaacaaacaaacaaacaaaatagctgggtgtggtggtgcacacctgtactctcaagtactccagatgctgaggtgggaggattgcttgagctcaggaacttgaggctgcagagagccaggtgacaggccctgtggatacatacacatggtaaaatatgggatagatcttgataatgatactatgtaatatttttaatgtttattcatatacatgcttattaataaagtaaaccagtgtattctgtatgtggttaaaaaagaaaaccaaaactgaagctatgtaagtgttttctgttaggctaaaaaagttttaatgaatgattcattcattctgtaaaccttttctgaggaactatcctggagtatgtgctagatctttaccatccaatatggtagccactagccacatgtggctatttaaacttaaatttaaataaactcagttccactggctacattttacctgctcaatagccatatgtagctagtggctgccatgttgggtaggacagacacagcactgttccatcactacaggaatttcgattggacagctctgtgcggcagatcatttataagagattcagagatagaaatatcagtgaaaagattacatacactgaaaagctctgccatggtaaaaatatgttagcaccagaaaggaagcaaatactttggcctgggagagtgtaagaagtcctctcaaaagagatgaccattaatttggatcttagaaggtggtattttaagctgatttttaagatgaaagctttgaatagccatttctactgtgaaaggaaattaaatcttgggaccccccccacctcccccaaatcactaagctaaagggaaaagtcaaagtgggaactgcttagggcaaacctgcctcctattctattcaaagtcaccgcttagctcactgagctaaatgcatacctgattgcctactctggaaaggctcatcagaaactcaacagaatgcaaccatttgtctcccatctacctatgacctggaagccccctccctgcttgagttgtcctgcctttgcttctagttgtcccaccttttccagaccaaatcaatgttcatcttccacatgtcgactgaagtctcatgtctccctaaaatgtataaaaccaaactgccctgaccaccttgggcacatgtcaggacctcctaaggctgtgt

SEQ ID NO: 317393 - DNA, 4001 bp, Homo sapiens
tgttggaggaaataacgggctcatgaagttagtcctgaagtatctttgggacactcatgagaagagttattgtacagtgctattcaaaatatgacccacaacgatttgttactgcttcatgacaagtacaaaacaggagaataagtatatagaagcttttattgaaatttacagagtaatttcacatctgtttaataaaaatttttccttatttttctagaaaatcatttttactgtattttagaaaagtgctgatctgtgacctattataaattttaaagtcttcaccacagagagcttgagaagcatttggctaaaaggcaaccacatcaaggcgcaaaaacaaaagatttacaaatataaatctgacactgaagagactatagatgggaaactctgggcactggatgaacttgccaaggagacaggatttattgagaggaaaaaaaaggttttggactaagaattgacgaacttcaacatttaatggtcaagggaagaggacgagcctgcaaagaaaaatgatgaaacatcaacaaagatgaagaaaaccaggcaagtttgacaacacataagaagttaagtgtttcgagaaggagggaatggtcaacaataccaaaagttgctgtggtcacgtaaggtttatcaacacggagatgctcggagaccacaccaggaacagtttccatggaatgatggggtggaagtcaaagaggaataggctagggagagtatgtaagtggtgaggcggcagagaccactccatttaagaagcttggcaatggatagagagacggttgcaggaagaaaatgtggagcttttgttctgatttaagatggaagagaaatgagcatgtttacatgtcaatgggaaggatctagttcaaaaacaagttgaaccttcaggacagaacaagttgtcctctgatacctaaggcagagtgaaaataccatgtgaactctaaattgtctttaaggtctgattagacataaaagtttttgccactagtctggtccatttttcaaagctattacacatcaaatataaattttcaatttttaattcaatttataagacttttcagtataaatacgttctcccaaatcaaaggagctgtcatctaggaatggcttttaagtcaaacacatctggactcaaatatcggctctgccacttagcacctgtgtagcctgaatggaatcacgttaactttcctccctctataaaactgtcattactatacccatcggtcacggcttctgtagaaattagatgagctatatatactgctaacactagtgtgcagttactagcagttattaaatatcataacctgcgtagtactggaagaaaatgctatcatcactcctaaaggcagagtgatccacatttttactgaattggttatttagttttttaggataagtatcccatgttcgctagttatgaacaattttgcaattaaatgtgtcgttaatgttaaatgagacaaagcgtttcaagtgcaacttaaaaattcaaaataatttacaaaagagaaaccttggacacggataaaccatttcagcctaacttctccagtgcaggcgcggctacgtttgcatgcttcttacatacagaagtcttacacgcttctgtgccgctctcagacccatgccacgcccaactttcaaaagtctctgcaccccaagtcagtatcactgagtctcccgcccctcaggttgcgccccctcggcctctagtctcccacccggaattctttacccttttctaataagttggtcaccgtcagagtcccggaggttgccgcgaagtctgatccagcagaaggagcccgtgcctccgcacaagaggaagcagcagagggcaaggacgaaccattttccgcgctttggttcaaccgctttctattcttcttggaagacatggtcacaaggtaccctagccgaagcagtagaaaagccgactcaatgtgcgcgcttcaactgagagaaaaacttccggggcagaagtcagcgagggtccgcccctgcgccgtaatcccctgagtggagcgcagcagtgcacagcgtggtgggagggactgagcgttttcaaaaccagcagtctttgaaacagctgtaacggcatctgtgaaagaagataggttccaggaacggaactgccacttagattgtaaattcctgaaaaacaggacgtttttgcatctcctcccggcttccccatccctaaaccaacgtctgttgaattaaactaccaaacaaaataagtgagtggcggtgggggaggaggttttccccgcttaactggagcggggcaaattgctgagaagggctggtggaccacttcgcggtctccttggcatagctctgcagagtggtaaccccagctcaactctgagggtattgatggcactcttctaaaatgtacggccgcgatctccgctctggagcgcggaggggtcatttgggcaacggacgaattaagcggcgtggagatgcggcagccactgagctggggccgctggcgcgcgatgcttgcccgaacctacggccccgggccttcggcgggttaccgctgggcctcgggcgcacagggttacgtgcggaatccgccagttggagcgtgcgatctgcagggcgagctggacagattcgggggcatctcggtgcgcctggcgcggctcgatgcgctggaccgcctggacgctgccgccttccagaagggcttgcagggcaagtgcgcctgggacgaagggctcccggggctccagagcttttctaatgaaataaccgcggcccccactccctagtcgctctgtgcaccactgtcgagcccagagggaaagggagaaggcacgcgtgacctggacctgttttctggagcattcgtgcttagaccttttgctgggaggtctctaaggcggttgggtgaaatggtgaagatcccggactttgggatctgcaaccctggttgctggtccactttctactgtgcgacattcggaaattgccgtaaaccaccatttcctcttccacagaccccggtgataagaactcctggaattactgagagttaatttggataatgcacataaagtgcacagcacagtgcctgccacgtatttaaagctcagtagatgtttgttaatattatattattacattattagtatcctttaccgagccttggttctgtcggacacttttcccaaggaaaaaaactcttacattctaatacgggtggtggactgagtggaccaaagaggcttttcttttttatttttaatttttgtgggtccatagtaggtgtgtatgtttatggggtatatgagctattttgatagaggtataaatgtgtaataattacatcagggtaaatgagatactcatcaccacaagcattcaaccataatccagttactcttagttatttttaaatgtacagtttgtttttttttttttttttttttttgagagagggtatcattctgtctcccaggctagagtgcagtggtaggatcagggttcactgcagcctccaacccctgagctcaagcaatcctcccacctcagcctcctgggtagctaggactacaggcgcgcatctggcttttttctattttttctagaaacggtgtctcactgtgttgcccaggctggtctcagtctcccgggctcaactgattctcccgccttggcccctcaaagtgctgggattacaggcaggagccactgcacccagcctgaatctttattgaatatagtcaccctgttgggctatcaaatactaaaccagagaggttcagagtgtcacatttgtatacaaattgggtcaacagctgtctcagcgagaactggagttttttagaataacgcttcttttatgattaaccagggacggtggtgggtggtttcagtcttcaataagaaaactttttactggctttcaaccttgagcccaatgataagaaagcttggatggaggagccttcactttg

SEQ ID NO: 317394 - DNA, 4001 bp, Homo sapiens
actcagaaggggataaaaactgctaaaaagaatagtaaatacttgatgtaaagcaattttgcagaatgggtagaagaaagctacacatgactacaaggtgatacgaatactaacagatggcatattaaagggtgatacagtaatcacccccttatccgaggtttcactttccggtttcaattatccgcggtcaatctggtgtgaaaataggtgagtccagtaaaataagttattttgagagaaggggaaagagatcatattcacataacttttattatagtatattgttacagttctattatgttattgttaatctcttattgtgcttaacttgtaagttttatcataggtaggtatgtatgtacggtataggaaaaaaccaagtatatatagggtttggtgctatccgtggtttcagccatccactgggggtcttggaacgtatacctaccccattaaggggatactactgtaaccagctgctatttactgtttactacggctcagacccactgacaatatttttcacatttcaaataattctcacaacctaaaaattaggtattacttccatcttaaacaaaaagaaattaaggcccagaatggtaagaaaacttgctcaagacaacaacagctaacatctgttcagtgtttaatatgcaccaagctcttctaaccctcacagggctgacaatggcagtgctgatgtccaccccaggtctattcgaacaatatctaacaaacatcagtacagtaatttaaaaaaaaaaaaaaaaggtggggggagaaggctcgctatttgataactggcttcttggcgattctgacaaagaaataaactaaggttaaagaacttgtgtaagacggaaatagagtagaagggtatgagaacaagagatggaaaaatacgacgattaaagacaaaagtgccagagaataaaatcaaggacaaaataggcaatagcgaaatggcactgtcatttcgaactgcattttttggcgttttcgcagacttcttcaagtggttggcaaaagaaaaagaaataaagaaacccaacaaaacaaaaatctcgctgtatcagaaggctaagatgcttaattctctcagtgcccaacatctctggccaacttcaaagcagctccaactgtttactgccttctgaaggtgcaaaggcaacaactgtaaagggaatgtcaaacagggcaaactcgggtgatgaatgacacaaagacaaccccgtcctgtggcctccagagccgccaggaaaccccacggaagcccgacccagagcgcggcggcagcgcctggagggcctcgcatgcggaccacgagcggcaccggacgcgcgggaggcgccagcccaggcgggcggcggcgccggctctgctgttgtgttgctccctcattggccaggcgtgggtggagggaagtgaggaacaggaagcaagcggaggcaccgacctgaggaacgctcaaaattaaaatttaagagcaagcccgggaatttacggtggaggggtgcaagttccgaggggacgccggaaaagcctgcgacgtccacccctgacgaccgccctcgggggcgaactgccgctcaggagggcgatccggacgccctgcccgcggccccggcacggcagccccggcgcggcggcccggcttcggcttccgccccagcccggtcccggcgtcctgcaccgccggcccggcctcactcacagcatgatccgcgagacgtgcagccgcaccgggacgctcctgtctttgaaggcggtggtgatgaagcagccgaaggtgagcgccgccatcacgctcagcgagaaggcgaacagtgagttcgcccgcgacagcaccgtgttcatcgcgatcgtctcccacgagtccggactccacacgcacacccaggctcccgttccggcggcggaccggctccctgcgatccgcgccgtctgcggtgcgcgcgttccgggagcgcgcgccgccgcagccccgcctcctttccggtcctccgacgcgagcgcgcgcgcgcccgcttcccgaaacacacccacagcgcgcacggggcggcgcggaaagggagagactcagccgcgggcccgcccctccgtcgcggcctaacgccgccaccaatcagcgacgagtgagggaggggcggggtttgttgtggaagacccaccccctcctcttctaaattgcttctccgacctttgggttcagagaattgggaaccggtcgttcgctgtcctttttcggttctttggtcagaggtctgggactgcgacttcttgattacttatgtaccatttattttcacttgaaaccggcagcaagttaaggtggtttagaatctgtcctgacgggtggcgtttggaagcagcactttacaaaacgcctggtcctctcccttctttgtcaaacctggtcaaagttaggacttgagctttttttggaggatctgaggagcagtggggagtggggaattagccgcccaagtccttaaagctgtcacgtgcatcagtatttccacctccaacgtcagtccaattcctattaatgctttgctttgtatggatagctaaagatgttttagaagataagggttgaggctaccgatcctaagtatttgcattttaacatggtgatttctgataaataaaaggataacctttctgggttcttaggagcaaagaagataatggctgcggaattgctctacagcataatgtataagaatttcgttgggtcattaataaataatgcaattattttatcacattttcaatatcctgaagggcattagggttcaaaccgagccaatcctgactctgattatactatctgccaaaacctttgttcctttcacagctaagggtttttataaaaatggattcagggtctgctgaaataaattttttttaaaaatttcagtccataaaccaaacaaaaatatctgtcctggaatgtgatcaggaacaaaccagaaaactgtgaacatctgatcttgatactggcttatgttgtctcttgttaagcttttgcttctttgcattattcatgaccattcaattaatttttgtatagccatacaggtaggattattaccaagtgcctaccgtgtaccaggaatagttctaagccttgagaatacagcactaataaggcagactccctgctcaaatagagccaactaatgaaaaatcgataaaatagagactaaagagagatccttagttgcgtttaaaatcttagtttttaacttccaggctggcacagtttgttaacaaaaaaagaaaaaaaaggatttttattgaatgccatctatactgcaagtgatacagagattgtactgatcactttctacactcaaaagtatataatcaggtagagttaataaaataaaaacaaatctgaaatgtaaaacaaaaaaataccctgggaagttacatagcaaaggaggaaggaattacagccctggtaatgtgggacaacacagtgtgcaaattatttaacacaaagcctaaacaagacacattattattatagcatgttttagggaaataattcttgttgttgaactgcaagtacaggtatatctaagagatactcagaaggctggtcctgataaacaatgcatgtataaaagagtaagcagaaataagcctggaaaggtaagttatggtagaaaaccaggtcaagaagttgactttatatcagggaaattacatgtaaaacaagcatcgctacacaggcaaccatttaccagttatatgtggagagtgagtgatggacccaaaaggaagactgataggaggggcatttcggaaacaaactctatgttacttagcaactgcctaaataagagtgggggtctgcaaagcatagagtgaatgcagattgtgaacactcaaatgaaactagtattattattatgacaccacagtttttaacttgacttactggtagtgctaaaaacacataaaagtccacaaaaagagcagga

SEQ ID NO: 317395 - DNA, 4001 bp, Homo sapiens
gtaggtgggattacaggcacgtgccatgatgcctggctaattttttgtatttttagtacagacggggtttcaccatgttagccagcatggtcttgatttcctgacctcgtgatctgcccacctcggcctcccaaagcactgggattacaggcgtgagtcactgcgcccagctgcaaaatggttaggatttgattactaactgacagcttccgtaatttctgtccttgattccaacttaggacaaccagagaaaaccaaatacacacccctaacccataccatagaatgttgtgcttctagttagctcacctacagcttccctgtgccaacagcctccaatcaggccatacctgaagccattccttttttccactatagttttcccactcctctctttgactcgagtccctactcaaatgcaagtgacagtggctgactctcttgctataacaagccctgaaaaacatagcctttgcttgttctcatttggttggtctccatttacatcctcagaatttaatttgataaagtacataaaatatctagtacaaggcataactttttctaaggaccttttgaatctttaaaggaaatattaacacaaagactgagctgttttcaactaaaacttacacttttatctgaatcaaaaggcctgcctgacaacctggttttaaacgcagtcctcaatggtttcaaaagtggcaggtcagacctgaaagccagcctccctcccaaacggttttgggcttcactgtattagtagaaacagtagaagtggtttgctacttaccgttctatattttgaaaacagaccaaattgagggatcagagaggctgtaagaagaaagcatagacattttacagtataggatcaaggtaaggtattgttcatgaagttttttttttttttaaatgaagtcttgctatgttgcccaggctggtcttgacctcccgggcttaagcgatcttcctgcctaggcctcccaaagtgctggaatttgaggcattagccaccacatccagcttcataaggatgttttaaaatccagtttgggatttatccaggccacatcttctattttcccctctaatgcctaccttctttaaactgtccccatcccacttcccccagaaaggatattcagttttttatggcacctctccccaaaagcacatagaaataacatttggttctgttcccattagggttggttgagaaaggactttgaagctatggaataaaagtcgcgctagcgcactgcagcttcaattcctggtctcaagcgagcctcccgcctcaacctccggagtaactgggactaccggcccaagccactacacctggccaaggaagtaacccttaattaatagttcatgatgttattttcctttacaactcggggtaacaaatacaaaatttaatataagatgtgagcattttaactccattttaagagaggtgtccagtgtggttggactaaagcccctttctcgtaagcatccacaattcctcattcctgcacatctcctcccttgggaccatacataaaaactcaactcctcatcttgggcacctgaaaatctactttaacagagaaagcgctctagatggcaggtgtccttagagctgggagcgaagcccaagcaagaactaaagagggtggctgactccacaaagccacccccacaacccccagttcgcgttcctccacctggcaggtcctctggggaaccgccagtaacgggcgcgcgggtaccgtcgccgaggccgcccggagcagggcagggtccgccgccggtctgactcccaaacccgcttttctccggaggtccccgctcgccaggaccgctccgagcgctacctgcgaaggtaactgccaggagcagcagcgccaagcgcagcaccgacagcgccatcctcctcccgcgccggctgtcttgcccctgcggtctgttacctgcgccactcgcagggagcgctcgtgcgacggggcgcggggagggcgggggaaggggcggggcgagaatgggaggaaaagcagcggtaggtggcgagggaagaggggcggcgggaagaggagcggcgggaagaggagccgtgaagggtcgggggagaaccggaaagggctgggaaggagaaaggtagaaggacgggggagggggccatggggaaggaggggcgagggagatagaggaaggggcagttgttccccaacaccttcccctccccccaaggagacgaaggggaagacctctccctccgacatacaagaacctgtgacagtcctagggggacccttgtggagctcttgggagctctgtcaatcaacacctatttcttaagcatgtactaagtcccagatagtgtttcgttgctgaagacacagccctgacctcgacaaaggaggtccttgctctcaggaagcgttctgcctttccctcttttaatatattttttaactatttgagttgacacataatgattgtacatatttatgggggtacatagtgatatttggatacatacaatgtgtagtgatcaaaataggataattagcatattcatcacctcaaacatttatcattactttgtgttgagaacattcaaaatcctctcatctagctacttgaaaatacataataaattattattattatttaaatttcagacagggtctcgctcttttacccaggctggagtgcagtggcacgatctcagctcactgcaacctccacctcccaggttccagtgatcctcccacctcagcctccctcccaagtagctgggaccacagatatatgccaccatgccaagctaatttttgcattttttgtagagaggggttctcaccatgttgcccaggctactctcaaactcctgggctcaagcaatccgcccaccttggcctcccaaagtgctgggattacaggcttgagccaccgtgctcgacctttataatatattattgttaattgtcggcaccctacaatgctatgaaacactagcacttatcctttctacctagctgtaattttgtatactttaaccaacctctccctatccccctatccttcccagcctctagtaactactgttctactcattacttctgtgagaaataatttttgccaaagaggctgagcaagttagtgcattaaggccaggcgtggtggctcacgcctctaatcccagcactttgggaggctgagcctggtggatcacttgagctcaagagtttgagaggagcctgggcaacagggcaaaaccccgtctctaaaaaaagtacaaaaattagccaggtgtggccattgagctgagattgagctactgcgctccagcctcagtggcaaaatgagaccatgtcaaaaaaatttggccaggcacggtggttcatgcccgtaatcccagcactttgcgaggctgaggcaagtagatcacttgaggccaggagtttgagaccagcctggccaacatggcaagaccccatctctactaaaaatacaaaaattagctgtgcatggtggtgcgcacctgtagtcccagctacctgggaggctgaggcatgagaattgcttaaacccaagaggcagaggttgcagtgagccgagatggtgccactgcactccagcctgggcgacagagtaagactctgtcaaaaaaaaaaaaaagtgcattagcagatccacttttttttttttctgcttcttatgcctgtgtgtcaaatgattctgtgacatgttgccttatcagtaagggtccagtctggaaaacacaaggtttactaggtatttcaccagagataatttagtataaggaattggctaatccagtagggataactgaaaaaagcagaaagggaaaacgaggtaacacagagataaagcctttaggaagtaggcatcatgcctcgatctaggggaacaaacggattaggttgggattctcagaactagaaatttggaggagaggtcctggaaagctgggactcagacccatg

SEQ ID NO: 317396 - DNA, 4001 bp, Homo sapiens
ctcccaaagcactgggattacaggcgtgagtcactgcgcccagctgcaaaatggttaggatttgattactaactgacagcttccgtaatttctgtccttgattccaacttaggacaaccagagaaaaccaaatacacacccctaacccataccatagaatgttgtgcttctagttagctcacctacagcttccctgtgccaacagcctccaatcaggccatacctgaagccattccttttttccactatagttttcccactcctctctttgactcgagtccctactcaaatgcaagtgacagtggctgactctcttgctataacaagccctgaaaaacatagcctttgcttgttctcatttggttggtctccatttacatcctcagaatttaatttgataaagtacataaaatatctagtacaaggcataactttttctaaggaccttttgaatctttaaaggaaatattaacacaaagactgagctgttttcaactaaaacttacacttttatctgaatcaaaaggcctgcctgacaacctggttttaaacgcagtcctcaatggtttcaaaagtggcaggtcagacctgaaagccagcctccctcccaaacggttttgggcttcactgtattagtagaaacagtagaagtggtttgctacttaccgttctatattttgaaaacagaccaaattgagggatcagagaggctgtaagaagaaagcatagacattttacagtataggatcaaggtaaggtattgttcatgaagttttttttttttttaaatgaagtcttgctatgttgcccaggctggtcttgacctcccgggcttaagcgatcttcctgcctaggcctcccaaagtgctggaatttgaggcattagccaccacatccagcttcataaggatgttttaaaatccagtttgggatttatccaggccacatcttctattttcccctctaatgcctaccttctttaaactgtccccatcccacttcccccagaaaggatattcagttttttatggcacctctccccaaaagcacatagaaataacatttggttctgttcccattagggttggttgagaaaggactttgaagctatggaataaaagtcgcgctagcgcactgcagcttcaattcctggtctcaagcgagcctcccgcctcaacctccggagtaactgggactaccggcccaagccactacacctggccaaggaagtaacccttaattaatagttcatgatgttattttcctttacaactcggggtaacaaatacaaaatttaatataagatgtgagcattttaactccattttaagagaggtgtccagtgtggttggactaaagcccctttctcgtaagcatccacaattcctcattcctgcacatctcctcccttgggaccatacataaaaactcaactcctcatcttgggcacctgaaaatctactttaacagagaaagcgctctagatggcaggtgtccttagagctgggagcgaagcccaagcaagaactaaagagggtggctgactccacaaagccacccccacaacccccagttcgcgttcctccacctggcaggtcctctggggaaccgccagtaacgggcgcgcgggtaccgtcgccgaggccgcccggagcagggcagggtccgccgccggtctgactcccaaacccgcttttctccggaggtccccgctcgccaggaccgctccgagcgctacctgcgaaggtaactgccaggagcagcagcgccaagcgcagcaccgacagcgccatcctcctcccgcgccggctgtcttgcccctgcggtctgttacctgcgccactcgcagggagcgctcgtgcgacggggcgcggggagggcgggggaaggggcggggcgagaatgggaggaaaagcagcggtaggtggcgagggaagaggggcggcgggaagaggagcggcgggaagaggagccgtgaagggtcgggggagaaccggaaagggctgggaaggagaaaggtagaaggacgggggagggggccatggggaaggaggggcgagggagatagaggaaggggcagttgttccccaacaccttcccctccccccaaggagacgaaggggaagacctctccctccgacatacaagaacctgtgacagtcctagggggacccttgtggagctcttgggagctctgtcaatcaacacctatttcttaagcatgtactaagtcccagatagtgtttcgttgctgaagacacagccctgacctcgacaaaggaggtccttgctctcaggaagcgttctgcctttccctcttttaatatattttttaactatttgagttgacacataatgattgtacatatttatgggggtacatagtgatatttggatacatacaatgtgtagtgatcaaaataggataattagcatattcatcacctcaaacatttatcattactttgtgttgagaacattcaaaatcctctcatctagctacttgaaaatacataataaattattattattatttaaatttcagacagggtctcgctcttttacccaggctggagtgcagtggcacgatctcagctcactgcaacctccacctcccaggttccagtgatcctcccacctcagcctccctcccaagtagctgggaccacagatatatgccaccatgccaagctaatttttgcattttttgtagagaggggttctcaccatgttgcccaggctactctcaaactcctgggctcaagcaatccgcccaccttggcctcccaaagtgctgggattacaggcttgagccaccgtgctcgacctttataatatattattgttaattgtcggcaccctacaatgctatgaaacactagcacttatcctttctacctagctgtaattttgtatactttaaccaacctctccctatccccctatccttcccagcctctagtaactactgttctactcattacttctgtgagaaataatttttgccaaagaggctgagcaagttagtgcattaaggccaggcgtggtggctcacgcctctaatcccagcactttgggaggctgagcctggtggatcacttgagctcaagagtttgagaggagcctgggcaacagggcaaaaccccgtctctaaaaaaagtacaaaaattagccaggtgtggccattgagctgagattgagctactgcgctccagcctcagtggcaaaatgagaccatgtcaaaaaaatttggccaggcacggtggttcatgcccgtaatcccagcactttgcgaggctgaggcaagtagatcacttgaggccaggagtttgagaccagcctggccaacatggcaagaccccatctctactaaaaatacaaaaattagctgtgcatggtggtgcgcacctgtagtcccagctacctgggaggctgaggcatgagaattgcttaaacccaagaggcagaggttgcagtgagccgagatggtgccactgcactccagcctgggcgacagagtaagactctgtcaaaaaaaaaaaaaagtgcattagcagatccacttttttttttttctgcttcttatgcctgtgtgtcaaatgattctgtgacatgttgccttatcagtaagggtccagtctggaaaacacaaggtttactaggtatttcaccagagataatttagtataaggaattggctaatccagtagggataactgaaaaaagcagaaagggaaaacgaggtaacacagagataaagcctttaggaagtaggcatcatgcctcgatctaggggaacaaacggattaggttgggattctcagaactagaaatttggaggagaggtcctggaaagctgggactcagacccatgggaagggggtgttgcttggatatgcaggtggctctaagagtgtgtggaaaagctgaagactggagccaggtgcagtggctcacacctgtaatcccagcactttgggaggttgaggtgggtgggtcac

SEQ ID NO: 317397 - DNA, 4001 bp, Homo sapiens
aatatctcactcgctatcctttttgcttgtactcaatattggtgtaaacttaaaacaaatatgcaacgggtatgcttttataagggcatttatttagcaataaaatgatgcttaagctttgttcatgaagtatgtaggcaaggttctccattaaatattctcaatcaaatggctaaacctaattttaaagtaaaaatttgtgtttcttcaggaatccctctgctagatttggcttgtcagctacttcatggagaggctgagagaatgggttagaggaggcaggatgaaagctagcctaggctcccttttattttcctaaatggtgactgagtcggagctgatgaaagaagttaactcatctccacgtagtgcactgcagatggactccacgagaaattctctcaaatgtcacggtaaggattggcaatgtgtctaggaaccactctcgctccagttcaggccttccgcgttttaaagggtgggctaggggcggtattcagccaacagggcggcctcctcactgggacaaccaaattcaaggcttccagttgtatcgtgctctgtacgtgagcagctcttactgggctccattcagatcaggtgaggaaaataaaaatgactggcaagccatggccactagcttcaagtgtggaaacctggctccctcttaataacccttttgaaaactccccaggggagtctatggtttaactcttttatcgctgtcacctgcaatcctcccgccctcgcaacctcttcccgcagagttcaaggcagtgattcattttggaataaaatataatcaaatgcattgcaaagatgttctagattaaagtcatgtcgaagcacaaatctgatcgacaattttatgtaagcgggagcgttcaacgagtccttactggtgccgccaaacatcctcccacccttggagagcgggcatttataaatcttacatcttcctacctcctccctcaaattccttaatggaccattagtgacaggatcgatcctagttactttagtagcgatacatcgcaaaggcacatctgctgtgtttaccagtgccagaaacaccattcaaaagttgagaggttagagccagcactttgtaacctttgtgggccgggagggggcacaggggagagcagggtgggggaggaagagtgtgaacctggtgagacctgaactcctgtgcatccaagaaacaagcccttgaaccagctgggagggggcagcggaactgtgaacttctccagcagccctgcgccgccgcgtttccctaaacccctctcctcagaaaacggagcccactccccacccacatccggcggccgcggcccccgcctcggagcagcgcgcgcgtgtgcccggggatgtgggtgcgcggaacttacgtctcggaatttgttccactgtccgacttccttgtcatactgagagattgtggtgagccattgtttatcatccagaaaattaccgccgtccgaccgccccccggctgcagccaccgccgcggcagctgcgagagactgactgcaccaagcggctgcacacacacacagtacggctgacaccttgagcatctgggagaggagacacaacggggggtgggggggcatgtcagtgtcaaataaggggtacgaagccaggagcgaccctggaaaacatgcattagcaacgacgagggtagagggaggaggagacaagcagaggcaagcgtgtcccctccccgcaggctttacccccaaaagccgggcactcacacacacgcagacccagaggaggagaggtgggtataaggaagcaagccccagccgcagcagcccgagcgggcacaaaaccgcttcctggcacatcaccttgttgtgagccagcactgtgctcgcagctcctgctggaaatgcagccctgctctgccaactcgctgctttctggagctgctgcacgcgccgccgtctcgagccgtccactcagctccctgcgcccggcgcgctccccccatctccaccctcccttcgcgcgcggatctccagcttactcccctccgttccccctccctccccgacctccgtttttttcctcttccacctcctcctatcccaccttcctctcgctggatcccagctacagttggctccggataggacgcttggctggagccagaggacgaggtagctcctagcctaggaatccttatctgctttgtaacctctcccctccagaagaggttctcatgttcgcgagacagcctgctcattctctgctcctggatttaacacaaagtgtactatctctcgcagttgcctctgctccacaatttccagggttgtcaggcagacgtgagaaacaagatctgaggaaaactttatgcattaataaataagaatacctggacttcctaccctgtaaagctcctgaactcagctcctccctaaagaaaggccatctatccacaaggtcttgggagatctgtttaatttcagaaaatttaaagtttgctgtgagcttctggattactaccgacagcaaactttcatgttaaaggttgcagtttctttttttcttttcctttgtgtgtgtgtgtgtgtgtgtgtgtgtgtgtgtgtgttttgttttgagagacagaagcataacgaggtagggcgtttgagaacacctatatctcctacatactgtagctgcatttttccctttataaaaactccctggcagctttattttagaacgtagaacctgaatcggaaactttaaaagcctactgtctccctcctgcaaaataagacagttttgaagcccgaacaccaattttgtattccaaacttccatttatgacaaaatatttggctttccatgtcgtttctacatattctaaataaactggaaggaaatcagtaattagccccttgtagagaaaatctgatacagagaatctctcatatttagagaatttaggtgaagtgaatattacacataaatcaagaaatgtctgcaagccaatagactgcaataacattatgaatctctatttgaattattagagatttcagccaaaactacatctcccaaagctacgacctttgaacatttcttgtagcctccaaaacttcagaagctattcgaatagcagcagtacacattttccatatcaatctcgtctaacattttgcaatctatattaacaaaacgaccaaactcaatgtttaatgttaatttccttttttaatgtaatatttcaaaataaatgtataatatgtatggtaggaaatataagtgtaatatttatataggaaagaaatttctattactatttttaactcagaaaaagatgtttttctcaattccccccatttctacagtgatgaatgcaattagtggagaaaaacacggaacatactactgcaattcatgggagccctgattgacacgaacaaatgtcagaaaactttaagaatatagatgtgtgctaattcttcaaagatatttatttttgcctgttcacagagggttattaccatgtagtttacatatttaaattcttgtttagtaaatttattaagacaatagtaggtggtccattctccactatcaccttttcctgacccctggtcctttgacctcccacactctcatccttagctctcttcctcaaaatttgaagaaatactttattattaataagaatatctcatcatgttttaaaacctcattatttctaaatttaagtctaatagggaaagcacagaaattgtttcttacaagaaactgatacttggcagaagtcagtaattctaaaagtaaaaatgaccttctaacctttgtaacttaccttttaaaaagatagttgttattagctacaaaatacttgatgaggaataatgctctaacactcatccccttcagcatctgctatacattttagctcaataactggcaccatctaaggccaacatggtcacctttagatttatggaagcacatatatttatgtttatacagcattt

SEQ ID NO: 317398 - DNA, 4001 bp, Homo sapiens
ggtctttcaaaaattcatttctagaagattttaaagcagccattaaataatgaaatgtcataatgtcaaacactgttcaaatactgatgaagtgttcaattttcgtttttgtttttgattttgccaaatgagggcatgataaacaaattttctttaggtttaggaatatctcactcgctatcctttttgcttgtactcaatattggtgtaaacttaaaacaaatatgcaacgggtatgcttttataagggcatttatttagcaataaaatgatgcttaagctttgttcatgaagtatgtaggcaaggttctccattaaatattctcaatcaaatggctaaacctaattttaaagtaaaaatttgtgtttcttcaggaatccctctgctagatttggcttgtcagctacttcatggagaggctgagagaatgggttagaggaggcaggatgaaagctagcctaggctcccttttattttcctaaatggtgactgagtcggagctgatgaaagaagttaactcatctccacgtagtgcactgcagatggactccacgagaaattctctcaaatgtcacggtaaggattggcaatgtgtctaggaaccactctcgctccagttcaggccttccgcgttttaaagggtgggctaggggcggtattcagccaacagggcggcctcctcactgggacaaccaaattcaaggcttccagttgtatcgtgctctgtacgtgagcagctcttactgggctccattcagatcaggtgaggaaaataaaaatgactggcaagccatggccactagcttcaagtgtggaaacctggctccctcttaataacccttttgaaaactccccaggggagtctatggtttaactcttttatcgctgtcacctgcaatcctcccgccctcgcaacctcttcccgcagagttcaaggcagtgattcattttggaataaaatataatcaaatgcattgcaaagatgttctagattaaagtcatgtcgaagcacaaatctgatcgacaattttatgtaagcgggagcgttcaacgagtccttactggtgccgccaaacatcctcccacccttggagagcgggcatttataaatcttacatcttcctacctcctccctcaaattccttaatggaccattagtgacaggatcgatcctagttactttagtagcgatacatcgcaaaggcacatctgctgtgtttaccagtgccagaaacaccattcaaaagttgagaggttagagccagcactttgtaacctttgtgggccgggagggggcacaggggagagcagggtgggggaggaagagtgtgaacctggtgagacctgaactcctgtgcatccaagaaacaagcccttgaaccagctgggagggggcagcggaactgtgaacttctccagcagccctgcgccgccgcgtttccctaaacccctctcctcagaaaacggagcccactccccacccacatccggcggccgcggcccccgcctcggagcagcgcgcgcgtgtgcccggggatgtgggtgcgcggaacttacgtctcggaatttgttccactgtccgacttccttgtcatactgagagattgtggtgagccattgtttatcatccagaaaattaccgccgtccgaccgccccccggctgcagccaccgccgcggcagctgcgagagactgactgcaccaagcggctgcacacacacacagtacggctgacaccttgagcatctgggagaggagacacaacggggggtgggggggcatgtcagtgtcaaataaggggtacgaagccaggagcgaccctggaaaacatgcattagcaacgacgagggtagagggaggaggagacaagcagaggcaagcgtgtcccctccccgcaggctttacccccaaaagccgggcactcacacacacgcagacccagaggaggagaggtgggtataaggaagcaagccccagccgcagcagcccgagcgggcacaaaaccgcttcctggcacatcaccttgttgtgagccagcactgtgctcgcagctcctgctggaaatgcagccctgctctgccaactcgctgctttctggagctgctgcacgcgccgccgtctcgagccgtccactcagctccctgcgcccggcgcgctccccccatctccaccctcccttcgcgcgcggatctccagcttactcccctccgttccccctccctccccgacctccgtttttttcctcttccacctcctcctatcccaccttcctctcgctggatcccagctacagttggctccggataggacgcttggctggagccagaggacgaggtagctcctagcctaggaatccttatctgctttgtaacctctcccctccagaagaggttctcatgttcgcgagacagcctgctcattctctgctcctggatttaacacaaagtgtactatctctcgcagttgcctctgctccacaatttccagggttgtcaggcagacgtgagaaacaagatctgaggaaaactttatgcattaataaataagaatacctggacttcctaccctgtaaagctcctgaactcagctcctccctaaagaaaggccatctatccacaaggtcttgggagatctgtttaatttcagaaaatttaaagtttgctgtgagcttctggattactaccgacagcaaactttcatgttaaaggttgcagtttctttttttcttttcctttgtgtgtgtgtgtgtgtgtgtgtgtgtgtgtgtgtgttttgttttgagagacagaagcataacgaggtagggcgtttgagaacacctatatctcctacatactgtagctgcatttttccctttataaaaactccctggcagctttattttagaacgtagaacctgaatcggaaactttaaaagcctactgtctccctcctgcaaaataagacagttttgaagcccgaacaccaattttgtattccaaacttccatttatgacaaaatatttggctttccatgtcgtttctacatattctaaataaactggaaggaaatcagtaattagccccttgtagagaaaatctgatacagagaatctctcatatttagagaatttaggtgaagtgaatattacacataaatcaagaaatgtctgcaagccaatagactgcaataacattatgaatctctatttgaattattagagatttcagccaaaactacatctcccaaagctacgacctttgaacatttcttgtagcctccaaaacttcagaagctattcgaatagcagcagtacacattttccatatcaatctcgtctaacattttgcaatctatattaacaaaacgaccaaactcaatgtttaatgttaatttccttttttaatgtaatatttcaaaataaatgtataatatgtatggtaggaaatataagtgtaatatttatataggaaagaaatttctattactatttttaactcagaaaaagatgtttttctcaattccccccatttctacagtgatgaatgcaattagtggagaaaaacacggaacatactactgcaattcatgggagccctgattgacacgaacaaatgtcagaaaactttaagaatatagatgtgtgctaattcttcaaagatatttatttttgcctgttcacagagggttattaccatgtagtttacatatttaaattcttgtttagtaaatttattaagacaatagtaggtggtccattctccactatcaccttttcctgacccctggtcctttgacctcccacactctcatccttagctctcttcctcaaaatttgaagaaatactttattattaataagaatatctcatcatgttttaaaacctcattatttctaaatttaagtctaatagggaaagcacagaaattgtttcttacaagaaactgatacttggcagaagtcagtaattctaaaagtaaaaatgaccttctaacctttgtaacttaccttttaaaaag

SEQ ID NO: 317399 - DNA, 4001 bp, Homo sapiens
gcgcctggccccggccccccggaccccgcccccggccggccccgcgctcaccagcgagtgcctgcgctgcacctccagctccgccgacgtctgcccggtgccgctggggacggcgggcgccgaaaacaccgcgtgcacgctctgcagcgcctcccccgccgcctcgatctccttcatcagcgcccaggcctcgccgcgctccgcaaagtcgcgcagcccgttactgacgtactggttcttcctccacatgctgtagtcggagctatgcgcggcccctgcaggaccacccggccgcgccgcggaccatggtcagacactgcggtcgggcttggattccagggggcgccccaggaaatccctccccgccgcccgcagggaaccatggcccccagtcacgtcggaccgtgacaccctgtggctgcccctgccgcgacccacctgcgccctccccgtgagcgccccctgcccccaccgcatccccggaaccgcacaccgcaggcgctcggcaaacattctggtgttagagtctcccgacgtcagcacgccccagactgggaagcgccgccgtgcagctgtgcggggggctccggcgccgcagccctcctggtggagcaggaggcgaggagggggctgtacttacccagcagcgaagaccactgcgcaggggggcggaacagggggtactgcttggggaaggccgtctggctccacttgcccgtgaaggtgatgctgtatttggccagggctctggcggaacagatggactctcccccaagaggctggccggcggcgccgagagtggccaggaggagagcgcagagggccttgcccagggcggcggccgggctggggttttccatcacctgggagcacagaggggagcagccgcgcgctggcaccgtcgtggcagcctcggggtggaaagccgagagggctgcggcactttgggctctgaggacggccccgagcacccgcgaccccctccctgctccgcaaagctctcctgcggtgcttccgagacccccatcagcggaatggacggcgcggggttagatcgcccgtgcgcctgcgagcgaccaggggtaacgggcaggttttcagtccgagtccctgcagcttgccgggccggtctgggtgcggcctccgggatgccttcgccgtcgcagggacccggggccttggccgactggctgcccccgggactagacccttaaagctcggtcgcagccagtcctgggggtccctctggaggtgccacaaggttctgggccgcggggaaagtgcaggaggcccgggccctctctgggtgtcccgggggcacgcagtactcacccggcaggagcagcgggagcgcggccggcagcggtcgggtcccagccagagcccggagctcctatttaagcccgaggccggcgccccgggccggccaatgaggctccagttcctcctgtcttcgatgctgcacggcctggcctccagcgagaggcagataggacgtgggagaaaggaggagaaggggctgcgggggcggcgggggctgccgctttcccaactcgccctgcccagcgaccttccccgggtcggatcaccctcttcccctggcagtgctgccgcacccctttctttgtctgtctgtcctatccctcccctcccctccctgtcccctcccttcccctcccctcccctcctcccctcccctcctcccctcccctcctcccctcccccctgtcctcctccctctccccgtttctctcccgttccaacaagcgccttcctggtgcctccctaggtgccactgaggggagttctttgccccaagcctttcgggaaagctcagggcgtgggggcagaggggctcttgttttcaccttctcgaaattagagccagcgtgctacaccttcttgcgcagggtgtgacctggagagccctgtgcgtggcctgacttcagtctacatgctggaagtggctggggaagctcctggctcccggcgcaggcatccctggcctttggggccctggctttaagtctctttcctggcatggcctaaagctgcacagaacagcctagcggtctgcactgtggccagagggcatttgcaagccatccctcctggagggaggtcagagtgggctgagggtctggggtggaacgcgcagggagtcaggaagagccacagaaagggggcccccctccccaggaccccgcacagggctggggctgcaggccggcggtgtgtgcggtgcagagccctcccaggggctctaggcttccctgcctttgggatgaagctaacagatgctgaagttgatcctgctccatgtcaggaaaatatttataggtccccagtcatgggatctggaaacagagcggaggaaggagctcgggaatggtcttgctcaatccttcccggcctctgctcatcggaatcacccagagggcttttaagcttagacaaaacactctgatgtttggaaccctgttaatgtttcacagattcaaaaagagagaaaaaataaatagaagcaactaggacagaatgcaaacagaaacaaatgatctaacctgtattttaagcgaaaaccacagatcagccactcaatgcagtatttagactccaggcccccaggccaaagacaaatttccacctccgtgcttctcaaatgtttttatctgaggactccttcatactcttaaaggtcactgagggccaggcgcagtggctcatgcctgtaatcccagcactttgggaggccgaggcgggaggatcacttgagcccagagtttgataccagccttggcaacacagggagacctcatctctacaaaacatacaaaaattagctgggtgtggtggagtgcgcctgtggtctcaactagtcaggagactgtgtctgtggtcccggctactcaggagactgaggtgggaggatcacctgagccaggggaggtcaagcctgcagtgaactgtgtgtgccactgccctccagcctgggcgacagagtgagactcatgcctgtaatcccagcactttgggaggccagggcgggcggatcacttgaggtcaggaactcgagaccagcctggccaacatggtgaagccccatctgtactaaaaatacaaaaactagctggatgtggtggtgcacgccagtaatcccagccactcagaaggctgaggcaggagaatttcttgaacccagggggcaggggttgtagtgagccaagatcgcgccactgcagtccagcctgggcaacagagcgagactccatctcaaaaaaaaaaaaaaaacaaaaaaacaaaaaacaaaaacaaaaaaaactaattgaggacactgaagaacttttttgtttgtatgggttatacctatggatacttatcattttctaaatcataacagaaatgttcagaatacttgccaattcacttaaaaataagaaaatattgctattacacattaacataaatagcataatgttttatgaaaagcaatcatacttttaaaaatgaaaaacccgcctgagaaaagtggcgtggttctacgttggtgcgaatctttgtattgtccggcttagtggaagctggattcccatatcggctccagcacttcatctgctgagatgtgctgttggttgaagtctatgaagaaaatccagccttggctgcgtatgttaccagccttgtcaggtgcctgctctggcctgcagccctcgaaagccgccgtgtgcccatcagagcatgggagcaaaaggtgccctcatgcaatgggcttcgatctcatcatctgcctggaaggatctcaggccctccacgagtccccagagcaggactggcagccgctgctcagaggctggactcgaatccacaggcctttttcccagagcggcatggggcggctgtactgcagctactctgcatccctggacaatcctcgctttctggacagcttcctcggctgaaaggagcacaggctccatggcaaagctactggctctgggtct

SEQ ID NO: 317400 - DNA, 4001 bp, Homo sapiens
tgtggggcaattggaggtgggtgggggtggatggtgtcatttgggagtggatggggttaggtgtgagcaggtgcagggcgggtggggagcacggggaggaggctggagttggtgtgggcaggtgcagggcagtgcccgggaggcactgtcaggtgaatgtggggctgggcagaggctgacctgggacgccagggctgctgctgagaacctgctgtctgggcaggcagccgggccccgccaggtgtgactgcccactgcacagagggggtggaggccggaggcctagacgcctgtaggggctgggagggatgtgggtgagtccggctgctcgacaccctccgtcccaccagtgtccacagccctggccccggctggccccggcgtccccacagtgggcacccccagctggagccagcttgcatcagggacctggatagtgagtggcgagccctccacagtgggatcctacagacactgctaccactgaccaacggggtcagtagctggtttaaaaaagaaagggcagcagagaggccacccagaagagccgctgtttccatgtgccgcgcttacacatgctccagagggtccggctgcctaaccatgcgccgcgcttacacatgctccagagggtccggctgcctaaccatgcgccgcgcttacacatgctccagagggtccggctgcctaaccatgcgccgcgcttacacatgctccagagggtccggctgcctaaccatgcgccgcgcttacagatgcacctaaccttatattgttcaagtctcatgtcctgcctatcagggatgttttcggaccctacatgggaagcccttggcccgtttgaaggtcgggtcagggggcggctgaggctgtccagggcagtggtcaagggcttggggaagcggaggtagactcaccaggtgctggtgctcagaggggccggggaacacccacgccctggccgggccaccccgtccctcctggtgcttgatgccaaggggagcgggtcaggccgcgagaggcccagggccagcctggggagcagagctgctcagcggggcagaggtcctcctccgggcgccgggctcagggcccagtggccagatggttttctttgctgcagggagtgccggctgcgggggtaggcctgggagggctcatgcagctgctcttgggtttctctgctgttgttttttgctggaaaatcaatcctgcaagtccagctgggctctggctgagagcagctaggggtggggatggtgggtgcttcccggcccccacggggcaagttctgggcccacagtggggagagaaggcaggatggggtgcagggccagcctggggtggggccccgaagagcctggctccctgccctgtgccctgcttgggccaccccagagggactgtcccgaccctcccaacttcctgccaaggcccccggagctgcctgcagcctccccttgctcccgtgcccggggcggaagtctacaggagaccagagcccgggtgttcatcagcagccgcaggagagttccccaccaaggcgcagtagcctgaggtgctggggctgcccgaccctccccagctccacccctcttgcctctgagccctacccaaggcctggagaatcaccgcttcctcctgctccaggggttccagcagggcccttggaggatgtgcctgccgcgttctcagccctctctgccgacctttcttgaacggactctggccacggtgccaacgcgtcaacggtctgtccgtctgctgtccgagctcaggggccgtccatgcctccacggctggcatacagtagctctggttttacccatgagggggaagcccagcacccgtgccctcgatcacatcgccagttcacaaacacacatgcgcacacgcacacgccgcccgcccaccaggcagacacccacacacctgtgcacgcacgcgcacgccaagccagcgggccctgcccctgccccggagccctcagtgtcagaaccaggctgctgtggctgtttcctctttaattcgcctgagttttatgagcccaaattcatagacctttgttgctgcatataaacttgaggataaacttgttgaatttgttcaacgtaagcagctgaaattctgcgtggggtggtgatgaacggctctagcactcggtaaaaggtatttaaagcgcatgtagtttacaacactaacagcccgccgcccgcgagcacagcccgtctggtcatccggcggcctcaccgttcaccacggttggcggccctggtcactcccacggtctttaccagccgggtgccagtggctgggaccaggttctgaccactgtgcccactcactgtggaatcgcgtgagcaggccagaccctgcgtcgtaaggacagagcaggacacgtcctgtcatggggcacccgctgtctgcgactttgtttccgtttgtttccgcctcagcttgggggagacagttggcaggcaccagaggcgctcctgtgaggtcacctggccagtctcaggattagctgcaggctttggctgattttcttgggtcttgtacacagatgcttgtcagcaaataccagagacttatctcttcccttccaacatgcaaaccttccttcatgttcttgtcttaagcgttttggcacaacctccagcctaataccagcctctagggagataaacagtgctgccgatttcacaggccaggaaaccgaggctgagggccccccacccacctcctgctaccccgcacccctcctggggccttgctgggcggggtgactccccggaggcggcaccaaggggaggttcgtttcgaggctcagagcacttttctgacagctttctgtcccttacatcccagactcagttacacttcagcgtcccggctccctggccgccaggctcacaccacagacagcccttggaggcattccattcctgccccgacccttcaacttggaaacatggaaacaatgaggccagctgagtgggagcctccaggcctgtgtccagagctagttcccagtgtctggctgcctctcagggcggggcctgtctccagctggagctgggagggcggcccaccctgccagaggccagccccaccctcggctgccgtgggggctgaccagggcccagtgacccagcccagggcttgcctgtggagaggctggagtcagccgtcagcgcggaactcctggtcttcccactgccacctctgcagcccccaccagagatatcagaaaacatcagctccagcctgcagcccagacacttgaagtcaccttggctgcccctcctcacacccgtgcccacgtcagcaaaaccagggccggcttgttaaccgtgtccagaacccacccttcccaccctgcccaggccacctccctcagtggcccagggggctccaagttgaagagcccaagacaggtcagagatgggctgggcggcctctgccactcacctccggagagggcagggagcagaggcctcagtcatgaggtggggctgtcctcggcgtgggcctcgagactgggagccactgcccatacccaagagacctctgcgagcactggggtgcagagccaggtaggagggggcaccccaccaaaggcagcagcccccccccgcttctttctgctttatatggggcagggagcaaggggaggttgacacttggcggatgacgcggcagggtctggacacttggggtggcaggataacccacctgcatgcagggaaaggcttgggatggaaacatcccgaggggacccgggttccccagcacccgctgcagcccctcctcgtactacctggacccgctgcagcccctcctcgcaccgcctggacccgctgcagccccttctcataaatgagttgggactctgctgatttgcatggaccacgcttccaaaagcagctctgagaaaccaggaggctgggattttgaagaggacgccggtaaacaggctcagctgtgggccaaggtgaggc

SEQ ID NO: 317401 - DNA, 4001 bp, Homo sapiens
cagagcctcttccacacaaaagccgcaagcggctgtcctgggctgggaggcgagggtgcagccaggccccagccccgtccccaccgcgggggccatagcggcccttgcgcacgcggggtgcccactcacctcggtcaccgtgtcctgcgggatggtggcgaagttgggggaggagaaggtgaagccgctgtccgtcccggcgtcgtaggggtacaggtccagcgccgcctgttcccgccaacggtccccgtcgcacaggtccaggctgtccacgcccacgaaccagtcggggctgggcacgatgcgcaccacaaacgagacctgcggcgacagcggctcagcgcgcctggccccggccccccggaccccgcccccggccggccccgcgctcaccagcgagtgcctgcgctgcacctccagctccgccgacgtctgcccggtgccgctggggacggcgggcgccgaaaacaccgcgtgcacgctctgcagcgcctcccccgccgcctcgatctccttcatcagcgcccaggcctcgccgcgctccgcaaagtcgcgcagcccgttactgacgtactggttcttcctccacatgctgtagtcggagctatgcgcggcccctgcaggaccacccggccgcgccgcggaccatggtcagacactgcggtcgggcttggattccagggggcgccccaggaaatccctccccgccgcccgcagggaaccatggcccccagtcacgtcggaccgtgacaccctgtggctgcccctgccgcgacccacctgcgccctccccgtgagcgccccctgcccccaccgcatccccggaaccgcacaccgcaggcgctcggcaaacattctggtgttagagtctcccgacgtcagcacgccccagactgggaagcgccgccgtgcagctgtgcggggggctccggcgccgcagccctcctggtggagcaggaggcgaggagggggctgtacttacccagcagcgaagaccactgcgcaggggggcggaacagggggtactgcttggggaaggccgtctggctccacttgcccgtgaaggtgatgctgtatttggccagggctctggcggaacagatggactctcccccaagaggctggccggcggcgccgagagtggccaggaggagagcgcagagggccttgcccagggcggcggccgggctggggttttccatcacctgggagcacagaggggagcagccgcgcgctggcaccgtcgtggcagcctcggggtggaaagccgagagggctgcggcactttgggctctgaggacggccccgagcacccgcgaccccctccctgctccgcaaagctctcctgcggtgcttccgagacccccatcagcggaatggacggcgcggggttagatcgcccgtgcgcctgcgagcgaccaggggtaacgggcaggttttcagtccgagtccctgcagcttgccgggccggtctgggtgcggcctccgggatgccttcgccgtcgcagggacccggggccttggccgactggctgcccccgggactagacccttaaagctcggtcgcagccagtcctgggggtccctctggaggtgccacaaggttctgggccgcggggaaagtgcaggaggcccgggccctctctgggtgtcccgggggcacgcagtactcacccggcaggagcagcgggagcgcggccggcagcggtcgggtcccagccagagcccggagctcctatttaagcccgaggccggcgccccgggccggccaatgaggctccagttcctcctgtcttcgatgctgcacggcctggcctccagcgagaggcagataggacgtgggagaaaggaggagaaggggctgcgggggcggcgggggctgccgctttcccaactcgccctgcccagcgaccttccccgggtcggatcaccctcttcccctggcagtgctgccgcacccctttctttgtctgtctgtcctatccctcccctcccctccctgtcccctcccttcccctcccctcccctcctcccctcccctcctcccctcccctcctcccctcccccctgtcctcctccctctccccgtttctctcccgttccaacaagcgccttcctggtgcctccctaggtgccactgaggggagttctttgccccaagcctttcgggaaagctcagggcgtgggggcagaggggctcttgttttcaccttctcgaaattagagccagcgtgctacaccttcttgcgcagggtgtgacctggagagccctgtgcgtggcctgacttcagtctacatgctggaagtggctggggaagctcctggctcccggcgcaggcatccctggcctttggggccctggctttaagtctctttcctggcatggcctaaagctgcacagaacagcctagcggtctgcactgtggccagagggcatttgcaagccatccctcctggagggaggtcagagtgggctgagggtctggggtggaacgcgcagggagtcaggaagagccacagaaagggggcccccctccccaggaccccgcacagggctggggctgcaggccggcggtgtgtgcggtgcagagccctcccaggggctctaggcttccctgcctttgggatgaagctaacagatgctgaagttgatcctgctccatgtcaggaaaatatttataggtccccagtcatgggatctggaaacagagcggaggaaggagctcgggaatggtcttgctcaatccttcccggcctctgctcatcggaatcacccagagggcttttaagcttagacaaaacactctgatgtttggaaccctgttaatgtttcacagattcaaaaagagagaaaaaataaatagaagcaactaggacagaatgcaaacagaaacaaatgatctaacctgtattttaagcgaaaaccacagatcagccactcaatgcagtatttagactccaggcccccaggccaaagacaaatttccacctccgtgcttctcaaatgtttttatctgaggactccttcatactcttaaaggtcactgagggccaggcgcagtggctcatgcctgtaatcccagcactttgggaggccgaggcgggaggatcacttgagcccagagtttgataccagccttggcaacacagggagacctcatctctacaaaacatacaaaaattagctgggtgtggtggagtgcgcctgtggtctcaactagtcaggagactgtgtctgtggtcccggctactcaggagactgaggtgggaggatcacctgagccaggggaggtcaagcctgcagtgaactgtgtgtgccactgccctccagcctgggcgacagagtgagactcatgcctgtaatcccagcactttgggaggccagggcgggcggatcacttgaggtcaggaactcgagaccagcctggccaacatggtgaagccccatctgtactaaaaatacaaaaactagctggatgtggtggtgcacgccagtaatcccagccactcagaaggctgaggcaggagaatttcttgaacccagggggcaggggttgtagtgagccaagatcgcgccactgcagtccagcctgggcaacagagcgagactccatctcaaaaaaaaaaaaaaaacaaaaaaacaaaaaacaaaaacaaaaaaaactaattgaggacactgaagaacttttttgtttgtatgggttatacctatggatacttatcattttctaaatcataacagaaatgttcagaatacttgccaattcacttaaaaataagaaaatattgctattacacattaacataaatagcataatgttttatgaaaagcaatcatacttttaaaaatgaaaaacccgcctgagaaaagtggcgtggttctacgttggtgcgaatctttgtattgtccggcttagtggaagctggattcccatatcggctccagcacttcatctgctgagatgtgctgttggttgaagtctatgaagaaaatccagcct

SEQ ID NO: 317402 - DNA, 4001 bp, Homo sapiens
attataataaagagtttggttggtcttatgtttggttagaaaatgtgatctaacatcagctgacaatcacaatagatacaaacagcacacatagactttcttttcacaatgggcttctcagctaatatctcagacaatattgtgaatattatggtcatacaaacagttctgactaatatccaatgtgaattttaaacttagcaatccactaaacaaagcaaaagctggaattttctgcttttagatcagtatgtggactaatggaaaaaaagtcacacaacttcatataacttatcttacatgcgataactcatcatacatgcctagatattattatatttaaaatatctgggttggttttataaacttatatttattaaaaactatactgtgcttggtactggcctagattcatagcaggcagtcaatcaatacttgtaaaccaatggatttgactgagaagataagtaatatcgcagcaaatacgtttcttgcacctctcgccataattgagtaaatgatttaactatataaaaacataaaagatgcttacctgcttttcctcagaacttccagaatcagcctgtttaaccttagaaacagaaaagatgaagaaagattacaagaatgtcctcctagcacatggaagcacacaattcagttattttcaggaattttctttaagatgcaactgtactcactggtatggcacaggtgatgcctaggaggcaaaagcaaatcactgcaattctcatggtagtgagttttcctgcaaaatatttcataaggaatagctgacatcttcataggttacaacagtgatacctttttatactaccacattacaaaatgatcacaaataaaatatattttctatagaatcttttctacttcttagagatgccttttctttttagtattatagtctttcaagttaatatttatattgccacctattatccatctttcactattaggcaagggaaagggaaattttgcaagtctgtatttattcaactttaaaatttagagttccagaaattataccattactaccttatatatctagctctctaaacctacaaacagatcaacagtaacttaattatattaataagctagtatgggaatattttttagagaagaaaaaactcacagaaaaaaatgaaaaaaatttgctttatccatttttccaacatgtactttaaatgtgacttttagcttaattatcaagtaggtgctacttaggtgaaatcaaactatctctgaaatttgttatttaagtaagatgttctaaaaatttgaaattcaaaggaaaacattgaaaatagccaacagcttttctatttgtaataataagcctacacagtgtcatacaggtatcttggtgaatattttaacagctaaatttagcagtggcatattcagaaagggttttcttccccttaaaagtgagatacatcatttaaaaaatagcattgtaattggtttaattagcataaaagatcccttttcttttaaattcctgcacagtcacccactgaaaattatataggtataattattccaaaggggaatttaattttactattttctgattagcatcggtggtttccgttcttttgaggacccagtggaagtatttttaagttttaaatttgattggcattcaaaatatctagacacctttgttccaggagacctgcaatgtatctaatctgcttattaaaaaggctagaaaatttaagtctgtttaacagcattacaattaaaaatatttttccttagaatttggacttccccatgaaattcagctgaatgcacaacccagtagcaaactgaagctgtaccttggtcggcgtttggctgagaaggctgcaactggcctgagacgagtctggtcccgacgatgctgtgctctgcctcctcctgctgctgctgacaaccaagccctcccagaatttaaatgctgctgcagacatcctccaccaacacagggaggcggagagattgtgtcatgaggttttctgccactgcccagcccacctgctcccacacttccccctctggttttgtggttaaaacaaaaaaaaacaaaaacgcacacacacaatctacagttaaaacattacttatgtacaatatcattaactagctttttcatttacgggatgggcattcagcatccaggaagagcacttagggatcccatgaaaaagggagaaagtagggaaaaacattaatgtaaaattaaatagaatggatttttgtttctttcggtttaagtaacataaaggtaatatctgcaaccactcttgcctgtatgattgtacttattgaagagccagaaggctattgttcaagcctgcaaggagttcagaaaacttgcctctgtcctttactactcaagcttagctttgtgatttcgagtatgcagtagcttgttacttagacaaatggcactagtgacattaaaatataaaattctatatgaaatagaagaatggtaatttattctagatgttgcagaagtaaagcagtttctgactgagagcaggatgactgcttgagagggctgcttcaggagccagaccgtggttctgaattccgctgtgtcactgctgacctgtgcaaccttgggcaaatcgcccagcctacctatccttgttccctcatccatgaaatgcaatactattacctaggtcatggggtttttgaggggtttaaatgaattagtatgttaaactagcaatgcttagcacatattagatgcaaatgctctgcgtatcttaaggactatatgtgtgttaactattatgaaatttttaagaggggcaggcagtcacgaattgtaatgtcctttaaaagaacaggttattaaaatgagagtagacgtaagatctttaaattgtatgcatcaataaggaaattttgcacatttctaaaggaacagattcgattttggaatcatctttttttctagtttttctcccaaggtatgtaaagtaggccacttaaaaagaaaaacatttttaaaaatttctgtattaaaaaacactttactaggtatttaaaaggtgtctgaatgaaagaaaattacagggaaagtccgaatattagagcagaattcagggatagcagagctctgggtccttttaaaatatttaatattgccttgagattacttatcttcatttgctttctcagttgtgaaatgcagattgcactatttatttaccttacacctttattgttaagacttgtgtgtaattgagatgaaaaataaatggtcctatttattattaggttgctgcaaaagtaattgtggtttttattagtcctaaagtgtcagcttccttttgccaaatattacttttaatataaatatagattaaataatgtcttgcagtgatagtgtatagctaattcataggtttcatgaacatttggtagggggaaatatgtctcccttaaattggatgtattccagatgaattgatatgattggtttgtaggtaataagcacccattttaataagtaagatgacgactatctctataaaatagaaagcacacagattataaagttgcaaaatagacttcttttttctgcttctaaaaactatttttttcctttaaacatacccgcataagcgtgtcatgttgtcaatttagtggagggaagtctgaaaattctaaaaacaacaaaatttccacaggatttactgtagtttactctgtgcccacgggaatgattcaatatgaagctagaattaattataggaatagattatgctggagcccagccatcttgagatgaaccatacgaccctttacaggactcttctggtcatagctccgcagtgccacacgatggcagcatttctgaaaaaagatttcagaccacaatctggttctaccaattttcttaattccagcgggatagaacactcctgtatttaatgacaggactatatacagctgtggagctctccatttct
